United States Patent Application Publication US 2025/0297208 A1 - sequence listing, part 3

SEQ ID NO: 333 - DNA, 18010 bp, Xanthophyllomyces dendrorhous
tatatggggacgaacgacatgtgcgatgagagtacgcagaattgaggcaggagcagagtagagaaagagaagtagaaaccatcagaagtgggagtagataatatgacaacggatggaacgaagcaagacaagaagttcgacgagatgaattgtgaagtatgaaaagatatgaaaaggagatattggaaaaggagaatctggtgtccagaggaatcagaaaacaagaggtgtaaaaggaaaagtccgaaagagatggaaataaaaggaacacgctcaagatgattcttccttgatctctcctagagttcctctcaggtcgctcacccttctccctcttttcaaaccttcgaccacggcgcctccgtccaccgctccgctcgccacgccaccgcctctcgcatctaagatcctcaacgcctcttttacaccctctgcatcaatctcaagtctccgtcttttgtgtgcttgcgcctgtgcgacagcagccgatattgagtttgaggtcgagccagcagatggcgtgagcgaagtcgaacgaccgttaagataaggagaacttgtgtgcgggttaggggagacagaatctagtggcggaagagacgaagtgctaggtgctggggatggggatgtaaacgtctgcaatctacgagaacagacggctgcgaggagagagaggtcggcaaacgtagcgtttggatgagactgaaaggagcaaattcaagcgatgataagtcagaggtgcccgactgaacacagaaaagattgcctgcagattcagtgaacatgaacttactttgagctgtctccaaacatctgccgtagggacaccttgcttctcctgttcgattgggccgtgaggcactctgatctccgggccaccaagcatcaggacatccttgtccgacttctcggatgtcccgcattcgccttggtgacttccacaagcaccgggaaccccacagcagctgacttcgatcatctcgctcttcttctcctctttgacttgaattgctccgtccgctctgtccgcttcctcgatctcttcgtcttcgtccaatgtctcacagaatgcctttccgaatggatcgtcagcacatgcagcacagttcgagggatctcctgtacaactcggaagctcgaccacttcggttttgatgcctgatctatcgagtaagaccgctccgtctgaaacgaccgtacccgaagtgacggacacggaggttgcttcggtggaagaagaagtcgacgatgtaccagccacaatacccgaatcgatcgtccagatagatgtcgaagtcttcccctttggtttccgggcgatccgcagggccgaggtagtcgatgtatcaactccctcactaggctgcgaactactgttcggagaggacgaatccatatcgataaggagggagtccattcctgcgttaagccgttcacgttctttttgctcagcagcaatccgacagacacatgtatcgttctgggtgcagaagccacaagggacgatttggatctcggaggaagaggaggaagaacatgttgtcttgatcgtcttggtcgttgacgttgtgtttacatgacgaggtgttgaagagacggaggaaggagctgtagtcctcgtctgaccctcattgggaagagcggaaggttgagtgtggaaatggcccgtaggcaaagcttgtggcgacgactgggcggcgtagagcgacggggacaagaatgaaggagcttggagaggcggataggcataacgagggtgatatagttgagcttgctgctgctgctgcccaagtccgcttccgtttccatttgaagatgacgaatttgacgacaaagacgaaacggacgaggtcgaatgtccactcgtgtgctctggcttgtacgcgttcgtggagaccagaggagaggtttccgcactttcgggcgtgactggttcatccccaccgtcctcagtctcgggactctctcggtttctatctgacttatctgatcgttttcttttccccttaccctttccacctgtcatggatgacgtgctctctgattggggcgagtcagttgggtcacctccaagggacataaccagggatcgaagtcgagcattttcagatttgagtgtagtgttctcggccttaagcgctagagagactgtttggagagatatggccttctggacctcttgagcctcatctagttttaaatgtgaaaacgagagagagttgttagacacaaggagacacattggatgagtgtgctcatcgatttgactatctatatgaaatagtgcgaccaagtcccttttgcggaaacgatccacaagtaaagacatacattctttgatcttgttctctagctcttgaacatagtcttgttttctttctcgaaatgctattggaccaatccaaagttgatagatatcggtgtaggtgaatgaaccagggatcaagccgacaaccaccgagtcggtcattgtcatccgaaaaaaggataaggataaagacatatcaagagtttactttttgtcagtacatgatagggccatgatccgtatctttcaaatcaacaacgtatggagaaaaataagagagagagcgaacctctctgagcgtccctgttctgagcacctttgcccgtcggcttggcggcgggttccgatgcttttcgacctggccgaggacgaggtggaatcgtccactccttacttgcttttgcaaagactatggaagaaagtaagatagagaatttaggcagagatataaaacggatgaaatccatcgattgggtgtcaaacgaatgtaaaagatagacagtgagcaaactgttcagcagactgtatatctagcaccgttaagttcaaacgacggcaaggaaaaccccagaggaaaggagaggaaaactgactttttccacctgaagaggaagtatctctatctgaggctgagggtgccatgatatgagagcgagagtctgaacagaagtatgattcgatacaaagatgagagattgagagcaagagcaagctgtctagacaaccatgggatggatgggaatggataggaagagagcgtgtttgaaaaagaggccaatgagaagagtccgcaggcttacgcagcggatttatcagataactcgttgttttttaatattttatttttaatattttttacggtttaaaaagttccctttttttctcgtcattcttttcgttcattggatcagccagcagtcgttagcacgatgctgggtgtcgcaaagacagtacaagaaggcgaagagtacaaggcaggattccaacaagatagattcatacatcttcgacaaactagaaagagagcacagctttcattttctttctttacgcatcagtcacactaagcccggacacatcgggcatttctacaacgttcttcgccttgatcagcttggtgacctgcagagtaggggaagagaataactagtcagttggtaaacgattcacgttgccattaatccacacacggaaacacacgccggacatacctttccaatagcgatcgtcttgccttcctctcgaagggtgaatcgaccaagctgagcatagtccgtgaacttttcgatacagatcggctcggtagtctcaatcaatgcaatgatttgttgtcctgtggtcgagagaagagtttcgtaatatagtcataagacacaaaatcgaccgtctttcctaccttgagagcacagttaaactgaaacttaccaggcttggcaaaaggaggcggcttcttcgactttcgaccagtcttgggctcaaggtagtgaagcaaggactgtgagagaacatcaacggaatcataaacatcatttcatctgtccatccatccttcctttatgactcgacatgggaaaagacgcaagaaaactcacaatgatggtgacctcctcttggacagaatgagcgtggagaatgcacgagaatccagcagtgatgatgttcttggaatccatgatggccaactgggcctggaactgggttgctgtgttagcaggagcggcagggttgcagagtacaaaaccgggcgagacatcctcatccgtgatacccttgcatcggactcggatgttatctccacagtaagcagattcgagctcctcgttcgtctcgtcgtagaggtttgtcacttccactgacgtctgtcaaaccgaatgatcggtcatcagctaaaagtgctcacttcctcttcccattgagtactgggtgaatgtttagaacagaagaagctcaccctgttgggcatcaggatcaaagaatctccacggtaaatccgaccactttcaagctttccaacgagcatcgttcccaaatcgttgtacttctccgacactggcaacattaagggtccgttaacctttcggtcgggaacttgcatcttgtccaagaactgaagcaaagagacagaactgcaaaatccgattgttaattcgcagtttgacattgatctgtgatttacgaaaacacgcagacacgattgggaactatactcacgtgttccaggggcacacctccttggtgacctgctccttcatgttcgcaccagtgtaggcagacacaggaatgaacgttacgtcctttgggttaaagattcctttctttaagaacgaactgatctgacttttgataaaatcgaacctctcctgggaccactccaccgtagggtcatccatcttgttgacgacgacgatcaaccgactgacacctgccgtcttgacgagctgagcgtgctctcgggtctgcccacctttgtcgaaaccagcttcaaactctccctttcgggcggaaatgacctgagtggtttgaaaacaggtttaacgttgagacggagacatgcattgtgttttcagttcctactccatgagcgcataagaagcaagcacacgataggaaataaacataccaataaagcaacatcggcctgagcagcaccactgatcatgtgaggaacatacatcttgtgcccaggggcatcaaggatagtgtaccttcgaccagtcgtttcaaagtaggctctaccaacctcaacggtctttccctttgctctctcctgaggagtcgagtccaaagcccaggaaagataccaagactctcgaccggcctccttggcctccttctcaaacttctcaagcgttcgcttgtcaaccataccagtcaagtgaagtaactgaccacccatcgtggactttccagcatcgacgtgaccgatgaagacaatgttgagatgctccttggctagataagtccaacacaaagcccataagcgcaaacgcgacataagagaagagtagatgagcgaacggtcgaaaaggtgatcaaagatatggcatatagcccacacgcaccgttctcatccacggtctttccgccatacaagtcagtcaacgtgtccttcgccaaaagcttctcagcctcggccaacaccgcgtcggacgaagtttttgcgatctctctcgtgaagttgttgattggcttggccgctgaggcggcagccttcccctcctcgacaacagaagatgccggggtagtagctcccgaagcaggggcagacaccgcgacaggggtagcggccgttttaggagtagacgaaaccttaggagtcgaagcagctggggtagcagtcttggaagctgcagcacttccaccgccgagagagacgaccttggccgccggcttagcgccaccgagtgagagcgtaggagccttggtaggtgcctcggtagcctccttccgaacaaacggaacagttggtttagatccgcctagagagatggtcttgggaggaagggaagaaagctgctccgcggcagaaggagcggaaggctgagcagaagacggagccgacgaaggaggctggttggcgtatcgaggctggataggaggagggaatccgccagaagactgagcgggaggagcgttgtaagtgttttgactgtagcctcctccataacctccctgctggtatcctccttggtacccgccctgctggtagcccccaccgtatccaccctgctgaggatatcctccggactgagcgtaagcagctgccgggttgtaaggttgctgataagagttattgtatccctgctgagggtatccaccgccaccgggttgctgttgctgtccacctggctgctgctgctgctgttgagaccgaggaacaaaggcctgtccgggaacgaatgcctgtccaggaacaaagttgtacgctccagggttaaatccggacatgactagctagagactgaaagaaacggttgagatgatgatggtcaaaatagaatgaaaagaaggagaaaaaagaatgaaattgttgtcgccctcatcagcaacttaagagaccttagataagagcgttggataagtcccgtctaattcaaatacttgactcgtctctctctattacaccacactgataaagaaccacataagacgacagatgatgtgtcaaagggttcgaagagggaggagcttcctgagatcattctatcgatttaccagcaaatgttccagttatatccctttgttccttcccaattcttagccaatttacttcgccgacccccattattggtcttggtcttcggactcctgcgtctccatgctttaacgagaaatcttctcgggcccttcgttcatccagtcgggctttgagagcgagattgacgacgtgcgcttcatctactcgtttactcttccacacagtcagtgataagagatcgtgaatcccttccggtggcaagttccacaatgctctgtcgaaggtcttgttgtttggatccttgggtagattttttgggagctgaacatcatcaacgaggaggagaatacagtctcgatcccagacgagagagtcaaaaatgactttgtacgatggactggcagggtatggaatcatgcaaagatatctcgaccataaggcatcgatcggacgaggtgaacttttagccaaagagcgttgagttcgtgatggacgtgaagagagagaacaaggtggcttcgataaggtttcgggcgggagaaaagaataggaagcagtttcggtagatacttgcgtggttggagggatcttggactgaaggtggtgtagtaatattatacgaggttgggtcgcaagcctgttctcattggcgagccgtaaaactctttgaaggataccttcaagattcctcaattgaatgtcatgcagcgtttcacaaggttttttgttcagccgtttgatagaaggcgagacctgcctcgccggagatgatgatgataatgacggaggagagccgaacagctgaggatactgcaccatgtcatacgcagggcgagatgcacagacggataggtcgtcgagtgcgcgctggacgatgttttggataagcacgaccaagttcgtttgaagccagatagcaaagtactcaatcggtggtagcaaagctcgtcgtctgctatgagttgtagacaatggcttcgtcgattttgacatgtgccgatcgatgaactccctctattttggaatttcaagtgatatctttatcagtcgtctgacatctcagcaacgagaaagagaatatataaatgtacctggctgagcggagcattacagatcttttctatcaacaacatgtcatccctcctcttgagtttgtcaaatcgaagtctctgatcgagaatcagacgggaaatccgttcttgtgatgatgaaggccgtgatggtattggtgacttgtctttcagcggtctcggcttttctagatcaattcaaccaaaaaaaatcatgtctagttaagcttgatagggataagccggttacgatacaatttgcataggccaccttaccatgatgaggtagatcaggtcgtatcggaggaatcttctttctacttcttcttggtttcttaagcctgagcgactctttccggagcagatggcaggtcagaacgggtgacatcgcagggccattgatccaacacggtcaaatcaaaagaaagctcacgctttttgtgaaggctctatcgaggtggtcatgttgcaaacagagctactcatgagacgctgtggggtcgacagtcgtcggatcgccattgaacgggtatacatatatcgcgtggtgcatagctgatcgatgcaaactttagaggaagccatacggcagatacagtttgaagggctgactcaactccagtcgtctgcgatgaacctgtactcggtgtgattcctctccttctcgagctgatgatggttagaggtatgagcaaggtaaacatgaattagcaatctcgcaggtattttctccgacccactatcgaaatcaccaacaaccatcatcgtcatcagccgttcactctcgtcttgttgatcgatagatacatcccataagactcatcttcgtcttgtttcaactctgcatagaatccaataggttgatatgtctactccataccgccctccactctcctatgcccgtccgacgccaacgcctctcacctcagcctcccctacaccatactctcttccttcggctcttctgtttcggcctccatcccagcaaaacaattcatccatccagtctccactttcacgcccaagcactcctaccggaaacaatatctactatcagcaaagctctgcggcttcttccgtcactcccggcaatgctggcggcagtttgaatggagctggagccggaccggcagggaccatgagtgctcagcagaggtactactcaagacctccgaatagcaacttacagagtcagccatcattaggcgtggccaacaagacatgggatcgaacaatacccagtcaaagaaagaaagtagagaaagaacagccgccaggtccattcaataacgcccgtatgtcatcacgcttgaatcaaggttgctctgcttgcgtaaatctgaactttgatattgggtttctaatcattccgtgtacagtgagagggatgatgtatgcattcggagatgacccagaccctgcgaacgacacagttgcagtgatggaagatcttctgggtcattttgttcaggagctcgtacgtgtattcaagaatatccctcttcgatgtcgtccttaaggtttggtgtgaatcttacatatctttccttctcaatgtataacgactgcaactggatcgaatagtgcgcactccctcctccgccccaagtgattgcgacgtctaccacaaacgcgcgctctcagaagattactttccaacatattcggggaaacctatcgtcccatcctttgtccgctccgcttctctctcgactagacgaactggccgtcctacagaacgacatcaaatctgctcgaaaagcgatggatccagcggcgaacttgtttaaactcggagggaataaccaaggaccgggtggatctggaggaggaataggaccggcgagtggaccaggtggtgatgcagaggatgaagaagatgaggaggaggaggaggatggggttggtggtatcatcggtggcaagagaaagagaccgtctggtgtcggatcggccaaaaggaaggacagttcgcttgcgggagacatcgggtgcaagaaaaagaaaaagaaaagcaagactggtatggctagtccgtaaacagagaacgtatatacgtagatttgtttagaagcttcgccgtttgtaatcatattaaatgttgtacaagactcttcaagttttcctttgtttttctacgtgaatcatactctattatcgtgacagatgagagaacgcgcccattttattgatcaagaataagaaacccgaaagacaagataatattttgaaggaatcgaaaagaaagaatgtagctcttttcaagcctcgatcaatctgcccttgctgtctgccttctcctctttctcaagacccaggaattccctcccaccgccgactctgtaccagtaatcagtccccaacccaagagcgatcaaccctcccaaccacttgttgctcgcaaacgtcttccagcaactacttctactgtccaaatcgaccgtccggatctgccatgtcagatgagcagccgaacccaaaacggagatcgcgtagaaaggagcggaacatgaagcgagtaaaccggtgtaggcgagtaaagagacaaatgtggcggacataatggagatgattgggatggtttgtttgccaaagaggagcgcggtagattttacggcaactttgacgtcgtcgagtttgtcctgttgaggcgtgggtatacaatccaccagttcgaggtgattcagtcaaatttaatcaccttgtatctgacgtaggccgtcttggagagaagaagggaacaacagtagacgaagaagaacagagacaaacctgatgagcgtagatggtatcatacatgatcgtataaatggaacccccaacatagagagggagagcaacggcccagtccacagagcctgccacagctgaccatcctagaagaataccccagttgaaggccactcctttgtcatgcgtaggtgtgagaaactttctcagtaactcttgatagacaaggaacgaagagagtagcaatgaaacgaggggtacgaaccgagtacggattgaggccagtaggtgattctcttcatgaacggataaatgcccaccaaaagcaaagacgacgcgccaaggtagatgctgaaagtataaagtaaagacgtcagacccaataccaaaccataaaggaatgtgttgagaggctcacctatacatgttgagttgagtgaggactcctaatccaacagaaagctgtagaccgaggaacgcagtagcttgaaacagattgacatcacctgctgctaacggtctaagtctggttcgtgctgtaagacaaaacagcccatcatccgcatcaaaaccaatttcaccatgatgaatgaaacatttttcggaaaggaattaaactcaccaacagctttgtcaatccgcatatcccacatatcgttgatcgtgcagcccgctcctctcattaccactgcgcctagtccgaacaaggcggtataaaataatggggtcgacactggtagttcgttcatcgtcgacgccaagatgattgaccaagctattggaacagtgaatcatcccaaccaggaaacggttaacacctctgggacgttctatctagagaatgttcagaattgatcagacgtacaacagggccagaagagcaaccaagatccgataggtttgtcgaccctggctaagtatagataaggtctcgttccaactggcatcttgtcaacccaggtctttggcggaggaggctcctcaactacctcggggatgacaactgaggacggactggataaactagaatagatccttttgagttggacaggaggaagagctaatcgattagctctgtaggacagagaagatcgaggcggaagcgaaagagctgtggacgatctagccaaggatgtaggaatagaccgagtagtgtgagagagaacatgtcgagtaggaagtcgaaacatggctagatattcctttgctccttctaatgaatttatgtgtgagtgcctccgatgaacaagacagaacacagaatagatatctatgtgagtgatcagggtaaggaaggtctccgatgacaccacgtaaagaagtcaaatagaagagaaaaaaaaagaaaggaattgagatattactaagtcagccgcatcagaataaacagttctctctttcatggccaagtccgacatgatcaatcatttgtcgagatcgtcaaaacatgcatatgcacacatatgtacacgccaggatttataaagaacctatataaacaaacgctgatagaggtagatgaagatagctttaaatgcgcacacttggctaccgtcgtaggctatcatgatgaacagatttagctgagagaccagacgaggagatgcagagataagagagaaaatggttatagagataaatcttcggaaagaagagatgatatgtggtacaaaaatgcaaagaaaccccagaagagaaaaaagagcgaagtgatatcgtggcacaaaggaaaaaaagtcgatgggtgaatgataaagatgaaagttagatgagcgcatggttatgcctcttcctcatcaccgtgtctccttcttccaactaaaggcacagcctcgtatccctcggtctgaccacttcttctatccccagacagtattctgagcttggtcaaaagaccaagaatcacagacctcgtttgagtcgagacgagagtggcagaatctagagtgcttgataaggtcggatcgtaatttgattgggtataggaagtgctgagaattgagcttgagggtcttctccatgactgttgatatgatcagaaaatatatgcttagtctctcatcaaacgctacatggtctaatgcgaacaatgacagaaaaagaactgaccttgagagtcaaactgccacatacgacactgacactactcatcgccatcgccgctgctgccaacattggatgaaggtgaaagccccaggggagaaagacacccatcgctaggggtatcatcaggaagttgtagacacaagcaaaaaccaggttggcctttcaagcgaaacacgaaagcagaaacaaagagtcagacgtctcagtcaaggctaagtctgtgacaagagaaaactaacgaaccttgattctccgcacgatagcgcgagccaagccgagagcagcgacgacgtcaagtaaatcactcttcatcagaaccacgtcggctgcctcaatggcaattgatgttccagatgagagagcaattccaactgaggcggctactaaggctggagagtcattgattccgtctccaacctatttgtttacgttcaagagatggcctgggtcaacatctggaaagagaaatcttcaaacaacacccatgaaaaaagactaaacagaccatggcgattcctttgaatgtgggtgattcggcaaccaaatccttaacaattctggctttccccttcggactgacctctgcccagacgtctgtctccacatccattccgagttctttagccactgcattagcagtcgtgatcgaatctcctgtgaccatcgatactctgatacccatctgtctaagcgcttggattgcctgtatactggagggcttcaggttgtcgagtaaagacacggccaagcaaggggccggactcgaggtgctatcaaagtttaatggtctggttgatgtggaagcaataagagacacgaagatcacagtttgtccaagagaggcatgggaggtggtgaactctctcagaactctaggcagctcagcctcggcctccacggacaagtcttctttggagtctggttgagcgagtctcaatcgagattgggcaggcgattcctgaacgaagcttgctttcccgatctttatgatatattcctccgaatttgccgacgaatgtttcaccttcgcttggacaccttgaccggtaaaagactgaaagtcgagaactgtgctgtccaatggattctgtccaagtgagcgaagcatattccgaccatgagtagagatagcgagggctaaaggatgctcggatcgagcttgagcagcagacacgagggaaagaatagttgagcgagggagcgaattgaatgacgagagataactcaagttatcttctccgaatccagcattaggagatggttccagatttgcctcatcttgctgttgtacttctccaccaacccagcaaaggcctccgacgctcaacttccccatagtgactgttccagtcttgtcaagcaatactctttcaactccaaccatatcctctagtgcttttccgcccttgatcaagatcccgtttttggcacctacgcccgtaccgaccatgacagccgtaggagttgccagcccaagtgcacacggacaagctaccacaacgactgagattgcaagcttcattgcggttgacaaataagttgaaccctccttttggaagatcatcggtaggttgtgtctatccatgaagacgcatgatatgagcatccaaccaacgaatgtggtgagtgataggctaaccaccataggtacaaataccccggcgactcgatctgcgaactcttggattggcgccttgctcgtttgggcatcttcgaccattctgacaatctgggcgagtgccgtatctgaaccagcccgtgtcacctcaatatcagcagtaccaagtccgttgacggtaccaccgatgacagcgtcgcctacttgtttagtagaatgcatggcttcaccagtgaccatgctttcatcaatggtcgtacttccgcgaattaacaatccatcggcgggaatcttctcgccggggagaatcttcacaatatcgccgacctgaactagttcggtagcaatctttttctcgatcgagcattccttgtcggtatagatggtggccgaggaaggagtaagggccatgagatccgtcaatgcggccgaggtctttcccttcgcgaaattctcgagataacgtccgaacgagacaaaggtgataagcatggtggacgtgtcaaagaacgtctgtggtggtgtctctggaggagttgattgtatgcaggcgaaaaagatagtcatggtagagtagacgaatgacgatgtcgtggcgatgacaacaagagtatccatcgtggaagatctttggtgagaatagacaaagttaatttccatctgacttatcccagattgtttggataagttggaatgaaatcaacttaccggtgcttaagggctttccatgcgttgatatagaatctctgtgcgagaaatatctggacagggatggtcaacatcaattcgacgagcgtattaaggaacaagcccctccagactctcatctgaacaaagtccttgacgctttgcccacacatcggtagaatcataccaaacacaaacacaggtacagcgaagaacagactagtcttgaatgttcgcttccattcggcaatctctcgagtcttctgtaaactatccatctgtgccgagttgataccgtcggaaaagataacagcatcgaaagatagcgattgaatggagtctaccaggtctctaatcttgattatcgacgtcgtgtacgacaaagtaagcgtggaaggtgaggatgggtccaaaaatccggctttgagaacaccaggtaggcttaacaaggcattggtgaccaaagcaaagtctgtaggtgtctttagaccataaagctggacctataagtaaaagccaccgtacaaagtccagtcagcgtgtacaattatgacaatcaggcaaacgaacatggagctttggcaaggcctccaggatgagctacacccatattgtaaaacttgaagataaacttacattttggatggaaacggtcgatggcgggagagctactgcgtcaaacccaatgtccgagatctcttctacaattttgtcatcgtcccatccggctccatcaggtccaacccaactaggatcatattcgacgatacccctctcggcaagaagggctactttgacagaaataatccctggaagcttaatcacgcaagattcgatggatgcaacgcatgctccacatgtcctgtgattgatttggttgagaaaaaggagtatatcaagaagttgaaataaatgttgggtcagcattgcatccaatgcacgtacgttcctctgcgccatgtagcagaccaatcgtgtaaatgcacggtacacgctccaccattcaatgtctaagggaaaaaaaaactgtctttctacgaaactttctgccacaaaaaagcgcagatacaacttacattccttcaatcttgagttccactctgcctaaaagagattgactctctttgctgcctcccacactagagtcatcctctgcatgatcctcgtcttctgccagtctcacctgcttgtttgatgaagctcgagggctgagtaagctgaaggccgagccggtcggctgatgtgtgtatggtgagctagaggaggaggtcagagacaaagaacggtttggagaaaggaagtttggtagtctattccgaggcaaggatgaaaggatggaggagagcaccatggctggatgtgatatgaatgttgtgggtgacggggtttcagttgtttatcaatgctcaaatctgataatatcaatagacaagaaaggcgacgcttcagaatcttaagaaaatcattaaaaatcgcagaaattttgggaaaattactgaaatattgaacaaaattcatctgaaactcatcacgctggtttttgagtgtggtttctgtccctgctagctcgtaggtcagatcatgtcccaaagctctctgcaagacaacacagtgatcacagcggtggtggtggcaatgatggcggtggcacaggtggtggtatgggtggcaggtagtgtcaggtagtggcaaacatgacgatgtcgaagacgacgacgacgacggacaaagccataccatcgctacagacagagtcatctacagacacaacaagccatgaggagcaaaaggaaagcgcgagaaaggacgaggatgtacatgatacacaagacacaacacagatcgcagagcacatagtacagactacaggacacagaacgcagatcacagctctcctcgtctggcacgaagcaagccaggccgttcgtcggtgtgaaggatagagagagcgcgatgggatgcagcatggggaggaagagggcaggaacgaggacaggagcgggaatggaaacagagaggatagcgtcctgaacgactaggagcggcaattgacatcgagacatgacgttgcccgcccgtccacccagtgccttgtctttcaccgtctggcacataggtcagcagcaactgcaactgcaacgactcgaacaagccgttgcgtgaagcttagataagctgtctgacagcagctcagctcatccctattcagcaaacgcaaagactgcagaaacagacactatcaaacgagtcaaaaggtgaatccaacgctcagactcagccttgtcatataagaaagacgtcgtcaagtagaggtgctgaaagcgccaagacgcgcagtcatcgtcaaagtagcgactcgtatctgtccatgagatggtaataaccctaacgacaaagagtcaaaccaacatgctcaatttggatattcacttctcggataaatctactgttgttccaatgcgtgaagtcctttgagagcaaaacaatcatattcatactctaatagtgaatcgggtacatatgatggtagtagatgcgctctcaatcatttctttgcctcctttggtaaacaagcatcatcaccactctcctcttagtcagctagctagctagctaaccgaacgcaggaatatacgtcatccgcgcagccaatcattcgttcgtttgaactaaaacaaccgaatcgggttttagcgattttctgatcgaatctgttataacaggaaattcgttccgacatgaatcttttctcttcctttttcccatcacatacactcttcgattcatcgttcacaccaagtaacacatatacaaatatatttatcatggccgacccttctggaaccgcagcgtgagttattcttctctatctcagcacacaactgcttccatcagctaactctctctccgtcttggcacgtatcatcagtacaactgagagtggagtcactggaacttccgctacccaaggacttggaggaggaacaacttctacttctggaggagatttcttggataaaggtgttgattatgctgccaccaaatctggacacacccagtcccacggtaccgtcgagaagatctctgatggtattaggtctggtttcaagaagatgaccggcaaggatggtatgtcttgaatctaaacaaattatgcatctgatcgctcactagctaactcttgtctctttttcgttcagtccctattgctgataagacttaccaatagaaccctccattccggattactacatctagaacgcttttatatgcctcttttttttttttttttt

SEQ ID NO: 334 - DNA, 45956 bp, Xanthophyllomyces dendrorhous
gtctttataaacgatctgtatcccatgtcaagaacttgatttcgtttcaacatccgaatggaataaagaagaaagaccattatgtttgatcgtatgatccgcgatcatctcttcccatagaataagaggtcaagccttacgtaacatcttactcaaggatcctagacaattatcatatccacatcttcatctgagcgggtgccagcgaggaaacctctgatccagtctttgcaaaacaaaggctcgaccgttaagtcggttgtgttgaataacatcattcttgtttcacgtatgtgttttaaattactaagagagggaagaaaaaatagggcaaaaatgatattggatgggaagaaatgacaggagggagaaaaatagagacgagaaagaggagagatgggcgtgattgcctatgccgggtgtcaatgccagtgtttaagtatggagattcaacaagaaaatgggatgatgatgatgatgatgcaaaagtgaaaaaccaaaacctgcaaagaagaaagagacaactctcctagatcaatcccttctcctagcggacctcttcttctccctctcttcattctcctccacaccttccatcgatccaacgtctcttccgacaccaacagccttgactggccgtcttgagccctttctccttcctccgcctacggaacccgtgctggctatggttgtcgtgatatctcctacatcgtccatccctccactacctgcactcgcactcgccccactcgtccctaccaccatcggcccagcaccagtggcagccatcatagccgcatatcgtctcttcgaccctgtgggttctcgctctccggttgatcccccatttccgcccgcgcccacgcctacttgatgtgggatagatactccgctgaaaataccattggctgtgggtccactcatgctcacgatcccagctggagggctatcgactgtagaagacagtgcttcagaaaatgggtcggatggtaggccaaacgtgaaactcggtttcgacggaggaaataaaatcgggctcgccgcttttggtgaaggaaacgagcttgattgagcatccgtcaatgttgactctggagcgaatgccgttgtcgttgttgatgattgtggagccggcgggaaattagcaggggtcgttgatctggaagacagtgacagtgacgtcggtcgaggagcgagaggggaagaatggaccatggggttcagcgatgctgatggagcggagttggtatcgacggtgatagatgatgcttgacgttgcttaggaggaaaaacaggtgacaaagatgaagaagagataaaggaaggtgatgacgactgtggcagaggtttgttttgcagtgtctggaacggggggtgagtggaagaagtagagggtgtttcttcagatggacggacggaggatggtcgagtcggaggagggacagagaaagatgtccgatcagccaagttactggtcgacaacataggcctgtctgttttcccggcggatagccgagaggccggcagaaagttcgattgttgttcagatcgagcaggagcgacagaattgcagaaggctgacgaggaggatgaagaagaggcgataggttggtcgcctgccgatccggtcgaagaagaaccatcggatgtgtttacaggaccactagctggattagtaagcggtacaggcctcatgttgattggagcagaaccggtccgtttcattgaggacgaagcgatcaattgagtgaatcgattgttggcgctacccgaagacccactgggcgcaccgtttggatgagatcctgacttcgacatgacgccaggtccctggcttcccattctgtccccaaacgtttccctaggtttattggacgaattgtatgccgacccggctgctgctgctccgtccccaatatcatcctcattgacgccgtcctggtcttcttcctctaaccggattgtttcctgccttgcttccacccaatccattattcgaccgattgtcatctcgggtccaccaccaccgagagcaccatcgttggctgggtgagaggctgacaagccatgttgaatcatctgaagaacgtcggcgaggcatgtggagtaacctgcagagtatgcacgctgtcaagtttgttgatgaaagagcaggcagatgggaagaagtgtaagtgtgagggttaaaatcaaaatggaaggcctcgagcataagctcagagcgtactagagccgaacacaaacctttgaggttgacagcgaagatttatacaacagactgatgctcaaagcggcggctgttcatgagtcgaaattgaatcaatcgacatgaatcatagtcgagcaaaaatgtcaattcaaccacattcattgcattaggagaagaactcattgactgaattcagctatggagaaaccagcgtacccctaaacttttccatcagatccttctcggcccttgtgagctttgtggacgtctgaagagacgatgccaatgaggagaggtccatatttgtgtcctctatttatcggaagaaagggtgaaatcagaagcaaacaagagctgtatatgaatcctatgcttcagtgcagacgttgggagtagtgtcgaacgattgatagccaagtggctatgagaatgaatgtggtagagttgatgagagagaagaacaaagatagcagaatggagagaaagtgttcaaaaggagttgacaggggtttttcgagaaggcgtaacgaacgtaaccaggagactcgctcgaatgatgaccaacatctctcacacttgatccacctggtcgtaggatattatatatcggcagacaaagtgaaccagaagagggagtgggaagatcatacatggcatagaacaaatcgcagatcaagctgatacagaaagacgaccaaggagaagtgggctgaagaagaattctgatgtaaatgatagcttccatcgacgacgttcggaagtctctatgaaggcacgactatctattcctttctcgtgctctaacaacgactatcatgtataccgatagccttatgaaatcagcgagcatggatacacaccatctaacaggccgaggccgttctgagatggatcatatgaggagaggagtctatcagatagggtatccgcgctggtacttctggtcatcatgctatctcgcatcatcattgctttacttataagcagaccaagaataaacattcagatgcttcagaacccgacatgtgctttctggacactgtttgcgcgctcgaccatcgcctggcttcatctgtgtgcgaagcaatcatttgaacctgtcgttatcagttattcaagtttttttttcaaggacttcgctacccctatcatcatcttctttgtcactcctcctctatattttgtgagcgtgtctgtttcaagaccgatccgatgtacacgctttgtcacagatagatccagagctgctatgaagcttgacggatggtagcttgacgaatgaagaacatcacgataccggacttggttacaaacacgcattatcggtgcttcccgccgataaacaccattgacgtgctttctcgtttttcacttgccgaagatatatcaacgcacttatcgttcaattgagttatctatcttcttcttttggttttcttcacttttctcctactctcatcctcactctcatcctcactcatatcttaaatcacaaacacatacatccgggggtgtatgctcactagatcagttcaatcgttctttatcaatcgctcacattatcttcaaacgcgcgtctttcatagatcgtcaaacgcactaatgactatgacagctgaaaacaaggcgactgaggtcgaagtcaagaacccaagaatcaaagtctcttcttctcttaaagcaggaggatgcgagaagttggatgtctggtccattttctcgtacgtgttctgttcattcttctgtagactccctaccatcatctttgctctcccttttttctcgaatcgctcaaggatggcttgaaagttgcttgaaagcttatcgacctcgttcgcttatcaacctccccgttctctgcctgattctcgcttctctcatcgcaaatatatcagtccatcccagatgcccaaagatacgatcaacctcggccaaggggtgagcaccttcttgctcagatgctatcagcattgccttctgacattttgaccattctatctcgttatcaattcgatgatcgaacaaagttcatgtcatgggcccctcccgactttctcaagaaagcggccgaagacatcgtcgagaatgatgtgatggctcatcattactctcctgctcgaggtcgtccatccctcagacaggctatctccgaccattactcctctgatttccagcgccagctgaaccctgaaaccgaaatcctcgtcaccgccggcgcgaacgaaggcatgtacgccacgcttctcgcgtttctcaatcaaggagacgaagtcatttgcatcgaaccattctttgaccaatataccgcgagcatcatcttcaatggaggaaaaccggtgtacgtgccgttgcacccacccaaagagcaagcgaacgctgagtctggacctggtaaagtcagtcaaggatcggactggaccgtcgactttgatgaacttcggtaagttgttatcgtctctctcctcttgtgaggtactatcccgagtactaaacaagtttttttaatcgaaaccaaattatgtagtgcggccatcactccgaaaacgaaagtcttgatcatcaacacgccccacaaccctgtcggcaaggtattcactaggcaagagctcgagcagtttggtgcgctcgctaaagaattcaacttcctgatcctctcggacgaagtagttcgttcctctcgttctttcttgctcgttcctccttccttaaaacaagagtgctgacatctttttttcttttttgtatcatctcacgcgcttgaatagtatgattgtttgactttcgatgagaacgagcatgtgaggatagcaaacttgcccggaatgtgggaacgaactatcactgttggatcagccggaagtaagcttgcctcgttctctctttgtcttttcgtacggacctttttattcttcaacgtcggcttaccaattctgatgggacgttctatcaatgtgttgtttgataagagtcctttgctgcaaccggttggagaattggtaagcacatcttctcggatctttcgctcagctttgcattggtagagtcattctctgatcgctgttgccctctctatttatcaggatggttgatcggtccggagcacttgattacaccggcgttggccgcttcaacccgaattatcttctgcgttaacggacctcttcgtctgtcttctcttctttccgatctctcgtgtatgctgattaccctcgtctgaactttctctttctctttgatatacacagaggaagcgactgccaaaggtttggctcttgcaaagacacacagatttttcgaaacccaacgggccgaatacgccgcgaggagaaaagtccttaccgatatcttcgatcagctaggtcttccgtacactatgccccaaggagcgtactttatcttggttgaccttggacggttcaagtggccggagaattatgttttcccggactatctcgaagagcgtggtcgagatttcaagtatgttgccttcctcttctgtctgctgttctatcgtctccttgtcttgtatgatttccgaccaagccagaattcatatgtgtgtttttcttttctttctcatttacccttacagagtgtgttggttccttggtcaagaactaggcgttgttgccatcccgccttcggagttttacactccggatcatgttcatatcggagagcgtttcgctaggttcgctttcgtgagtattcttttctagttcttcgtgtcttttgcttctactatctttcctcttcttcgcatactgacactgttcctgatcatgatgctgtctttgtatttaatagtgcaaggatatcgacacgctcaaagctgctggagttcgacttcagaagatcacccagtaccttcacgattgagatagatcactagcatctgtggtgttactaaactttcttgaacatacagttcccgtttgaattcttatgataaaatgtcgtactatgataactggctttggcgtactattgctgtagactctgatgtcgatacagaagggaagtggataataaccaagatgaacagaagcaaagatggatcgacagatagcggatttataactgtactgaaaagatactctaagctgtccggtcggctgccagcaattgctccagccatctggcttctttctccatgtcttccaaacttctcggaggtcgattttcatcggcgtccactttgatactacccgccttcttccttggccgatcttctccattggagcgggctagagattgatggtcgtccaggaggttatcttctgctagttctagcacgggatatacctcgtcattctccccgttgaaatccgttggcttccggggcaacacgtgtacgtgtacgtgtggaacggattgacctgctgctggaccatctctgttattcgccgtgtcgatttcatcgtataaagagaaagaaaagaaaagaaaaagaagagacagggaattagacgatcaatctccaagtacgtgcgcgcgagaaagaagtacacggagacatagcagtacatactgggtggagattgtcagtgcttctcctccataagcgcgttcaatcacggtcccgatcttttgaacggccagatagagatcggcaatctcctcggccgatagatcagccactcgaggaactactctgagaggacaaatcagaacgtctaggtagaacgatgggaagcatcggtaagttattgtgaatcagatgacacaatcgcaacaagagcagccaaagggtcgtatatagtcgacttacggccaggcaagattggcttcaggttgaccaaaccaaaagaaagtttcgatcggtaaaacacctgtgaggttacctgtattagatagaattgattgttatccatacgatggcgaatatgaaagataaagaaggagatagatactaggttagtccggatgaactaacaacgaattagaaaagacgtgccgaaagatgaagagctcaacttgaaggtagaaaagaaaatgtctgaaaccggcgacataggttctgtagtttccatgcaaggatgtgtgcgtgtatcaacgagagaaggagccttaagctgatcgttccttatccgatgtatctgagtatgtttgtatggtcaaagagatggagagacgacggagagaaaggaagagtcgggagtgacccggctgaggctgagatgagtctgtgtagacttggtatgagcctcacatcagcctcggactgaaatacccgacggagacttctatctccatcaaacagcatacgtccatcccgtccccttctcatccatagtcctcgtcctctctcctttctcttcccttcttgttccctctcttctgattcatactctgtactagacgcacagtcatacagaatcaagatacccatgtctagctctcaagataaggaggagcctatggacgacgttcccctcggagacgtgagattggccggggaagaaacgcctggtacacccgttaaggatgatgttcgagcgatggcacattcttcgtctctcgattcagccatcactcaatctaacgaatcaacatctatagacacttcggaacctgccgaaacacccaaatcgagtgaggtgaaccaactggagaaccctgttgaacaactttcatctgaatcagtcgagatcaaagacaacatagatgcgatggacccgatagtcttgaacgccaaggacgcgccttcaaaggaatcgtctgtttcgacaaccttttcaaaagctcctttgcctccttctccctctacttccgttcctccgtctcctccatcaaaatcatcggtcactcacgcaaacggttcatctaaagagacaacgcctgtggctgcgcccacgcccaaaccgctctcggccgttcaaaatcaagaatcaacccccccgaccccatctcgaaccccacagatctctcatcgaagctcagtttcttcaatgcattcccaaaagagctctctttcaaccttgccatcaacctcgctctcttcgatccatctgctctccgccatgtcgaccatggccgcctctaaggacgccaagcgatctcaaccccttcagaaagcactggcaacagcactggatgccatcaagaagagtggcgagtcaggaggagcagtaccggttgaacaaagcgtcatcttagagcctctcaggctggcttgtgagactaagagcgcgatgctgcagagtactgcattggattgtatctccaagttggtttctcatggcttcttccatggggagaaagatgatggagatgtcgagcaggatgagtcaagtgacaagtccgagttacctacttcagcttctgcgtctcctgcgattcacttggctgacgagctgacgttaatcatcacgtcgacctacactgagtccacccctgacacggtagccctccagatcgtcaaatctctcttagcgctcgtcctgtcctcatcggtacctgttcatcactcatcactgctgaaagccgtcagaacggtgtacaacatcttcctcctgtcatctgatccaatcaatcagatggtcgcccagggaggccttactcagatggttcaccacgtttttggaaggatcaagattcctacggcaccaccagcttcgtgggtgtccaacggaggttctactggaagaagcacacccggtctaggcctctccagtaccgggtcgaggcggaaattggatcagccgaccgtagggctcggtatatcagagtctggcgtagaagcgaaagatagcaagatcgagaccccccagacatctgtcgacgatacaaaggagacgaacggagacaaggtcgtaacttcgtccccaactgtggtccaagtcgaaggaggactgaagtctcctgctggggagactcctaaaataacgttgttagtaatctcatcgcgtcgcgctgcttttcttctacagccttttggaaatgagtaaaatcgtgtgctgatcacttctatcaccgggtaatataacttaagatcgacgtactttccctccgattcgacagctgatttggattcgtcggcggcggtgaaccatattcttaattcagctggtaccgccacgccctcaggcgagcgacctagactgaactctgcgtctgcacctcctcaagcgtctgctgactcaagaggagagggagggggaggagaagaaggagatgaggatccatttccgcttacccgacaggagaggttcatcaaggatgcgtttttgattttcagggcgctttgcacattgacaatgaagccattagaaagagaagggtaaatcttgtttctttttcctctgctctaaacttaattgtagcaaagtccatcgaactaaatgagtacaacctgcgtttaatgccgtatcaaattctctccagggacctcaaaactcatgggatgcgatccaagcttctagcccttcatctgatcctcacgatcgttcagtcccatttggccctcttcgcttcaccttatgtcttcattccttcgtcctcagcgactcgatcaactttcgtgcagaccaccaaaaagtacctctgcttgagtctcatcagaaacgctacgagctcagtatcccaagtgtttgaactctgttccgaaatcttttggaacgtcctgaagggattgagaggaaagatgaagaaagagatcgaggtccttttgaacgaaattttcctttccattcttcagctacctaccttcacactcaagcaaaagtccactgttcttcatgtcttcctccggctagcccaagacccacaggcccttgtcgagatctacttgaactacgattgcgaccgaatggccatcttgaacgtatacgagcagctcatggagattatcgccaagattgccggtacccacttcgctccgccttctgctaaagaaaaggagcaagaactcaacggttctagtgttggaggtgtcggtcgaaatgaaggcggtcggacgcgtggaaccgagatggggccgatcatccctcccagtctcacaacgcatgcaatgagcacctctggtggaacaccttcatcatcatatcaaggccacggcccgtccgattcggtctctactctaagttcggccactggatcgacagtgactacgatgtcttcgtgggcgcatcttccggcggaggtcaagttgagaagacaagctttggaatgcttggtaactgttctgagatcgttagttcaatggggaacgagtgcatctatcacaaagatagtcgggtcgggtctgacggttgaaggcgagaacgcaggacgagagagtgaggacggagggagagacggaggagaagcactaggaggaaggcaattctcatcactgggagaaaagggggatgatccagagaccttcgagaacgcgaagcaaaggaagacgacattgatggaaggtattaaaaagttcaacttcaagccgaagaaggtattatttgttctccgaaatattctgctgtgatcgtaaatggcgcgcatgtgtacaatatctgaacggtgattaatattgtttttgttaacgaatttgaatcaacagggaatccaattcttgatcgagcaaggatttatccgtagcaaggctcctcaagatatcgctcgatttcttctacaggctgatgggctaagtaaagcgatgatcggggagtatatgggtgaagggtatgcatatgttttgtctttccgttactcttgttttgggactgattctcaatcctctctggccaatgttttggggaaatatagagatgaggagaacgtcgccatcatgcactgcttcgtcgatatgctggatttccgcaacatgaaatttgttgatgccgtccggacgttccttcagtctttccgtcttcctggagaatctcagaagatcgatcgatatgtgttgaagtttgccgagcgatacatcgccggcaatgcggtcactgaatttgccaatgctgatacagcatacattcttgcgttctccgtcattatgctcaatacggacgcgcacaacaagaacctcaaaggccgacgaatgacaaaagaagagtttctgcggaacaacagaggaatcaacgatggacaaaacctgcctgatgcattcttggaggatatcttcaacgagattcagacgaacgagatcaaaatgaaggacgaggttgaagtgcctcaagtcatggttgcgcctgggttggcaaacacattggccaacgttggaagggatatccagagggaggcatatgtgttgcagtctgaaggaatgtcgaaccggactgaggtgggacttgttttgtattgaccttttatattgtctctgttcgctgacagatacctttcttcaacatactatctaggctttgttcaagaccatgcttcgacaacaacggcaaggcggtcgtcaaaacgagcagtattatagtgcttcccacttggagcacgtccggcccatgtttgaagtcgcttggatgcctgtcttggcggccctctctggtcctattcaagaaactgacgaagtggatgtagtagatctttgccttgaaggtttcaagcatgccattcgagttgcttgtttcttcgacctggagatcccgagaaaagcatttgtcagcacgttgacgaagttcacgtatttgaataacctgggagagatgaaggcaaagaacgttgaggctattaagacgcttctggagatcgcggtaaccgagggaaactacttaaaatcatcttggagagacgtgttggtgtgtgtcagtcaactggaaaggatgcagcttatctcgaacggtattgataccccagacatcggtagaagacagtaagaattgtccaatcttgcatacctcttagacgttgatcgtttgtgcttatttgttcaaccttatctaatagatctttggcgaagaaagggtctcgtcggggacctggggaagacgtcgccagcgaaagtcgatcagctcaagtcactgtcgcggccgatatggtattttcctcaacgaagcatctttctggagtgagcaaaacatgtttcttaattacaaacacaatgtttggtgagctgatcaagttgcttctggtcgtttagtcggcgatcgtagagttcgtacaggctttgagcgaggtctcttgggaagagattcagtcttccagtgcttcccatcagcctaggttattcagtttacagaaattggttgagatctcgtattacaacatggctcgtatccgtttggagtggtcgggtatatggcagatccttggagagcatttcaaccaggtaaacttgaatcaaacgtgctcaatctcttgaggacatcatttgctaatctgctgtttctgcgggttgaatcaggtttgttgccacaacaacccgaatgtcagcttcttcgctctagatgctttacgtcagcttgctatgcgattcttggagaaagatgagctgtcacatttccaattccaaaaggactttttgaagccttttgagtacacgatgattcacaacaccaactcagatgctcgagatatggtcagtgttttgagctcgttatgagaatacctcaatgactggtatagctaatgtgtgtcttctttcttactcggatccacaggtcttgcaatgcttccaacagatgctacaggccagagtcgggaacatgcgatccggttggcgaacaatgtttggcgtcttttctgctgcctctcgagtcctcactggtatgaatcctaagtttccatttctgtgaaaagagacatgccttaactaacctgacgagattttcatgatcacaaactcaacagaacgtgtcgcaacttatgcatttgagctggttcagcgagtgaataaggagcatttctcccatgtcgttcgatacggcgcgtttgccgatttaactgtgtgcttgaccgacttttgcaaagtcagcaagttccagaagatatctcttcaggcagtggagatccttcgaggtgttgttcctgcaatgctttcatcctcggactgcgctctcagcacgcaagtggactactcagggtataacggagaaccaaaggccttggaagtaccgccaatcaatgacccgatggtcaagttctggttccctcttttatttgcgttctacgatgttgtgatgaacggcgaagatcttgaggtccgaagagtgtacgtaccattcaaatttcgcctcttcaacataattgaatgaacaaagtctgacttacagatctgtgttgccatacaccagagcacttgattctttgttcgatacactggccacccatggaaagaccttccggcctgatttctgggacagtgtctgccaacaggttctcttccccatcttcgccccacttcgtgctggacctatgcaggaggatatgagtttctgggtttcgactactatgcttacggctcttcgaaagttgattgacctgtacacattgttctttgagatcttggaacgattcctcgatccactgcttgagctcttgtgcttctgcattgaccaaggtaagaccttcattcattgaagatgatacgttcgagatttgctcgcaggctaaatttcaagcacaattgactcttctgttcttctatactcgtagaaaatgacacgttagctcgtataggaaccacctgtttccagcagctgttggaaagcaatgtgaagaaactcagtcctgcaaagtgggaaagaattgtctcggcctttgttcaactgttccagactactttggcacacatgttgtttgacccgaatcttcggtccgaaaacgaggtagccgattctccccaatacggtaagtttcgcatgcccttttggcagctcttactcacaactaaaattatattcatccttgccctatgagtatcagcctctaccccaacaactcctgagcaacaaacaacccagcagcaggatcaaataaccggaatctcagctaatgaccgacgtcgaatattccgccagatcattcggaaatgcgtgcttcagttgctcctaattgagacgacgcatgaactccttcagaacgatgaagtgtatcagacaatcccggctgtacaccttcttcgtttcttagaggttcttgatgatagttatcagtttgcccgaaagttcaatgccgataaagatctaagaatggctctttggaaagttggtacgtgctatttctcatctccgttgctgctatcgtattgagcttatacgcgatattttcatgttcactcatgtatctcgggaacataggtttcatgaaacagcttcctaatcttctcaaacaagaatcgagtagtgcttccacattggtcaacaacttgatcaggatgtacaacgactcgagaacagaccatcaagcctctagggaaggtgttttgattaagtttgttccgtgcgtagccttctctctctgtatgcaatacctaatttgaatattcactgagccagctccaaaatacacatacatgcagattgagtctggatattattcaagattttaatcaactagaaccagagactcaagcacgtcatattgctgcctggagccctgtggtttgcgagattcttcagggttactgctcctttgacgacgaaactgttcgtatcggctttcctctgttttcaacttactttcatgaaatcagataattcatcacatgacttatcacaaatatcatctctggttctgtaacagttcaatgcgaacctgtcggcactatatccgctagtcgctgaagttcttgcgcgagaaaatgctccagaagttagggagtcaatcagagctgtgttggtcaaggttggacgaacgaaaggaatttgttgattgaccacaaatggaagagcgaagcagaatgatcgtaaaacagacgacagaaatctggtctctgtttatttgctctcgaggttgaatgtttcgtcataaagtcgttaaagagatcatcggtcttatggatttttgttgttttgtctgtttgaatttagttctttttctttccttcatcttggtttctttttatctgccttacatgcttggctactccttcacttgatttttttttaaattgcgcatatgactttcctttcacgaacatgttgattcacatccttcacaacttgttcctcgaaggtatcgtgccttacaaaacgcgcaaggtctatcatcttgtaataaaatgagaggaaagcgatatcattcatcgctaccgatggtctattctgctcgatgattcaacattttgcattgacttttgcagttgatgccttgttcggacgcacagcctcgtaagttgtgttaaaaacccaatcccctattgatatttccccaagaaatcagagcgtttagtacaggctaaaatgtgaagtctgcttgaattctattgtatgtacttacaaaatttggatgtcaccccgaaccctaattctgtatatcccagtgcggggtgatacagcaaaagatgatagtgtcaggttacagacaccgatacatcggtaggtcatttacatctgagggacgaaccataatttttataatgatgttcaagatgatactttcgttgtcggtcaaagtagccagtcatctgtatatgatgagatctatagagatcaatgtcaacacaaatcaggttgttttgagcattgcattttaccatttatggacagctagtgaggctcccaagagaatgtatgaaagacagaactcacgcatagtggaagcaatcatagcagacatctaatttatcgatacccagaaggaagaaacagtatcgtcatgtcttatccttgagtacaaccgctcatgaaggaaagaatgccaaaactaacagccaaagaaagcgccggcgatgattccccaagcgcctgctccgtctccccaagcgatgatcgtatgagcaagtgttgtcattgggagctgaagagtgaagaaccttcgtatttgaacaagaccaagatcagcatacccgtcatctttttgtctttagagccagaaggaagtgaacgaacatcacaggaggcataactaatcgatatgggtccatcctttatggacaccaattcaaagacaatatgagagagagaggatgagcaacacatatatcatgaatcagaatgagcaaagtagtgttgactatccgagtagggaagcgaagtgagatcagaaagatcgacgaacgggaggtagtgatgtacgccatgcatgaggaaatggatagtaaacgccttagagtttgatggcagaagttcgtccaaatggaaaaggacttccgaaagaagtgggatgaaagatttagtctgtgatgcaggtagttcgaattacgtagaaagagaaagtagatgctcacatcgatgaaacacgtattccaacaaagtccagattactccacctagtcccaggcagatcgtcgatttattcaatgcgcgatcacttacgtgaggcgctgccacgcgtccagtgtcacgcaagtcatcataagcgttgtcgaagatagatcgggcggtaagatgaagatgaggatttgaaaattgaactgccgagacataggctaggaacattgctatgggtagccagatcagagggacgatgaaccagtacgtctttgtgaagacctatttcagaaactttgcgcgtcagaattgaatccgacaagatgatacgtctttttcttaaatcgcatattgaagaaactgtaactgacttcgagataagctggtccaaagagcaaagcagaacgaggaagatggcgcggttgatgaacttgagatagatagaatgccttgctggatgatcaacgccaaacatcgatatatctgatgagccaggaatggagaagagcaatggcgaagttcactgcaaaattcaagaaagacgaacctcatcttggcgttccaaagttgtggaagtaaagctttattgaggtctaagaattttgattgtttgaagtcatgagccacatcggtatcctctggcacaaacccatcaggtgccacccagtcttgagtccgacgcatgacaagtccagaggaagagagagaatgaatcatctgatgtcaaatgaagagaagagaaatcagagtcgctcaccaggatcaacggttgtctgaagatcttccatcatctcccaagccgcctcagagtgttcatgcccaccgctggctctcatcgcctccgtcacatcctgtccttccaaagccttaatacactccgctcctccaggatggtatgccaagaaacttgaaatggagaggagcggttagcgctgaacaatgatcaacgatgttgcgaatgtatagtagagtagagtcgttctaaccttgagacgtcgtatcgttttccgttgtggtgtaccaacagagcgggcattgcaaatgtcgaattttctttttttgtggttatattactgttgttgtcgaacttcggatgagagtaagagtatacacaacattggttgaagaaaggcagcttccgtttgaggtaaggtgggaattaagaagaatgtataatgacaacagaccgaaggtatcagaagactgacgaatgtcaagtggaacggaggaaggctctcgggaaaagttgctgatcctctattctgatacggacataaagaccaccgtcagttgatggtttagtaaatcgatgatggtcacacatgtgtatgtccatgaaatgaatgatcgaaggtctatgtcgaggctttcgagagcttagtgttgggattaattcttttaagaagtattagacgaaacaagacagtttgaacggggaaaaggggtaattctgtttcagctggtatctgatatcgtaatcgtcatatctgtatcggccgaatcgtttttctttctgtacttctttctggatcctataccggttttcaactgttccgatcctacgtttcattcatggacaggtttgaagcctttcagtttctttcgaatctctgaacgatagatgaatgtatatatctcttttatgagacaaaagtgttgagagggctggtgatattaaaatctctcaaggtcttttgaatccgggaggaaagacctgccgagcgttgatgtttatcctgggagaccaatccatactagtcttcagcctatggaagagcacattgacacgatatttagttttccctctcttacctagttgtctccatataacgacccagatcttcgtcccatgatgggctcacttggtcttctggcaaggaaggttttagatgtgcaggaagtgtgtcatctagtatcctcggaacacctgatattgcgaaagtaaaatcaagcattctctatttcaactgaccgtttcttgtcaagatgctagaagcaatgagaaacgaaccatgatacgctcttctcccgtgtccgctgagaacgacaacgtcacctgaacgaagcagtattggcaaaggaggggtgtctctggaagacgttcctaatagaaatactgcacttagacctaaactgtagagagaaataagagaagagaaagagttagtagaccgtcttgagaattgagatattaaccagtgatgggtgctgatgaactgacgaaaccgacacaagaggtcgatgagcgtccagttctgagcgatctacatgagccatcaatgtatcctgaattaaatagacaacaaaagatgtatcagaatcatgcacatcgcccatcattcttagacgtagacaacttacatcgggctggtaaaaatttatgatccccgcgtcgggttcttgagattcaaacgatttgaaacaagatgagtcggtacgcagatgtttgccccaagcgaagtcttattgtcgattatgtaggtacgaactgtagtcattccattgctcccatttgaccctttctagttccattccattctcgtccttggatgaaggcgtgccatctacgccgagagatccgtaaaccagagaccaatcaatgtccttagaaacgatctgtcgagatatcatatcaatatcatccgggaatggtatgggagtatcaaagtcgtaagattttgaagtccactgaggtgtacattggatatacagggatatgttggattcaggtcacattcgttttgggcacaacaaaaactagatatatgaggatgtattttggactcacatcataaaatagcccaatgttcgtccaccggagttctcggatgagcttgctaatcggtttcggtcggactgtcttgctaggctctacaggtagaatttctctcttgccgtcggaggcgaccgtgtttagaaagtcctcacccggtaagttctctatgagcgttctggtcggtggtattctgacaaacttttgctttgatccttcttccgaggaactgtcatcctcgagagacgaagcgcgcgtgggaactaatggatcctctggcggatgtgaatgtaaagaggaagtgtagagagaccataatgaggaagagggcgttttacagccgtcatccgagaggggggacgaagggaaaagaggagacggaggtaggtgaaagtgagtatctagatttgtcttattcggaggttgcgtatggatttggaggcaggacttgacaagaagccgttgccgttctggagagaaatacccaggaaggatgaccaggcctgaaaagttgttcagactagaaatatcagtagcaggtaagttatcaagctggttcaagagacgttcagaaaaacgaaccaggcatcccgacaacagcccaagcgtccacttttccctttccaacagacacacattctacatcttcccttcttgcctccgtccagccagcttggtctagatccccaggctggtgtcgcgtagaatctagcaaccgcctaggatcaaacacgtcttccaggctgggtcggaagatcgtttttggtcgtcggtttgacgatttctttcgaccacaaggagaaggatcggatcgagctttgaagtgtttttcggacagcctgaacggagtggacatagttgctatatttgtctttgtgcaccctcgaagagccatgcagaagaagactagtgagtgcttgatggcagtagcagtgtagtttgaaaatggactataaaatcgattatagtttcttgtagtcgcctgtagaaaagccctaatcagctctaaactactctccacgaacattcgtttatccatcccatcgagaacgaccatcacccgttttcattgtttaccagacaagaacaaaggagaggtctcaaaaacagtccgatgtcggttccatcgttatcaacatccaagcttagcgctctatcttcgtcgacgcttcctcttgttttggagcgtcaacgatccatctccatcggtcttcaaccgccagctttcacagaggctaccatcctcaagaatctcaatcttatccaacaaggtctccaggctatccattttcagtcttccacagcaccggtctctgactcaaaaggcctgagagatggactcgacagattgctgggtctgatggagcaggaccctgcaggcaaggagaaggttatttcgatacgcgaattcttaacgtaagttccgtacttgtttctttttgttttccaagagagccatttgaagcgtttcgatggcgaacatgctgagtccgatgactgaagtaccatatatatcttctattcatctgtccgatgaatggtctcgacagtgagcttgcaacgccacttcccagcgtagcttctacaagacctgcttctccgaccatgcctgcggcccaccttcccaggacgaacgagccagttttcggcgagtctaagccacaatccaacaagccttactcatcttatagagatgaagaagatgaggagagttcgccgtttgatgaaccgtacagggatgattcagaggtcatgatgcagcaaagggagatgatgagtggtttgttttggtcttatgcactcatctacttatcataacgattgatgcaaataggctgactcgctattctctgttttctgaactctactccgtctttatctatcgcagatcaagatgcccgtctcgctcagctctcgacatccatcaatcgtcaacatcatctttctttacaaatcggagacgagctcgaggttcatcaggatttattagacgataccgaccatgctcttgaccgaactaccgttcgtcttgacagagcccgaagacagctcgacggatttgctgggaaggccaaagagaatggtgggtcctgctcttgtcttgtgtgatattgactgccagtcaggctgatttgctgttcgttgaacgggatggatctgatggtgtagcttcggcagtgacgatcgtgatactcattgttctgctagctatcttaattctggtattcaaaacttgatctcaagatagagagagaaagacgtatacctttatgatcggagagatataaacagaacttcgacattgtaaatttatcctgctatacctattgctgtataaaatcacgaccttgctatgcatgactgttccattgcacgatggcttagacatttatgctcttgtatttttatgcacactgatcgggagtctgaggatagaccatgctgaggctagatggtctgttgtttggaaagcgcttgttgccgaaagttggaattatgtcattttcgtatcttgagtggatgcccagtcatcagattctatcaacgacagctatcgaagcctttacagacatttacaccaagtatcaatagagatccacgacatcatatacccaatggaatccaagttgactacagacaactgtctgcttctagatggatatgttctcaaagtgagtattgggttgtgtcatgatgggtctctaggatctcatcttggatctggtacgctttcgctgataacggtaaccttcatttgtgatccccacatcgttattctctacaacctagacaccttttgagcttctccggaggtcattcaaaacatctcaacgaaatgttgagaaggattatggatttcttcttcagttgatccaacaacttcggcaagtcaccaaggaggactcgtcgtcattggcagaggtgaaggaggacctagtggtcaagcttgaaacgggtatagaaagagccaagggtttgaaacgcaaggtgtgttcatctcatattttatcgctatgggcaaggagcaaccgtaacgatgcagattgaaccagatatctgaaccccacatatgaatcttgaccctgtgggagtcagttagcggacctactgccatcaccttcaaacccaactctgcttcgacctaggttagatcatatctccaaagtagagacattcgcctcgccgaatgaagatcagttcaagatgtgagctcttctttctcttgagtcgtgtcgtttgtctctgaagaacaggaagctcaaaagaacctgttctgcgtgatcatgcgttgtcttttagatgggacgatcaacgttacatgcgatatgtcattgattatcttcttcgaactggaaagctagagtctgctcgggagctagccaaatcgacccatcttgaggtcagtctccttatatcatatctgtctgtttatctcatttgatgataactgacttctgttttcaggcgttggtcgatctcgacttgtttcaagaattggcccatgttgaccaggctcttcaatcaagatcttgctcagaggctttggtctgggccggagagaatcgaggggctctcaaaagagccaatgttagtcttcgttgtcccttatagtctttgcggtttgccgctttatcatgaacatcgagtatgctgacatagagctctccaatggtatcagaacccgctcgaatcttcgcttcgtctgcaggaatatatcgagctctgtcgaaagagggatctcgttcaagcgctcgcttactacagaaaatatctcagtatttggtacgaaactccagaagttcgaagggctgcaggtctcttggcatttgacgaacaaatcgcgagaaaagtagggatgtacgctgtgagtagccttgtaaaactatcttcagattcactagttgagctacagggaagtcagatctgagctgatatcgaacattgaccatcgaatagtccatgtatcatatcagtagatgggatactctccgtgataaatttcgatcgacattcatcgatgtctatgcacttccggctgtctccccattcatcacttcccttcttgccgggcttgctgccttcaagcttccagcttgtagcccagatattccttatctgttgctaccagcttctactaagccacctttcggttcactcccaacctcgaccactgactcgagttcggtaggagaccaaggcggtggaagggcgagatatcagatcgagttgggccaaacactcacgtttaatccatggccgagcagcggagaaccctcttctgggctaccgtcatcttataatttaccggctcttggtccacccactggtcttcccagctcgcacctttcgacaagtatcagcggaccggcgacactctctttctcttcttctttatcccctttctctgatttcactgctactggaggattaacaacaatactggatcacccagtaggacgagcaggcaacccgtcatgtccgacatgcgattcacatttgggagctatcgcgaaagacctcccaggaagccataacgaaaactcagtcttggtctgtcggatttcagggagagtgatggatggatcggccgagggaagtccagtcacgtttcctaatggatacgtttattctttcggagtcagtctcggtttcttttactcttcatggcaatcctcgaaggcgcaattactgccatcttgctctcattttctgctttgtttgtctaatcttgaatctgatctatatatccacactttttcctcaggccatgcaagagatggcaaacaagaacaatgggatcgtgacctgtccgcgatcaggctactcttgttcgatctctgaactcaagaaagtgtttgttctttgaatgggtttgggttctgttttctttcttttcttttttcaagttgtatcagtgtgaacccggagttatacaggctcaatgaatttatcttctcatcatacgtcccgccatctgtaattatctatctacgtgtatgtgcattgcatatcatgtcagtgtaagtgtgctcgtcattgttcatgatctctgtcaaagaaccagaacgcgtttgagcagagcaagaaacaaagtacaaaggcttgagcatcagatatcgtttgaaagcgtaggtaacatattatatgaacagaatggctcaagaagaataagagtggtagacacagacggatacagtgtacaggagttcaacgggcaacttcagcttgggcaggagtagcagactataacgataaaataagacaattcatcagtgatatgagcagagcatccaggcgaacagaaagaaggagaatggaggcttacttcaggaacaggatcagcgtcgacaaagtcaggtagcgtattggtgttctgaagataactaggaagtgcgccttcagattcttcttctgcgtagccttcatcggctaaagcatcgagttctgtttttaaaagaagaaaggtgagtgaaagtttgaaataacggcataggcgcacaaatgctttgtttatattatcgtcaaaaggccagaaaggttgaaagtggaaagactcaccagcttgaagatcggattcatcaatctcatctggaactccataacttctccctagtgattcctggatctcatttgcctggtctattaggtcttccatgtcatagtgaatgctctgtttgacagcaggaacgaagtaagtacgaagaattggcatgggaatggcaagaaggcgaaggagaggcatacctcaatcttatcaatgttgatgttcttatattgtttcttcatctccttgttagctctttgcatagcgtccactgtagccatctttgggtgagtgtgcgggtatggtcagcccgaagagcggagaagaacaacgtgagcgcacaatgcaagaatatgtgatgaagaaggaaggacggacggtgttgcgcaggttgtctgtcgtcatgctagcttgctccatgttgaacgtctgttgttgaagttgttggagttgaccttcgtacatccgtttttgtttcaatacaccgatggctcttttttgaattgcaccctgtgaatcatcgcgcgcacacgtacacatatgtacccgggttggatgtatgttccacgagtcagaacagttgccaagaaacgactacacgaaaattctcacctttcctggtccctctctcattttggccatttggtctctatatcgcgtaagctctgcgtcgagtttcctgactttgacttcaatcgtacctatcctggtgtcggtcttacgggtggaacacagagagctaacgatcagttatgatgtatgaatgagatccgatggaccaaggacgtttgattcaccgaggcaatagcatccgatagattcggcttgggtgttgccttcgagtttccaaagaacctgttcatgatgtgtatgcgaacgatgtatgatggttagagacgagatggtggccgagtgtagattgtagacgaatgatgaacgtagtgggatatatgaaataattcaaaattacttaggtagtgttacctaacatgtcggccagctcctacccaacactcccacctttacactcgacttctcttccttctctttcttccatcagctcttcacgatgggtcagtcagaccgtctttgttcgagacgccagacttggactagacccaagctgatggcatctaatctctcaacgtgaatttctttatataactatgtttaggacataattcggataagctttacgtcaccgtccgttccctctttcatttcacttcttgttctcttttgatcacttcagagcacatgaagttatcaacttgtctttgaaggagatcagcccagctgaataaagaacatctgtatgcaaacactatgattttgatgccaacagcatagtgaacacgccgccggatctcacaccgcaggaggaggaggataccaaggcgtcaagaagcagaccgagttccaagctcgtcagtctttcttgcagatgaatctcatttccttgacccttcaattgattgaggctgatcactgtcatcttctctctgactgtatctcgttgtggttctgttattttattcgacagtcccatttgactgttgcgcactcagcttgacggcctttcaagtcccagtagctgttaaggaggaggatggaacagccaacgtgtaaatgattctgctcttaggctaatcagacttcaacttcaacaggagaaatccatttgcatccaaacttactttagttccatattcgtttgtctcacagattcgacctggtcaacatcctgccgtatatcaaaaaattcggaaccagtctgttctcctccaacgtttctactccttcattattcatacttatatcaaacatcttccgttttcaatctctccaaattatcagacccagtcacaggtcgtcccctcacaacagcttcattgatcaagctccacttcttcaagaatgacacggccgaaaataagtcgtattcggatccagtcacttttaaaccctttaccccgcatacccatattgtattcgtcgcgacaacgggcaatgtgttttcgtacgagtcggtcgatagactctgcatcaagaccaaggcttggcgggatctcattaccgacgagaagtttaccagagcagacatcgttaccatccaggttagcttcgatccacatcttggcccgcgtcatccctggtccaatctgattagcattggctgcttgttatatggaaatttcttcaggatcctcacaacctgtccaaccgagatctctcaaaatttgactatgttgccaacaaaaaatcggccggtgagaaagaagctgaccgcttgtcaggaatcaatgtcaatgctagtggatctgctgccaaaattttgcaacagattgcgcagaaagtatgtttattgaacagtcgtcgtacttctcgacacacccatttcgaggataggcctgatgtctgacatcttccattctttcatgcatatagaatactcccgctcctccttctgaggagactcaacctccgtcttcggagtctgcagcacccaaagaaaagaaggtgggaattgttgcgcccaagccggtgaaccaacgagcttgttcgtgcctatcctatattttctctgacaagatctggaaccgagattgaacccttacatatcatcttatctctttattcactgcttagataacgcggcaagctactcgactggtttggcagctgcctctctcacgtcgactgctgctgatattgaaacccgaggtgatcgagctctcatcgatgaagaagaatgtatgtttaggatttcctttctatctgtttaattcgttaaatcacacaaagttacgtgcgttctgaaacttctcgtatatccttgtgtgtgagatagttatgtttgatgagatctcatcattagtcaaggaaaaggatcgggcaaaacgaaaggcatatctgaaagtcaatacgaactttggggcattgaatttagaattgcattgtgacaaggtaggagccctctctttcttgttatacttccttcaagctcttcttcgactcatcatgatgtcttgatttatgctaccaggctcctaaaacgtgttacaatttcataatgcttgccaaagaaggcaaatatgatgggtatgaagctgccttgttccatccctggtcaacacaaaagtggacctaagctgacggaatgatcttttgattattcaactctctgctcaatacagagttatcttccaccgaaacattcctggattcatgtacgttctcccgtctcttttcttcctcaaggagttcatgtgaggcagtcgaaacacaaactcacacttctacccattcatgtcgttgacctcatttaggattcaaggaggagatccaacagggaagggcacagggggaaattctttctggtatgtttcagctaactatgtcttctaaacgatcgttgacaattgcacgaagatgattgtcatctttgttgcactggggatggctgatattctctttgtatgatacaatataggggtcataatttccgagatgaatacgatcttaaaggcgctttgaagcatacagaacgaggaacgttgagcatggccaaccacggagctggcacaaacgggtacggtgtgtttcttcgtctgcacatatgtttcaacatacgctgactgctgcttgcgactaccttgcggttttcttgatgttgcgcatacaggagtcaatttttcttgacctaccgcccaacatcccacctcggtaagtttacatgccaacatagttctatgaatatacttgctaacctctcaattccccttcatcgttgtatgaatatgacagatggcaagcatactgtgttcgggaatattgtgggtggaatggatgtcctgaatgtcttggaaaaagtgccagtcaacccagctacagatcggccgacaagagaaatcaaaatcataaatgttgagatgtacgtagatcctcctgctctgttcagaacacttttctgatatcttccaccgtcatgtatcactttccttgggggtttcctccttcaaacattagatttcaggatccctatgcccaataccagacccgacttgccaataagctggctgctcaatctcaatcagccttgtcagataagaaccgagaaaagactcgtctcgaaagagaatccgatcgaacgtcttggttcggggaggaccttgatcggaagaaggcagacaaagcagagattgacaggaagcgaaaggcaggtgttacggaggatgacttattggccggatcgattggagtcggaaagtacctggcagaggcaagaaacaagaagatcaacacggcagcgcctggcggagcagggacattgtccagcagttcaacgttcggaggtggtggagtggcaaagaagaggaaacctgctggtggagggtttggagatttttcatcctggtagtctccttagttctcaaagtttatttgccatcattcatgtctacttcgagggacacaagagatgatgtttggtcataatatgatgtatatataaagtgtagggtttggtatatgatacagtcttagaatccccctttgctcctatccccaccccatttctccgtcagatctggtcaagcgtatgatccttcaccggttcatccacctctattgcgatctagcacatcctgtccgatcacgatcgtattacgcacaggcgcatcgttgatccacaagactctcgaaagatcctcttcctgacttagtatcgactgggaagacagattcttgatccgtctagcaattgcttctgatacagcggccgcttgtgattgagccgttcgtttcttatcctgttctatcgaaccacttcctcggtcgctcggttttgggatatcctcgccaccactgacaccctcaggatctaaaagaacctcgaccagcaaacttctcgaccctccttcattcgcctcggcttgaatctctaaaagctttttctccaacgctagaccattcaccatctttcgcccttcaggtagaaagatagctacttcgccctccagtaacgactcatcctcttcctcgccctcgcccaaagaagatggctgaatgatctgttcaccacctgctggatcccagatgatgattcctgaagcaccggccgctttggcattcagcaccttttgaagaaatgtgcatcctccacgacggacaagcaatagatgagcgtcctcgatctgcgacacaattggagagcatagatcaagattcaacggataagaggaagccaggtgtataggcagaggaggtgagcatatattgaatttggtgggctggatccgctcaggatccgtcgtgtcagagaagataaaagaagatgatagacaagggctgatgagtccgccaaatgtggcggcgccacctcgggccacaccgacagcttctttctgggatcgattcgaaatgtagaacttgagttgaacagtaggattcctttctatttgaagagcattggagaaagattgtccttggccgaaaagtgagttctgacgattaagcgcaagctcttccgcagcttgatcgatttgtttttgattatcatcgtagtgtttgttaagattgatgtcggttataaacaactgtgaaaccgccaaacgagtcaagttccaagacgcatcgttagatgagataaagattgtcaagaagtgtatgatggcaagagctgaaatgatgatgagaataccttctcgcctgacttgactcgatgatgcccaatcttggttacatcatagccttttccgtccagcctctttgttacttgagctcgaacgcctgttgtgtttctcagaatccatccctgatcatttttgaaaagtttttccgaatttggcctgagaagaagcaaggaagataactcaattgatactggcacctcgcgaaatatcgctgaaaccacacttactgaagatcctcttcgttgctcgatcccatatctgccgtgaataacacatcaatcatatacggctcttctttgggagtctcgcacatcaaatgagggttccagaacgggagatcttgtcttcgaatggctcgattgatcgtcaatccggcgagatgacgtgcaaaatcgtagtctgacctcctgcaacgtttttaaacaaagtgagaaatgtgggttttctttgattaccgagtacccagctgataaacaggaatcttatcgtaccctttgataccacccaatagtccgatcccatagtcatcggctctctcccgcttggaattgatggaataaggattgtaaagcaagcgcggagaccgatataccggacatgtcgactcaggatgagaaagccgagatcgctttgtatccgttttttcgttcaaccttataggtcttaatcaagagttggtcagattaaaattcaaaaagttgacagttaatttattggtttgttaaaatcgcatacacacaaaacgaaacatcactctgcggaagaacgacttacggaagaagtcgagaagcatcgagatataaaagatgtccttcggtggtgaacaccatgttagaatgatccttactatcaacatcaaatagaggtggaatcgtcagagcccctcatgctttgggtgatgtgctgactcgatgaacttacttgacaaaattatcctcatcgaacagcaagtagaggtactgctcgtgtcatgagcgcaaacttcagtttaattcattattccaagagaaatcccgggtaaagatcaaggagtaatgagagcaataaacaccttgatagtctcggatagcgcaaagctctccattcgatcggttaattcacccgtgatcaggttcttgactgatgcgattccacaccttacttttgccttgctgatcaaatcattaaggattctctcgccaatttctagatagagttcgtctttcgtcgcctagttgtttatagatagacactgttaatacacgatttgctctcagaataagatcgacgatcggctcactcggtagagaaagtaattgctctcgacaaactcttattgatggacgattgataatagttaagtcataataccgtttaactgatcacaagtgagacagttgtctatgaagaaggatgcactgaccaggtcgaatgggatagcccaaatcatccgctttcttttctactacattaaagctttcaggtattccaccatatcgcctccataaattccaatctatatttgtagatgacaggatatataggtgaactattgtgggtacaactgagagcgtggctggagaaacaaaacttacaggctagatgtgatttgattgccttggtttagagatagcaccggcatcgaattggaaaggaaagtaagcgctgttgttgatataagagttgactatcaaagaacgaaccccgtttagatcacctgccaagacttgcagccccggaaagaaggcagctagcgagctttaacaaatagaacatggcagagggtcgtatgaggttctcatcgatagtgtaatatgcctgaaagaggcgagagcttactctacagtcaacccgatccgttcgcctgtatgcatagaaacgcctctgaactattatccagatgtagtcaaatttctggaagtcagaaggcaagctcttcagagattcgaagtgttataggaatggatcgaagacaaaaagcgtacccagaacccctcttcgccccttacataacgcattatcgctcctgttttaccgcagtgcaacgaatttgatcagctgttataatccggttggtatcaaacacgaagtttgcggaccatatgattcttcgaacacatctaagtagctttgttctccaagcagaatccacgctttgagcgcgtactcgaagaaggaatccgttccagctccgatgtgtgatattaacggagggatccattcctgacatcagccggaaaacagttatcttcagagtggaactttcaagcgcaagcaatatgtagagattgcgcctaccaggcttccaacatcgataccattccccaagagtccaacttcggaccgacgttcccaaattgtgaagaacgcttttttcgcctgcgtttcgtatctaggatcgccagtcagtctcgaaagagtggcaaactctagaatcaaagactgtgaattgaagcgcaagcaagtataagctcgcgtgcctgtctgtctcagtgatgggttttttttgttggtattgagagcatgagacgaaccccagcaccagctgtacatgtagctgtcgtctcgcctttaacaacacctttcttcagattcacctaatacaacggcgcgggacgagaacagagctatcagtccatgcgcaagcgcaaaacataggcaacgcccctcttctaaagctaccttcagaaagaaaaatgcaaaacaaaccctagcaaacggtaaatcgccccacatgttttccttccctcttccttttcctacgctgaaacctgtaccacttctttcccaggctttgaccaatctatctcccaaatcaactgccatatctaataactctcccttgtaccagtcgagtttgaagtcttcgtcttgtgctctgtctacagaactatggtgtttgggtaaagggatgtctcccgacgcgaattgatgcgccgatagtagagagccaaggattcgaattgtgctttcgaagacttgtatcttattcgatttgtcaaacgagacagtttggatgatcgtccggactctattgacatcaaagatatcagagacgtacagatcatcgatacatacaaagaaagattaagacaaacccttgttcaaaagcagtgcgatttcccatgatagccagtgtatcgatgactataacgtcttaaaagcatgatgagtatatggtcttgatcccatttgacctttcgaaaacgcctggatgagttgaaacagaccatcgacaagtgttaaactgtaatctccacaaacatcgttgaaagctccgtttgctctggaaaacagatatataccgtggtcagctagagccctagatgaacccttgttacataccagaatgaagagaaaaggacgatagcgtgattttcgaggtgaacgacttacggatcagccgcgttcggacctcgtcctttacatgataatggcttcaactcatcctgatgtcatctcgagcccagagtttacgcaaacggacataaaccacgtcagacatgatgcaccttatgatttttggactaaccgatcttgtcgttgggatgagatgagagaaacgcgtacgtacgaacggaaacccgtgatcgaggtagttgtaatatccatggttgaataactcccttgttcgttccctaagctgtatctttttgtccgaagtgaatatggagatacttgcagttggtgtaagcaaaagaaggactgtgtacacccagcctgcgagatgaaccatctgaaagatgtgaggtgttagtcaactaatgcacaatgtatgaaatctacctgctgagattgaacgtagaacttataaggttgatgatgagacgacaagacggctagggttaatttcggggttcgatcatagtcacgtgtcgacacagctttcactttgtgttctatactcctctatataacatcacacaaacttcattgataaagaaacgaaagaccgagaacgaaatagtacagttgatgaattcactactacaacccgataaagtagcaagtgaatagagaggaatagaaaatgacatagggcgtaacgatatccgagaagcctgatactcttacaacttggcctttgctcctgccttcagcgtcacagcggcagcagccagagcaggggtattgcgctccttgaccttggtagtgaagatgacctttggtccttctctccacatctcagtcaccaaggtctctccagggtagacaactccggcaaatcgaactttgatgtcgtcatattccccaaagttttggagcacatgctttcccgcgattcccatagagcatagtccgtgaagaataggcttctcgaaacctcctatggatgagaacgaggggtccaaatggagaggattcaaatctcctgacattctgtaccaagcagcctgtcgctccaaaaccttttcctcgaccactgcgtcgggctttcggctaggaggcttgttcgcagcactggctgctcccctatcgcttcctttctttctgccgttgaagtttccgacacctctcaagacgacggttccttgggtctcaaagaccttctttccagtcgccttgtcaacaacatctacaccgctagtgacagatgctgattttccctgtgaaccctcaacctcgatcagttatcagatctaacatatacatgtctacatgataagcagatcactaactttatccaggacctctataagtcggggctgacagaccaaggtagcgctggtcggaatttttccatgaatcttgaggtactgttctccatgaagaagtttggcctggtgatagacgagacaaattcaggttaattaggagacgtatttctgcgttgaagcagagtggaacgaggcagcgtacaggattgaagtttggaagccaatcgaagccaagggttgatccagcattgaatccagggatcactccaaacgtaggcaaagcctaagcaacaggagagtgaaaaccgagtgatattcagaagtcacgttataatcagatcatgaaagattgaaaaaagagcatacggcaaaatctccatcctgctcatatacccatttgagatccttctctgtcgctccaatccccatgttgtagatgatgacgtctcgttcagaatacgaatactcgtcaggatcgaccgttctggatttggcctccttgacgatctccggatcctcatcgtcatcaccggccgaagcgctacctttgtttccgaaattctccattacctgaagaacagaaagcaagaacaaccaggttgttaggtggtatcatggcatgaaaggcagattgtgggtgattctgacctgttggaaaccttcctgcgtggaagaaggatgggtacttcttccgtcattgaagtcggtaatcttcttccattgggaaacgatctgatcagcagtgagcggcctgtcattagggaatccatactgtgagttcccgccgcaatacagaagacaagtagttagctctatctatatatctgcattgaacaaccaaacaaagtacgtactccaccagaccgctcccatcggacttgagaagcccacccaccagaaacttcaaaaagatctccggtggtctcacaatcatccgaagcgaggtagccaaccaaaggggccacgaagtcaggcttgaatgcatcgaccatctccttagtccaaatctaggtttaaattaatacagtttggaacaaaattgagcaaaacatccggtggatatagatggcatacgcaagaatacaaacagtctcagtcatggcggtaccggcgctgggagcgatacagttggcaaggatattgtacttggctccctcgatagcaagggtgcgggtaaatcctaagatagcagccttggcagtagagtaattcgctagagaacaatccgaacaagcgggtcaatatacattccaagagagaagccttgaagcatttcaaaaggtcacaccttgtccgaagtttccaactgagaataatgaaaagaacaccggaaggctcatttcagtgatggttcagtgaatagttgtttgcaagattggactcacagataccaacccccgagcaagtagtcacaattcgtccacccttctgagcctgcatgagatcccagacagccttgcagcatttgaatgtacccttgagatgcactgcgattacctggtcccaatcagactcggacatggccaggaaagatttgtctcgaaggattccggcgttagcgatgagcacatcgactctcttgttcgtattccaaggggcggagagtgcagttttgataatcgcatctccatcttctgcagaagcaacagctggaacggcttttcctccggctgtttgtattagaatagaaaatacacagtcatctgtcagagatattgtattgcttttatcgaacgttgacatgaacaactgaccctggatgatttcgtcacaaacagatttcgctcccttctcgctgacatcgttgaccacaaccccggctccaagcttagcaaacatcaaagcataggctcgtccgagaccagctccagctccagtgatgacgacaaccttgttgtagaactcaaccttggggtcagactgagcattagggggaagactagaggctttttggagggtagcctatcatttgtgatttgagtaaaaaggtaatatcagagatacagatgatggtgaggaaaatgtaaagatagagagaagaagggaaaacaggtttctcacaatcatatccctgtcagtcatagactctgggtgctcggctttatcgaagtttcggatgtcagcaaatcggtgcttgacctgataggaagaacatttgtattaataaaacctgcaagtcgagaacttgatgtcataaaaacagagattgcttacggcactaggagtgaaggtatcatctgttctgaagattactccctgactctcctcccaacggacctctgcgacaaagccggctccgacctcaaaaatccttccagacacaggtggagatccctgttgatccatacacgacggaagaagatgagcttacgaatctcacggataccattgatcataagttgatggacttgcgttatctttagagcaaagcaccccaacaagaggagcaataaattcgggattgagagccttgagcatatcaggaggcataacctatatatatgtaatgtacatcagctaagacacgttttttgttgcagatttgacaaatagacccacagtcgcgagcatctgggtagcagccatctgttgtatctcgtcaagaacgatataggagtcaatctcacataatcgatgagctacaagggcatggagaaagcagacgaacaggagcgatgacgttgacggcaataccgtacttagcaccttcccgagccagagtttttgtgaaggagaccaaacccactatgttgttaaacaaaacctttgttagctcatcttcagtgtggctttcagattgacagatacaactcactcttggcagccgaatagttggcctgtcccatgttaccgtacaagcctgataagacccaagggcgtatcagtgcatgttgatagatatatgtccgcagaaaagaggaacagacctgctgccgaagtagtattaaggatccttccgtactgtaaacaaagtcaccaagatcgaatgagtaacatatttcgacgaatattgagagtacaaaaaaatctaaccttttggcctctcatgatcggccaaacggctttgctcatgacaaatgctcccttgagatgaacaagcatcaccaggtcccattcctgtacatagagattgtagagtgataatgtaagagcatgtacttttctctctttttagaaaagacagaagagaactaggaccgcaaacccgacgtacctgatcggtcatcttcttaaaggacttgtcccctgctctcaattgaagagattgatatcaggtcatcttccttgtgctcttttaaactcttcaatcggcgatacacgtacggataataccagcattgttgaggaggacatcaattcttcctccaaatgcctttttagcatcctcaacgatcagatgcccgtcggtgaccgaatgaacggaaggtgcagcctttccgccggctgaagtcaggagttttccaaacgtctcacggtcagttcatgcgtcctttccatcctaataaacaagtcagagctgacctttgatgatctcgttgcagacttgttcggctgattctcgactgacgtcgttaactaccacctttgcgcctaagctcgcaaagtacaacgcatatcttcaagccagagatagtcatgatggatgcattttttttgagtgaaagattcaaacgattcaagaagcatcttacttagcatccgatcatattctagggagatcctaagatgtcatcggcatataaagacgtcgactgaagagatgatacaaagttggaagtacttacactttgccgatccctgtacccgctccagttacaataacgacctgatcctgatagttgatgttgggcatatctgttaggatgcagtgtttggatatatatggttcttcaaaatgatgtgtgaattcaaacaaaggagatctaagactatggtagagattggatcagagttgtgtggaagatagatggtgtttggagtagaaagaggattgctcgcgagatgagaaacccggtcggttactcgacagaaccggatgaaccggatagatcgttaccgaaacataggccggtcagcggcgtgtgtctcttgatgtttagtcagtaggtcgatccaacgctctgggatgagtacgattcctttctgtttcttgtactctgtgatctgcgttctgtgtcctgtagtctgtactatgtgctctgcgatctgtgttgtgtcttgtgtatcatgtacatcctcgtcctttctcgcgctttccttttgctcctcatggcttgttgtgtctgtagatgactctgtctgtagcgatggtatggctttgtccgtcgtcgtcgtcgtcgtcttcgacatcgtcatgtttgccactacctgccactacctgccactacctgccactacctgccacccataccgccatcattgccaccaccaccgctgtgatcgctgtgttgtcttgcagagagctttgggacatgatctgacctacgagctagcagggacagaaaccacactcaaaaaccaagcgattctgttactggctgtgtaaccactaccccaccacgtggtctcagcctcataatggttacagggctaggctctgtccccacacccgatcttcctcccagaaagccgcgggatagaagcgaccggtaaaagtgaaagaaagcaaaagtatcacctgggagactgtggattggttgcaatcggaaacgtcaaggtgatctaacactctaatcgtccatcgtccttccaaccttcttttcaatactcgtcctcctcgtcgcttcgggagtagtcgagaggatgatccactctcctacgccatctagactagctccggcatcgatcatctcaagatctagctcgtcttcaacattatctgacttttcgggcattcatcctcctccggttcgatcgtctagtatccctctcgctccgaatcagaacccaccgctattctctttcgcgccttcttctccccatctggtcgggacaactagcaatcgtccctcaagactgtctgtagatctatccaatctttcttcgggttcatccgatccttcagcttttactcaaggcagatcaagcgatatcaatctgagccccacggcttctcggtccaactcgccagtcaacagattctctcttatcaaccagccttcggtctcatcattctcacaaaattctcatcaagcctctcatccatcccagctgagacatttttacgtcccctcgataacatcgacaaacccatcttccgggtctccatcgattcagacatcttctctaaacttagcatctggttctgacgcctcagctcctcctttatcctccaatgctcggcacgctcgtccaggcttcatctcacaccactcacatctggtgatagcacctcatgggtcttctcccgagatgtcttatggaagatggatcatcgaaaactttcgagatcaccaaaatggaggttggatgattccaccaggattgacgccttatgtaccgtttgcatgctgggcagcaactagtttaggattcctaatgggcttcacattttggcgggccgagctattttcaggtgggttaatcatagtgtctaaagagttctcatacgaaagcttacccggttcgagcatattactagcattggataacctatccaatgcccttgtagaacaaggcatccttggccaattcatcatgggtaacaatctttcttctcttgtttatcgctcccttcgtgatgatttactgacccacctatgagcctatacccatacaggattcttaatcttcctaaccaccttccctccggtcccactgtactcaacactaatcattcttagtggctatggcttcggtgcatggacggggtttattatcagctacaccgcagcgctggtggtcagttcttattttaagttgtgatccgttccatcagctctgatttcatcaatttaatcactttctcttgcgacaatacacttcctccttcttcagggcgccttggttgtcttcctgctatcaagattcttgttccgagcgtccatgatcagactgttagtcttccaagacatttattctttctttcgcgtttgttagctaacgacgctatgcgctttctctacatccactctagcctttctcgttcaccgtcactagcccgagtgattcacgcgatcgaacgaaagccatcacttcttttcctcatcagactagcgccatatccttacaacctgctgaacactctgctagctagtagtcggacgcttactttaaaaaagtacacgaccataacggcgatcagtttaggaaaactcatgtcagtcttctgttatatgttcactcaagaatgccgttctcatctatccttcgtttgccattgggctcttttcatcacacatcacgacccgatcgatcagtatacacacgaccgtgggttctactatccataactggggcgactatcactcagacaccggactgtccgactcgatagaagggagtgagcaggacaagatcagcccggaagaatgggatctgatgaagcagaatgaaaagagaggggaaactctgaggaaagcttggtccatcataggcatcatgttcgtccctcccagttttcttcaagatccatctttcttcttatcagtcggaggaaaaccctaaatttgtgtcgttccacacatttgtttgtcagcttgtgtatcgccttgtttgtctatctgactcatgtcgcccggcgagctgtgaacgatcaaacgatcaccaccggatccgcgccctcctcccgatcatcttcgccagtagacacccgctaccgaacccataacggtggatatcagaacattcctgtccatgatcgcttcacgagctcacacacccttcgttcggagagtgattcaccgacggagatgcccgagacgacgagactttccggaacagagtctggatcgaggtcaactgtcggaacaggcaggagggagcccaaagataaggtcaggataggaagtgtcggtgggatggaggatctaatcgggtttgatctaagaggttcggaaaagactagactatgagtccatctaccatgtgtgcttgcttattggtcttctctctctctctcttttctcacatctctcaaaatgttcttggtcttctatcgtgacctttctgtctgcttgtccctcgcttttatgttgttctctgaattcacttccaacactctttgtcaaagtaggggtatcttcctaccttctgttcttggatctttctttatatcgttgccttcgaacgttgtattatcattttctgtatttagttgctgttgctatatattacctcgacttggcttcgctatcagtgagattgattctctcttgacctctcatctgctgaaacacgtgctcgtttcgtttgttagactcgctcatttgctgcttcggtcaagcgtggcaacacaacacgtaagctgtgcaaacgtaaccaattttgttactgacccagccgcctttcctcatggccggcaatcgtcccccgaaaggattcgacaactaaactgtctgaaacctacccaaaggaaaaaaaaaacctatcctcattcatcggacggggcaagagagcgagattacgagagaaacgatcgaagaagaagtcaaaagaaggcctagaagggctggcggtcaacgaaaccatcgtcagaaagacaaatcaggtcctccggtctactacatcctctttcaagaatggatccggacgaggatcatgccgtctcgcttgctagagctattctcaatgcagacctgaatcaaacaactagaagtttgtccattctttccctctggtctgatatgcatttcttcgcgtcacgaaacgattcttacgcgattctgtacacttcttctctcggctttggaatctcttcctctgcgggtcctaaattcgtcgcgacaactctacccctttctcctcagaacgggaccgagacgagtacgaggggttcgacctgaatgacgcgaacgataccgagattcaagccttccagagcatagtcaatgatgtcgttctcggcgcatccacagaggcctacaaccaggaagctagtctgagcctaggcgaggaaaacggttcgcacatcgttgtcgaaactcaggttgaaccggacggcacggttgtcgaaggtgaaggcgaggatccgacgggtgtcgaggccgaggttgatattgaggccgtcgaactgaatgaaagcgctgctgatggtggctctggaccaatagaaggcgagaaacctgaagaagaggtcgtgatggatgatgaaagacatgatagacaggatgaacatgtggtggatgaggaccaggatggtgtaatggatgtaggtgggcctggcggagaggaagacgcgtcaaaacgattggaaccgatcgtgccggaggaacaagaggaagacgaggaagatgaagaagacgagatggatcttggaatggaggacgacggggaggactattatcaggattctgcagccgtcgaggaggctacagctgctgctgctgccgaggctgccgcttatgccatccaactcgaggctcaacagcaacaccatcatcatcaagaatcacaaaatctatcaaacgacctcccggtagagctcgagccggatctgctcgctagtttggaaacctcttttccagaatcgttacagaccgaacccttgccttccatcatcactgcattaatcaatcaacagaatgccctggtcaacaccatcaacatgctccagtcacgggtgtccgctctcgaagctaacgctctgagtaatccccatgatcctaacgatccacatcatcatcaagaccatcatcatcatcaggatgagttgcatccgaatgccgaccttgacaatcaacacggtcatcatgatatatcactcaaccctggccaagacgtaattgatgcctaccactcccataaccagcaggttgctcaacagcacctggagcagcaactacaacagcagcaacagcaacaacatcattcgcaacatcaacaggatgtcgatgattatccagcagacaccgagatcgcaggcgtaggagctccaggaagcggtggtaggaagctaaaaggatacaacgctcagactggatatcgactacagaagaagcgtaatcccgccctctcggtatgtttctttcctcttttattctcttttgatagtagcccatttcacgccacttttcggatatgatgctgacagtattttgttgtctttgaacatatggtatctagaacgcgattgcaaactcaatagcctatctttgtggatttgaacgccccaaaggagcaggtgtaggagctatcatcaagactccttctcctggcccgtcgggcccatcaatgacacctttgggcccggccatcagtaaacgagttgtcgtcttgcctgatccgatagaagacatcaatgaatggccggatagaccagacccacaagaaggagaaccgctcaagctcgaaagaccggattggcttgaccggcatgcaaagaagtgaattcttccatctctgtgctttcgcgcgatcttcctgaagaacacaattgaacatatgtgtcggtgttttttcttttccttttttttcacttgtcacagatcggagacgcaagggttcctcgctcggatcatggaacatgtcatcacgactaaccagctaggttccgggtctccactaaacctggctgattacgatcggaagacaatagagacagctgtgctgggtgctttccagaatgtaagttttacctcttcctagatcatcgaaagttctgtttgttatgaactgtccagactgattgtgttcaacgaatctgtttcgtaaatttagcataacgaaaactataaagcacaaattgatccccagagacttgccaaaaagaatgagaaaacagaaaaacgtaaactgcatagccgaatcaaaactgtacgtggcttgtccttttctcttttttgtgtttcatctagccttttttttaaactttgaaacggcaagagcctgtctgactttaattccttcgatgatgcaatgtttatagagaggtgataagcgtcgattagggttcgaaaagttggatcttgctcaagatccaatagctcgggatttaaggaaaggaatgaccaaagttcgtctcgctcttttccttctttcggaaatcttcttgtcttcttctcgtccgctatgctcatcatcgccgggtccataaaacaggactacatatcggaagaacactcatccgaaggagaaaactctggcatcatgcctggcgaatggcagagactagcagaaagcgcgggagctaaggggaaaggagtgagcaaagcgctagagatcagaacgcctgcttggaagagtcgtatgttacttccctctgcctttttcctcttttactctgctctcacatatcattgatcatatcctccaccatggattcatacatttgtaggcgaacttagatacattgactggtctgccgactcctccgccgacaaagcgactgccttctcgacggctcggttcactatcactcctctccgggaggacatcttcccacctaaagagactccgctgtggatggtggaccccggatggagagagcgtcatccagaagctgaacatctgttgacagctgatccgccagggtggccagggataggtgtaccagacgactggcatccacaagacttctactcatcgatagcccactcgataccggagtaatcgtctgtattctttctctttctttcttt

SEQ ID NO: 335 - DNA, 2889 bp, Xanthophyllomyces dendrorhous
cggaagagggtgaacgcaccctggtagccgaactgcttggcgagtacgaagttgtcatcgtcttcatagatccatccgatcgaaacctgcctatcgttgtcgacggggaaagacacgtaggcgtaacttcgcccccaatcctggacaccagagtacgcaatgttggccgcgaccgagccgtcctcctgggcctcgtagtcaacggcagcccagagaggccagtgagccgcatgaccatctcgacctaagaagattgaatgagcatcagcaggagtggagggcgaaagaaacgatcaaggacacaaagtatgtgtgagatgagagacctaccatgctcagttccgaaagtaacgaaatcaacggcagaggtgtctgagccgttatcccaagaagctccggcttggttcaatcgagcgacaccggcagcctcgaagttgataccgtagtctgtgagttcgaaaagcaagagaaagcgtcgattgagtacggcccggttgaacacttaataagaaaggcaactcacttccactccattcaccgtaagactctgccaaaccagtggtgatgaacggtccgaggtaggtccacttgatgaactccccagtcgtgtgctgcctgtacaagaaaagtcgcgctccgtcgcccttgatcccgccagaaacagtagcaaagtggtcaccggtggcgttggtgatcgaggtggtgttggcgagcagagcctccagtcgaggcgactggaagacgtagggatctcggaagccggctttgaggacacgagaacaggcgagcgaagaaaaaaatacatgccaggaacggacgaagaacaggtaaggcaagcaagacaaggcaggaaaaaagtcggagaagacatactcaggttcttttcgggccattcgtagatcactgggttctgcccggcaccgtagccaagcttggtccaggactctccgttgtcagtggtgtaggcaagggactgggtctcaatgccctcaacttcatccagcagcgcgccaagaggaccagggctggcagaggtgtaaagtatagtggggtaaccgtcgattccgttcttgatgatagttccatcgaggacacctccgatgtcgtagatgtgggaaggccactggtaggcaagtaggagcacaagagatggtcaacgactggacaaaccgaacgagagcgagcaaggtacgaacgatggtcttgtatccctcagagccgttgaagtcggtccaagtagtgaaatccggagagtaggctgagataaggagagtgggagagaaggatagaaaggaaggatgagagactcgttcagttcagaaaggaatattttgtgaccaactaaccggctccttgggagatgtttccccactgaatgtgccttgggttcctatcggaaggcggatgaggaggaccagtgccagggatatacaaaggcgagaacaatccggtcagcttgataagtaaggagaagagagagaggaagagacaagacgaacgactggtaaccggcgtggatggaaccatcagcacgctggaacatgcccatagggtcgttcatccagccttcaggtgcaataagcctagctttgggcctgaagatgttgaacatggtagcatttccgcagaccgtcaagtctccgggcgccacgttctggtcgagcgagcattcggttgaggctgaagagttgtcctgtcgtttgttgagcgcagaaaggttaggcaggtcgagctcggctgcgtacacggccgccaacaggggcaacgtcttgagcagaggactgatcatcggtggtgatcggtgtgggttgggtgggaataagaaatgatgaagagcagaatccgtcaaaatcaaccatccactcgtcctcttttataggaagaaagaagacttgccagatgctatgtcgtacagtacatactggaacgggaccgtctggacgatgactgggcaaggagtatgagtgtaaatgcaagtatgactatgtgacagagtgctaacgagggatctttcaaccgattggaaccccgggaaggtcaaagaaggccaagaaacaagaccaaaaatgagaatcaacggggtacacgacgaatagaaagaacagacattcactcggcgtatttccggggtgtttatgtgtgtgcggagggagcggaagtggtgacgtaggcggagacttggctatatttgaaactaccaagtcaggttaaattcaaaaaagacggtagaaaattttcatctaagtcagtaatgggcgggtatagaccgcttggtggtcctcccccgcatcgtaccattagaatcaatcaaacctcccgctcttttgcttcctggtgttttgtctgtcttgctttgatgatctactcccttggccaatttcaattggaagagaatatgcgaggttccggttgatggtactatcggtgtaaaagcgggtaccgagaagtatatagactaaataggaaccttattctctttgtcttgtgctcctcatctctcggcttttgacattggctctctttctttccgtcttgtatttgattggagaaacaacatcggatctgagataattttgatgcgctcagggaagagagaagaaacacaaacagatggacacagacgctagcggacgtgtttctttgtcgagtaaatacttcttgtcaatttgacgtcgaatggttttggagaacaagatggaaggaacaagtacaacatacggaaaactagcaaggggcaagcagagggagacgcaacgaagatatgaaagaaagtacgatagtaggatacttagtaaccagcaaagagaccgtacattgcggcggtcggtccgtcccacaccagaccctgcgacgtgttcgcaggtcgcgcaggccacgcatccaccagac

SEQ ID NO: 336 - DNA, 912 bp, Xanthophyllomyces dendrorhous
tgaatctaaaaccctaacccgttttgacacgtggtctgacataccttgttcccagacgttcaacgagttcttctaccggaagctcagagcggatgctcgacctatcgcttcgccttccgacccggcagtggtagtctcccaggcggactgccgactgactgtttggcagtgtgttgaggatgccacccggatatggtaagcatggatctcgcgatgggtgatgcatctcactagatgtcctctgtctcaagatgtttgcgactggacgtctgtctttggttgatgtcgatacctaggatcaaaggaaagcagtttactatccctgcgctactggggagcgaggcctttgcctccactctcggccccagtcctgctgttgcagtcttccggctggccccacaggactaccatcggttccatacgccagtgtctggaacgcttggaaagagcataaacatcccagggaagctgtacactgtaaacccggtgcgtcctgctgtggtcgactgcgtgtgtttcgccgttcagaccgtctaggaggtggctacgtgggctgatatgtgctgttgtgtggggccatcttctgaaacgcagcaagcgattaacgaggacctggatgtctttactgagaactcgagatcggtccttcctatccatcttccttcgggccaaactgtgtacgtcgttgccgtcggggccatgctggttggttcgattaactggacgcacacccaggaagggacgaaggtagagaaaggagacgagcttggttggttcgcgtacgtaccgagcttctgtgctgccttgatcgtttgccctgatcgctgctcaggtctagaagggtaaacgagatatgcttagccagcatagactgacatggatcgtctcgttttgagatctcgacgtcaacag

SEQ ID NO: 337 - DNA, 4426 bp, Xanthophyllomyces dendrorhous
  misc_feature (3107)..(3116): n is a, c, g, or t
ctagcttgttgaactatttgctcgtaaaatcatgaataactatctatctctataaacgagaccaaaagggaatagcagtatttatgcaggctcagtggagcgaggaaaggcaggggaaaatatgtttaaacacgggatggatggttcgcataggtcgggttgaccacaacctgatggccatagttcttcgttatcattggggtcgacccatcagagctcgaatcgtcattgatttgatactgattcttgtttcggttcatgaagtgttttatagagaggtacgccatcggcagggccaaagctctgttagaaggtgagagatgatcgtcagctcatgatgatcgacaatcgcatgcattcgaatataataagaccgctcacgcaagcaaggatccgatggcaatggcggcgtatgttgttccacagccgactcctgccgcacatcctccattgatcaatcccatggttgttagaacgatggcggcgatccaaaagacggcttccaagatgttgagtatcatgtttgccttcaaactggcccatcgatggaagtaggacacgttctcgctcaacactatgtatgccagtgtgatcagagacttggcagactatatacaagcgataaggatatcagtgtcggcttctggacagtccgtcctatcaagaatagaacatcagtcaatgcttaccacactgagcaaccatctggagcttgatgttctcggtttgatgataaacatcttgaccagaccgatggcgaggacagcgacagtaagaacgaattggatagcatggatgatgttaatcagcctgatctcggccttgtgagagggcatcttcgagattgaggtatctgtttcttcctgttcaagtatgtgccgaggtgagctgaattgcgagcgagtgtcaatgagaatcggagggaaggtaagttgcttcttccatgctctctactagacacctcatttttaagcaagtcggagagaagggatgctcaacagaaagatgttagtgttgcgccctcacggccgccgtcagtaccgctcattagtcaaagctcaagtggctcattacggattggagatgaggtagcggtgttcctagctcgatgttgtaatataattcatttgacccctgcaccgccttgaagtgcggtaagttggcattcgctcgacggccgccgttcaacgccacagaaagttttggtggaaaaggatggcacagccattgtgtaaaacacttttttgccaagtatatctgtcggggctgtggataataagcaaagtgcgtatcgtcaaaatcttccctccagatccgacagtcgaactgtgcgaaacaactggagatacaaccccatacagtcctgaaagattttaccggaataaggctatgttgagcaaattcagttgaaatcgtgttcgagagcgccaaacgagatggggtagctagctatgtggatggtaaatgtatctctaaaagagtccgtgtgttcgatatagtgtccagaggtatgttctcggcaagatgaaacgcgatgataggcagaaagatcgagtggtagtgaaaaaggagagtgaaatgcaataaagtagagaataacgagtggatcgatcgagcccgcgttgctggaagattgcgcatgctcagagaaggagtgtggccagtcccatgctgagactcaagacggtagacagtcccgcacccagctgagttccgctcctagaggcagagcttgcgtctgtggagctggtcgacgagggagacgctccagacgaggtctgagctgccgtagatccagatgaggggaagacaagctgagcgaccgttccattcagtggggagctcacttcacactctgggatctatgtccaggaacgaaacaagagtcggcatgagcacaagcacgagatggcaaaaaagaagacggcaaaacggacggtgatagccttgagagttcggttcctgttcaaatccaagttgtctccatcgtttttagctaaactgacttcggacatttgggatatgggccatcagagtagaacggataacgcacgggtagaagagtccccagtggggttcgacaccaccgtagatctctttccaggtctcgtccttgaactcgaagaagaagctgaacaaaaagcggaagccaagcaaggtgcatgagcatcgctggcactgtgatgattgggatgcaggcctctacagttaacatagccaacgaactattcggtgttgttcgcgttagcttggcagttgaattcgtccatgaaggtttgaagtccaacgatcgaagcgggcgaacctgccccgttggtcgcctgtattccaggatgacgacagatcagatagtcagccaaacaaacgtagaggatcaggtgtctgaccaagcaaaatgagtgaaggactgacgtcggaagcgttgtccgaagactatatcaaaaagattcaagatcatactgatatgtcagatggaggcaaacagcggtgaaataagtcaaaagacgtaactaaccgtcggccatccggtctctgcgatgtacatagtactggagtcgacgaatacgaagaagagtgtgtggctgatcagtcatctaccttttcgattcagaggcccgcgacgacagcacactcacggattgttggaagcggaagcgcaaacttcgacatcaaactcctcgaaaaagttaaaagtccatgctgcagcatcactgtagtcaaccgagccaaacctgcacagcgacacagaagatcaaagacgagggtaagcagatgtagggaaagcccacagctcggaccgagggtagcaatgagcgtaccaaggatgaacgttggcctggaagtaatcgacgccttcacaaagagccagcgttgcggcagacccggcatcagacgttcccacagggatcgtcacattcaggtctagggcactcaatgcagctgtatatgccaacgagagatgtttaatcatttgtcggagtttctaagctcctagcataggtcgagtcgtacaaaaaaaaatacctttggctttggtcacgtagctcagcaacgtagttctggcggcgactccagtggcatcagttgcagtgccgtcaccgtaagannnnnnnnnngattccaccgatgttttttgttccgtactcattgatgactgactcgatcgcagtccattggcgttcgtagacggtatcgatgtcggtacctgtggagaggtagatgccaatccataccatgagatctgcgtttgtctgccggatggcttcaaagacgtacagcgtctggttacagtcagaggcgctaggaggaggagcaccgagcttcagctatgttcaccccacagagcgaaggtgggaaagggagacaaaatgcgacccactaggttcggattcggggggtcagctgagcgagcaagagcacatcgtttgtcacagcttcctgggtcgcaccacctttagggacagaaggatgattagtgatgatgtgagccattattcgaggggatgcgtgcgatgttgacttacaatctggaagggttacacctgaagcagagtaagctattccatgaaacgactgtatgaccagaacattagcagaggtgagcataaagaccatgcgtatcagttaaaagtgcacgaaaggcaacagatcaaggacaaggatagaacatgtgtgtatgtctgtgcgcactctagtaagattaggattcagtgcagtgacttgaattgagccgtcagaaagtgtagtggccgaggcggtaaacgtggtgaggatgaataccagggagaagagcgaagcccacatcgtccagattgaggaagagaagattgtgaaagatcggatgatggtcaagaagaagaaaacaaggaaacaaagaaggcgatagaaagactgtgtgatagtaaaatctgtggaagagaggtatagaggaatgctcgaccgtgccggtcagttctttctttagaaactatccccaaggggggagcccatgagaaacaaatcggtctcgagatgtgcccctctaagccccgctctagccgactgacacgatcgcctcgagagacgcagaagcagatcagatgtacatattgtgacctgttcgagttagcgagttgtattttaacgcagtcagcatgcggatgacagctctctttagaaattggctgggtaccaaaaagcgagattgaaggggagctgccctggtccaaatttaacgatatgttagggttagtataattttacctgcggattgtgctctttgaaaaaggttaaacctggatcttgttgaacaaccatagagctagtgatcagttttgctgaggaaactggcggatcagcgtcttctcaacatatagtgtaaccagactgtagaagatggatcatgtacgagctggtttctcaatgcaggcctagatcgagattgcgc

SEQ ID NO: 338 - DNA, 35719 bp, Xanthophyllomyces dendrorhous
aggttaaataaataaaaagataaaaaagagattctgtatatgccagcggatcattgtgccatagtcataaatgattcttttcccttcttaccggactcggatggaggatcacccgaaagaatgaggttgagactaaaaaatggcttgcgccttatgcagagcttgacgagttggtactccccgtgggcaagacaagtgtcgatcgatcgggtcatctccttttcaccgtcggtgcggacatcgccgcgtactcgcgctctttgtctccatttcacaaacactttctcttcacaatgggggagctaatgttaattttcttttctgcctctctttgatgaccggtggctgcggcttgactcaacgaacctcgtgggtgtaaagcttccagctgttgtgattgtcgtttcgtcttcgttgtcactactgctgtcgctgtcgccgttgttctcggtcccaccaatctgcggtgtgtctgtcttgttctgtattgcctcctggcgttcgcagtgaagggatgttactcttactatattctgtcttattctccaataacggttgacatcgtttccggacgccatgtaccgatgggaagaatccaggccgagatcggacacccatacccacccaaacctccaagccaagaattggagactccaactgttcagacaatcttatttaacaaagccataaagttatatccattttgtatccctcgctcaatcacatcatccttctatattttgccatcgaaactatctaggatttattctctctcccctttttttctctgacttcacattcttctctaaccgatttcctctcgcggcagtcaatgagcgggacaaacgacctcctgcgttctcttcttttttatatacaaagttctgaattacgtgttaaccgaaatgaaaaagaagatcgacgacaaaatagaaaaagagagaaagagaaaacaaactggcgtccatctctcgttctgacgggccacatatacacgcacgcacacaaacgtacacacacaaacaaagtgtaaacattccgaacctagaacggactctatttgttctgtgatcgagaacagaagaggtgaaggagaaaaaaaagatgagccgtcgataacttttcgttttgcctctaggtctcttgttctccagccagccatcttttgcgcaccgtagtaagaatcactcttatcaatctgtcgctacatacccttatcgtaattctctattcctcccgcctagtctttcttctttctccttctcttccgcccgcccaaacgcttccttcgtttcttcggatttttttctccagtctttacatctctctccctttgctttcatttccctctcctctcctcttcgctaacctcttctcggagtcggcccacccgtaagctcatcagtgctagcgtcgaccccttttggtccgttcgtctctgggaccattcacaccttctcggatctttaatactgtgtacctgatcgcttgaatcgtgagtttgtcgtcagccttcaccgtgttgcactcattttcttacggattgttcctcttctttcttctttctggcttgctctttctacgctctaaacattttctttgtgaatcttaggcttaccgctttttagatcgaagccctgtctacacatccggtctactttggcttctgacacttcaacttgtcggctttccgttcatctttgctctcattcgattcctcctttccattcgggtctcctttccgtcatctcataagagccttgtgctgttctgtaccctgtgggatttctatcggctgttctttcaaggtatcggctcccgccatttcttccattcgacaagctcagccttttctgtctgttcatgcaaaccttgacgctggtaagcctcctttgttgattcttatagactgtctcgttgaacttttcatccaactgtcagtcaaccaaacaacatccatatctttttctcccttgatcaccggtccaacgatatctctctttcctttcctcctcgcttctttccatcttgcctcatctttggctgagaaggttgaacacaaacatttctctcgctttatttatatactccgctcacatgagtctttccttcagcaagccgttgactaacaaagaaatctttgcgcctatattctcaattcctcgctaaaagtccgcccagattgtatcgtacttagcagcttttgactaaggaaagaaacaaaccagcgtgtcattcctatccgtttatccttctatctttcactgtcttctcatcatctctttcagcattctacattcggaaggatccgaataatgtcatcatcctcctcgctcgttgaatcaaccaaaccatctctagcaaggcatcaatcttattcaaacccatctcgcaaaagaacctcatccggtcgatttccaactgtttatccttctactgtccacccaacacagactggctccaatacatctcattcctcatcatccttattcatctcgtcgtcttcgttggcgaataccgatggaatagcggattctctacacaacggccggcctcctctcaagaagcgagcgtctcccggaacgacaaaagacaaaactcagcctccgtcggcgctagcgcctacattgtcatcgtcttcatccctgcccctctcgtcctctcaatccctttctctgccgaaacaacaacaacaacaaccgttaatttcagtccaagcagagacttctgtcaaaccaagacttctggacggtcttggctctgccggagatgagcggctgaaggcgtatagagtattatttgaggatgagtatagagacgaggtcaagctatacatgcatcagatggaggttcgtcccgttcacactcatctgacttgctcccttgttccatgctaaccaatctgatttctgtgtgtgggtgtgttctccttattcagagaagtaccatgccaaaccttggtctgatggacgctcaaccagagctcaaatggttcgtagttgcctcaaaagttttgatctgatacacccagaactcaatgactctctttttctttccctttactatcaataggtatatgcggccgtacttagttgagttcctggttgaaatccatcaacagttccgacttcggccagaggtactctatctcgctctcaatatcgtcgacagatatgtgtccaaacgaatcgtcttcaaaaagcattatcaattggttggctgtgctgctttatggatcgctgccaagtttgaagtttgtctgcttccgattataatcctctcaatgcgtagaagatcctgcattgaccatgctttcttgttgacataatctcaaaatgggtttatcgagcaggattcaaaggataaagttccgttggtggaacagcttagagagatgtgctgtaacgcatatgatgagtcggccttcctccaaatggaaggccatgttctctcgaccatcggttgggtcgttggccatcctaccgcggagagttggctccgattggcttgtctaggagtgagctttttcccatccgttgctatcttttttcccttcttcctacaagacgccgaaagtaccgatgactgatttcttctttgtcaaacccaacagacatcccaagaagacgcagagacacaacatgtgacgagattcatcatggagctctcgttgttccataaagagttttgctcattcgttccctctgcgattgctagcggcgctctgctgcttgcccgctggattcttcgcaagccactttcggtaaggacatcaatcgctctttcttaccgtactcgctgttcccgaggctgaccgcaatcacgaacatccttcgcaggttcctgatcctaaaagccccaccgtacaagtcgcctttcacctcgacgtccacttcgggggacatttggcctctgtctcggacgttctcatctccaaatactctcatttttactataaccaggcctctcttctcgttcgacatgaatatcttcgtggtcgacggttctcccttcctgttccggcaacaatggccgcgaccgtggtcgaacccagggctctggcttcaaccctcccaggacagatgccgctacccaccatcactgtcccaaccactccgaacagctccccgacccactcgatcattcctccgctgccaagcctttcgagaggcactcctgtgatgagcacgattgggatgaggcgtagttcttcaaactggtcgagcgattcggacatgccgcccactcctactggctgcatcatgacggccatgacggccatcactccggacctcgccaaaggtggtccgacggacggacaaaaacaatctgtagtaagctcgctacaggttatcaaggagcagcaaacctttgtcgttggagaacccagaatcccgcttgggtctctgaacgctgcagcaatcagctcgtcagaaatcggagctacaagaacgcggagcgggtaatccgacgttcgacttatacctctcctctggccaaccatcctgcggtttagaaaaccctgaacagtgcagagttcaggcgagtttttatcctttctttgttacagcatatgttcttcctcagacatttttcttttcaatattccctccagtctctacaaaacctgtccgttatccaaccagatgttccaccgtcttctgttcatttatctttcggttttggattagtatccttgtcttctcttgcatggctcttcagtcacatcttaatttctgctttaaacatctatttttataaaatttgtctcttcatcttgtcttttacttctcggcctgtatctcttgtcctgtcggtagttcatctttccgtctttctgtctccattttaatctttctttgggaatttccctcttttgtctcaatctccacgtctgtgtccataccctctatactccctttcttctctcttcgactacaatttcgcattgagttttcttttctgcatagaatcagctctcagagtctgttccgctctcttccaacttcggctgtttctctttttatcttctttatccggcttcaatctctctccgcggtctcgtgtgccggaaaaaggtcgtgctcaggatcagcatctggatgtcgtatctacacgcgctgtttgtttcttcatacctttctcctggaatatatacatggtcttcttggggtcctattctttgttttcttcctcttgcgaaacattcctttttaataggtctttgcttggagatcaatagggaagcgtcatataattttgaagagaaagagtccttccttctactgccggaataatcgctggtaggatgggggtaagtactacgaatacaatggttggtataaggacaaagtgcgacgagcaagaggcagacagagaatgggatcaaaagaaaccctcgtatcggttcaagcgattaggatcggaaggctgagaacagacagaaaagaagaaaagaaaagacaaggggggcaaatggcaggaggtagagtgatagaaacgcataccaggaagaagttgaacagatgaaaaaaaactttgagctatttgtttatcgatcaacgaggtgtcggctctgccttcttgttcttccaatgaagactcggatcatttcgaagatcaggttggacggcttgtctggtggaccgtctggtgtctatcgcttgtgcgtggatctgtgctcgagtctgaagctcctggtatcgcttttccgtcccgcggtgcatgtattcccaaatatgcttgattgtattgatcagtttagactctcgatggcctcggggatttagccagtcgtaaaagatggtgagctaagtcaggaatgtaagatcggaaaggtgaagatagtgagtaaaagtccgcgagatgagaacagatgtacgatgtgagattctttagactgacctcttccggatcctcgagcatggcccactccccctcttcaagcattccttcttcaccttcttccttttctctcttgagacggatctcctcctccgtaaactcgactttctctccccaccaagctctctcggccgcgttgcctccttgtaaaaagaccctacctgttccaacgatgaccgcacctccgggacctattagcgatgccgagccgatcccgtcgaaccaccagagcttgttaccaaaccgatcgatccccaatggcttgaccctcgggaaattgacatgtttcctaaagtcccggttgagggcctcttctttgcggagtaacttcaagtcctcgtcctcgattcgttttcgttcggcagagagctgcttggccgaagctgcctttattcgaagctcttctctctcctttgctaacgtctctgctctcgccaagttttctgcctcttttgcgagctgctggtttttaagcgtgttctgtcggatggcggcggacgagatcttgccggaccgaccagaggttgaatcaccagcgagcgaggcggtgtccgatccgtcatccatcagttcatcaggcaaaatggctctcacagcttgttcttctagttcattttctgaggcatcggagagcgaggacatatcgtcttcttccggattaaaccctgggggagcggtcgaagaccatcggaagggttcggacgtgatgctcatcccatcgtcatccatatgggaaggcgctcgagaatctaatccatcgtctgattgtcgaggttctgtcgagagttttgtcgaagcagttccatccaagagatgcctttcttcacttctacatatgcagagtcaagagggaaaagagaaagaagattgatttacgtgagacaaataaagtcagatagtagtaaaatgtttatacatgaaaacttacagctttttgcgctctcgtttgatgtcgatgagatctttcctcacttcggtcaaagcagttgcactatcatccatggcctccctagctacttttgtctgggccgcgatctcacacaggaaggccaaagcttccagtttccattctgagggcaagctggcataccgctgagacggcaaactggctctgatgcctagtcgaggtgaactggcgactacccaagaaggattctcgtcgtcctctgataactcatcagattcgggagggtagaacagcaaatgagccaatatacgtggaagagaaggaacgctctggatgtcccctcgctttgatgaagaaaaaagacatccaaaattgagaggaagagatacgagcaagggtcagtatggcatggaacctgaaagtactgatagggagaaactatcatttggaaaaatgagataaaatgaacaaaaactcacctgtaataggcaagcgacgagacaagcctcccatcttttccttccatccttgtacttcagctctttaccatctcgccatccacttctctccacaatcttttctgactcaatcaagagcagcttttttgttaggccagggtagccctcgatgatgttctcatcctcctcctcctcttcttcgtcttcgtcgtcttctgcttcttcggctgtctgtccaccttcaaccgaaacatcacgagtacttgattctgcaacaatcagatcaccgtcttcattctctgagaacacgccctcaggatctgttcccgaaaatctcgacccatccaacgaggcttggtgaaccgaattgaaaagactcttcttctttcctttgagtaaggagccataggaggtgaatgagtttgagccgtacgtctttagcggtcttgcaatcaacgttggttgaaggtctcgcatgatgacgttcaacaggcaggcatggacttcggaggtgagaggatggggcggatcaactaggtcgtacgtcaacgagctcacaaagtcatccagagtgaaaggagagagaacgagggtctttccgaacgcattgaggaagcaccaggtggtgataagcgtctcaaatcggtcctgtccgaaaggaaggttccgactgaacatcggacgctgcgcggccttcccactggcgatctctttggtcgtcatctcacaaagcaagtcttcggccgggtactttaacggtctcctcctcggcggtgtcggcggttgatcttcaaccatcttgggtggggtatctggcacagcgacgagctcgccttgagagtttcttcttctcctcttcttctttttctttggaccatcctctccaccaccttcttctccgtcttcaccgcctttgtctgccccgttctcggtaggcaggtgagatgtaccatcgaggccgaccggagtggagacgtcttcttccttctttggtcgtttccgtttactaatcgcgcccgacttgaggttgttcagttccgcctgaagtgactcgtcaggtgtctgagggatcccgtacttgacacacagtgccggttttaccatccagggggaggccaaagaggaatctcgatcgatacagtctttcaggaatttttttagaatcgttttagaaaatgtgatccggtctcgactgaagaggggagaagggaaagaggaaggaattgagtgatcatgattgtgctgaaatcaaggaaacgtgagattaggttgtagaaacaaacctgatgtcctgcgcgtccacctggatgagcccttggccctttttccctcttccttcgccgtcgactagtcggacgagatagacataatcggtcggaggatcttctttatctgcctgctccagagagatcgaaaggtcggttcctctcgcgtgagggttctctattgtcggcctggcgtaaatttcttcccacatcttccttcgggcctcgatttgttcttcctgctcttcatcgtcttcgtcattctcgtcatcctcgtcgtgctctgaatcaggggtgggcggaacggatgatgaatttgaacgcccacgttctgacgaaggagggagagagagtgtgcttccgggagacagcggggcgacagaggcggtcgccagcgcagtagtagaattggaggcggccgtcggatgcgagttgggatttatcggtggaagggataggtccttaggagtcgacgggtctgtacgaggggcagctttgtgcgtcttacagatgatggcatggtacttgacgttatcgacatcggcgataactcctattcatcgaaggtcaggaagtaagaactgattgagtgactgatcggatagaaacattggtagtaaacaaccaagcgacgggagaacgcttactctctccattgaaaaatcgatcagaaaactgatcatggacggcgtcggtcaaatgatccagtctcccttggacttctagactcgcccgacggaccgatcaagatagagtatgtcagtctactcgagtctgacactcctgtgttattggtaacagaaaaacacgtacgaaattgaacgctccggaggatagggcccttgagatgttttgggaatttttcatgggtgttgcgcgcttcctctcgttctgatttgagagcttcaaagtacgatagcggagcctttgaggtagcttcacattggaagtctgtgcatgcgtacgtagaaaggagtgatcaggcccaggtcagatcaaaggagggcaaacaaagaacggactcttctggtggtaaaacatgactctgtttgcataggatctgttttcacgaaaggaaacgagcaaataaacgagcggatggatggatggatggatgtcaacagatagatcactctcctcaagaaggaaggaaccaagagaagttgaacagactcgtaatccagaaatatttcgcccgactctttgagatagaacacgttcttttcactatctaagacgagttctgcatccgtctgagttttcttggtgtcatcccctacggtaggagtgtctccatcgaggtctgatcgttcagagccttcctcttgctcgaccaccaacagatcatcatcatcctctatgggctgagtcttttgcggggctgtcgagacagaagtggaagcagaagggatatcagggtggttcgagtggtacacctggacgggatccgggaggggcaggtatcggacttttttccgctgaaggagaggcatttcggagggagagagaaagagaggattggcctggacgcgattgagtatgtacgttggacgatcgattgtccttttcgggttatctgagcctcttttgtgggtccgtccgatgggcgcgtggaaggaaaaggaagcagacgcgaacgggaatgggaatccgataggtgttgtgggtatgagagggctgaggataaagataatttcagatcagctgttgaaagagagatctatggcacgaccggatgagtgaggatcgagagaagcttctaggatgaacgcttggagagaaactggaagcaaggccgatggttgttcagggaaagaacaagacgaacatgtgagacgatatgtgggaagtgtgtgggagaaggaaacaagaggaaaggaaggaaaaaaataaagcgaaagagagcgagtgaatgaacgaaagagacgcgcaatgaatgggcgttttgatttctttctgccttcttgggtttgtctttctctagcctggaatgtgcgtgtgtgtttgtgtacgtgtcttcctgtgcttcctttcttccttcgctctcaaaggatgtcatctatctggtccgttccatcatcaaactctccttctttgccgtaggtggatggatcgccatgtaggtaagaggcttctggctttgtcgctcgcgtctggtagggaagaagaggaaaaaaagcctggagcctgatgtgagcctgtgctggaagcatgtcaggcttggggccgcccacacgcgtcatcgcccaccgatcgtacgggctcgttcagtcggtcgcataaagttgactttctttcttcccatcgccgacgttatcttgcttttcctttctctcctttcttttcctcatcaccatctgtatacattcctcctgatccaatagcagctgcttctactatcaacacactatctgcactactatgtctacagcaagtgaagcccaagttttgtcaaaaaccttggtccatgcgatcccgatcaggatcccgctcctcgtcgggttgacgacgacatctcactttttgtttggaaacatcgcatccgccacacttggtcttccgacctggttcatcgaccacccggccgagttgagcgcccaccaaaaggtctccggttggagttacttctacaaacgaggcaaggtgcgaacccttttacctttgttttctccactctcttccttctcttttcatatttttccaaaagaatacaaaagaaaaccccctctcgtctgtcaaaaaatactgaacgggcaatacctctgttctcggcacaggcccaatacgctacatccgcgttgatctctgcgctctctttcggcctgatcgcctaccgaacgcccaaagggctggacatccgaaactatgcgatcgtcgcctgttcgcttgccagttctatcggtctcttcaccttcaccgccatgggcagcacgaacgccaggttgacagagttgtacaacaaccaggctctcgtctcggccgtacccggtgggctggaagaggcagaggcagagggcttgctccaaaagtggaaagacctcaacgccgtcaggatgacctttgctgctggcgcttggctcgccgcggtcggtgcgatggtcagcgtgtactaaatttgtacatacctcaccgcacacccatactgccatctccctagtcctctgttgtgttgactcttttgtgataattcatgtttgcagttgtactttttagacaatttttgttctccgtccctttattccagaactagccctatgacaaatcgcaacaaacttcagtcatcctatgtagcttttctcgctaatgagattgtgcaagtcttgtgaagagaagaaacaaagcatacacatagaaagaaacaaagagaccatgtttacttgtatccgtcctgaattcattacgtatggcggtgtgaagacagacccggatatctatgcgagaaaagagtaataacgaagagagaaggtgtatttgattttatcagatataaagaaagataggaggcagaaaacagagaacagaaaacagaagaaagactacagtggtagaagaaaccctagagaagaaaccgagatagactagcgatacactgagatatggatgaggaacttgagacggaaggcgaaagaagaaagataaagaagaggggagggggacagaaaacgtctacggacgctcttggtaaagaaaacagacgataggccggcttcgaggttacaaaccaggaacgatcgagacggaaagatatacggaaaagatggatgatcagatagaccaagtggaagaagaaacgatttattccgatgttcttttactatgtactggatgagcacgactagaggaacatccaaagggcgacgtcagaaaaaaggaggcccttgatctcagggacaaccgccccaggatgatgatgatgaagaagacagcacctacccaattcatgcggatctctggaattttctcttatacgtcctgctcacgcctttgcaggcccgtcctttggtccagccttcttctccttcgacatcttaaggagagcgtcatgatagtgatgcatggtaaatgaatatctgtccaacatgtccaacgaggaggccgacaaggcagaatcggacgggacggaatcactgtttgaggtagaagtggtgtctgccgacaaaaccgatgacatggaacccgagcgaggctcgtggttgtaggagatagcgacaggagtagatgcaatttggttcattttacggaaggcgcgatggttatgatgttgctggatatcctgacaggagaaagaaagatggggaaagagtgatatgaagaagaagaagaagaagaaaggaaagactcgagggtttatcttcaagaagaaaaagggcaaaacgaaataagaggacgcggtccgtgtggttatgagcgatctttgagttctgacgtgtacgtccgacaggctatagcaagtcccgctcagagagagggaaaacgaaaaggctagaaagctaaaggcactagagtggatcatcatgaatcatcacttatcatggggagagaagggccagcagggaggaggaaccggggcacgcttcccccgggggggcttccgaggcgcctttcaggtacattcagggcctattcagggatcaggcatttcctccgtccgagaaactcaatcatcagggcaccacagcgcccacccctacatacatatacatatacaaaagaagaaccctcgggtgatcaccgttggagctggcgctgagaagataggatgtgtttggattgatcgccaaaaaactgatcatcagtgacgtttgacaaggctgtgctgatcacgtgcgagctcagaccgttcgttcgacgcgtaacgcgtagattcaacgcgttcaaccgacgcgtcttgatttttccttactctacctattctgttcatttacttcgtccacttttgtgtctttttctctcatatcagatttgacatctgcctcctatggcctcaacatctgccccgttgggcgtgtttgctcagaaagcggctactctggataactatgagcttccctggtgaggtcgttgaccttttgttctccatcgctctctgcaatgcagattgctccatacctatgcttttcaaagctgatccatccctctcttcgttcttgctctctctctctccttcctccttcctccttcttcctttttctgacaacgctctctctagggtcgagaagtacaggcctaaagttttggatgatgtagtgggaaacaaagaaactgtcgagaggctgaaggtgattgctcaagacggaaatatgccacacatcatcatctctgttcgttattccctctccttcgtgctctctatctctcagtttaactgtcttctaactatcttaccttgtttctcctatttcttttcatcctgtctacttaccttcaccggtttgctgatcaatgaatcaattcgctttatcgtagggtatgccgggaattggaaagaccacgtcgatccattgtctcgcccacgcacttctcggtgacgcctacaaagaaggtgttttggagctcaacgcatcagacgaacggttcgtccagggattccacgtcttgtccttctcttcatccgtccgccatactcactccggtctatattggtctttcattcagagggattgatgttgttcggaacaagatcaaaaacttcgcaacaagaaaagtgacgctgccaccaggcagacacaaaatcatcatcctcgatgaagcagataggtttgtcatgtttttcctattatttcttctctctttcatatctcctatagttatccctctcctcttgtcttctccctttacttcgcctcagcatgacatctggagctcagcaagctctcagacgaacgatggagatctactcaaacactacccgatttgcgctcgcatgcaatatgtccaataagatcatcgagcccattcagtcgagatgtgccatcctcaggtttgcgaaactcaccgatctagaggttcttaaaaggttgattgaagtttgtgagctcgaaaacgtaggtcgctttctcttttgccgtgctgttcctaaacctgatactcattccctccctcgatctctttctttctttcttgcgcatctctccctttcccttatttgcacatttttacccctctttcccttctattcttcacaggtcgaaaccacggacgatggtctctcctccttgatcttcacttctgaaggtgacatgcgtcaggcacttaacaaccttcaatcgacccattctggatttggaatcatcaccccatcgaacgttttcaaagtgtgcgatcaaccacacccagttgtcgtccagcagatgatgcgcgcctgtgctaaaggtgatgtctcccttgccttggacaagctagaaggactctgggcagaaggctatgctgccgttgatattgtcaccaccatctttagagtggtaaagagtttcgacgagtcagttcttttgcgcattctcttttcttctctccctcgtttctgcatctttctccttcgcagattgtgacgaattttcttaatcgaccggccgactgaccttattatgtgactaccaggttgaccgaatacatcaagttagaattcattaaagtttgtgcccacttcctttccttccttttcattggaacggacccgagattgaccagacgataatggggcttctctggattcttatttctctcctctccattcttctctattgtgtcgctttctgttacttcttatgaataggaaatcggttggactcatatgaggatcttagaaggcgtaggcactcttgtccaattaggaggtcttatctcaaggttatgcaagctatcaagtttcgtccattccgtctttatctttcttcttcctattctctcccctttctccttctcttttcctacctcctcctttggttgtcctcttatctgtgaatcaaatcgatcgaggttctgactcttatcttgtgctcaaacagtcaaccctgatgatttcaaagtgtgatcggaacgaaaggacagagaactgatcctcacggacggatggacggtcataacttgtaaatgtaacctataaacctataaacctataaacctataaacctataaacctacaaacctataagcctataaatatccgatgtttttttttttacgttgatgttgatcgcaaaatgatatgcaatgacacaacatgaacgaaagctcacgaacaattcatccattaagctagcgtttttggagtggaagaaggaggagagtgaagagtgaagacgcggtgaagataacggaggggaaagtgaaagattgtatgtgagaaaacgaaaaaagggaagggggagggaagggggaagcgagagaaagtggaggatcgattactgatacaactgtgatatccgcacactgattcaaaagagcggccggacacagttacttgagagataatatcgagcgagcgagaaacagtgataatgacagtgacagagaggagatgatttcgagagaaaagaaagaggagaagagaacgtacggacagaatggagcctaaatgaacagccgcaaagatagagttgagattgcaaggagaggaaaacccggcgatggaagagtacaaggaaaaaaggacaaggtataagaaaggaagaaaataagaaggaaagagaaaacaaaaggccagcacacaagagaaaacaggatgcaaaaacaaatgagcacatggaggcttgttgtagaagagacaataaatatgagaaagcaaaaagatatcaagagagaacacagagagaaggtcgtcttttgtatcagaagggtatccaccaaagaagaacagaatactgaatagaggggcaaagacacatgatggctgaaaaaaaattgagtctccaaaaagaaatcacacagtggaagggtatttcagagtaagtgtaagaagaaaaattccagcaggacaaatatgcttaatgattgtagcccatcatagtgatcaaagaagaacaaggcttaaacaggagggcttcctagcctgcccaatcctcgtcccccagcattactcataccaggacctccattctggtgcatcaacaaccccatcaagtcagtctgcccacctgatcccatacctcctacaccgttaccattgccagcaaacatcatctgttgctgttgctgttgttgttgcatctgaagttgatgcagataatgctgctgttgatgatgttgctgcccattcatgccttcgtacgggccggctccggctcgtcctgaaaagccattagccggcaagttttggattccacccccactgtttggtgaatttgccctatgtacgcctccaactccagatccggtgacgttgagcatcatctgtcgcagaaggtggttttggatctcggccgcgttgggaggcggaagagatccagacgaggctgggccagccatcgaaggaagaacaccggccggacgggaagcagccgaaggaggcgatgcataagagaacgcgccagagggtccatgaagagacgagccagggctgtctctaccctcttggaggggttgctggtggccggctgggtgactgatcggtcctcggactcctcctacgccggttaggttgccaccggacggcatttgctgcagctgtctcaactcagcaatactgtaccctgtctggccattggatggcccttgttcataccgggctgatcgaggatcaatccgtcctcctgggttgatattaccgctgactcccccatccggcaaatgctgaagatgctgctctctttgagcaagctgctgatccaaatcaaatctttgctgcgtcatttgaccttgaccagggtaaaaccttgagaggggctgattgggatgaccagaatgaggaggctgtggtggtagtggtggtggaggtggaggtccacctctaggagggtaaactaacgacggttgttgaagctgagagtacaagtgctggagtgggttattagctggaacgccggcagcacgttgcatctgctgttgttgaagatgaagttgttcacgttctttctgcgccagaagctgctgctctcgatctcgttgagcctggagctgagcttgagcaaggagaacttgatccctatccctttgttgacgttctcgcagaagaatctgctgctgatgttgctgctggtgttgctgctgagccagcccatgggaagggtgatctgagtgaggtggttgtcgctgctggcccgcggggataggcgatcgcatttggtttggaacattggtgttcgtaaaagatgtccggccctgaggccaggctggttcgaaagcaggtgaagactgagcctggggttgctgagtaggaggttcgagggttggttgggacggcaagagtaggggagatgtcgcttgacccgggctaggcgtagagttctgtagcatcgccagtagtttgttcatttgatggtctccacccgagccacctgctcctccattcccagtcaaaagtcccatcaatccggctgtgtctactgcagtcgcgccagcatttgcactagccacagatccgggtgccccaaccggcactcctttacctctttcatcgaaaaactttttgaacctggatgacccacccggagctctccttgattcgccgttttgtagagtagactccccaggtgtaacaggtaccgaagcagaaactacatccggcttgggtcccgaggaaagcggaagcagtgtgggtttggcctgagtcacggacggagtcgatttgacggatatgagaggtggccgattggttggctttggtgaatctgattccgtcggttgcgagttggttgtggatgtgggcgtacgagcagctgggtttctgagagcgtcccgctcgcgcatctctcgcttgaatctctgaatttcgtcttccttctcgttggacgtgatggtcgagctggcaagagcggtcaacaggtcatctttcttccctttcgcgccctctttggtggtcaatcctggaggaggtgctggcgaagaggaagtctccgtcatccaggcaggtacctcatcttcgtcgtcatctcgccctccaaatgtattcctgtcccgtcgactgtcccgtcggtcagcactatccctctctcgcagaggaggcgcagggttccatgctggtcggccaggcacgcgtgagtttgaggatgaggatgagtgagcgtttgaaccggacggtttagcgggaaacgactcggaaggccgtataggaagagacgcggcgcctatgaaggatcaagtgaggtcaaagtgagagtcaatggcgattcagtttcacatttataggcagtcaaaacactaacctcgtgatctccaatctctgctatcccctgttgagctccagtcgccatctttgcctcctcgtcggtcaccatcccgtttatcatgtttatcgtccgctccagagtctcttaatctctctttctcgctacctcgggttgcccaagacctagaattcagtcttgtggagtctctgtctcgttccttatcataggtgtcagacaactaggtttaggttgtcgatgtacaccaaaatagcaagcagagcagccaatcaagaaggtatcagttttctgatttttacttgacagcactaaatatcggaagcgcaccttcttcagtccgtcgccttcatccttgtctcgttccttctcatcgtccttgggttttccatccctatctccgttgatcagcactcgtccgccctggtgcctgaagcttcccatccgagatgccccactgtcgccgattgcgcctgttccggctcgagctgtaaaggatgtatgaggaggccgatctctctgtaggggagacttggtattcagatgcggagatccagtagcagcactatgagagtgttttagaagaaggtggtatataatgaatacaagggattagacattagttgtcgagtcagacaaagatggtcaaggaaatgacgaacgagcgagttctgtccgttgattgggcaaattgttcacgccgggccgatgatgaagaatgaaattctctgcagggcgaacgaaaaggagtgttgaagagaagaacagagaagtgttaacccaaagatctcatcatactaaaggtacaatctttgacagccagcccatcttgcccttccgctctcaaggttttttccatccgcctcaactcaagtcttcaacttttaagactcttaacaagctcgttggtaacaagagattagtcaggtactcaaggaatagatgacgtacccaaaccatgttttgaaatctggcatgccttcgattttgtctccggctttggccacgctgtcctttttggagagcttcaaaagtgccgagcgagaatatctgatgacaggcgtttcatctttctgggcttctttcgaggaagctagaggtgaggttgcagagggagatttgaggagatcgactagaggagtaaatggaatggttcgttttcgttttttgtttgttttgtttcacaaaggcaacgatcaagtcagagaaagaaggcaaacgatcagaacacgaaaaaggaggatagtcaatctagaatggaaaataaagcccaaagagtctcaacaacacgcacgctgtggcatagtcgtcagagaaccttataagacgatcaggctgactgcttgtgggcacctgaattatatgaatgtggatgtatgctatagaatgagatggttgaatagatagaaggagtggaaagaggggtgagtgtttggatgtggatggttttcagacaaggccaaagttttcctccctttttctcgtgtattcttgttgtactctcgaatagatttttgatacaacttttctactacaacttgtcgaacttttcttgctcagcctctacagttttgttacagtcgataattttatttccaatcgtcactggctatggaccagcggtcagaacaaaacgaaattgaggtattaatctagataactgcctacatcacacgcttcaatcttgcttttgaatcttagcttgaacagctttcgtccacctccaacattgacgctatgcataagcaccgcaccatcgacccaccaccgagcctcgagccgcatgttcatgaagttgtagagcgcggcgatgtgaagtgcggaatcaacgcaggggtcttcccttgctagtggagttgaccgtatgacgggaggggtgggtgagagaacgacaccgcaagattcgagtgccatcttttcgaagtgaattgattcgttagcgtaatagtcaggagagtttgccggatgacgaccgccagaaggttggttcatcgagggggagtacatgagcgatcgagcgaaatatgacagttggtcggctagaatatggaatggaatccacagctgaagaaggagaatcagaaggcgaagataaggagatgtcctggctattagcgaaccccaaatgcaggatagatccgagtaacagaagagaatacaattaatcttacgtcaattcttaaaaacggattggaatcctttgagtacgtctctatcaactcctgcatcatgcccctggccaacttcagactcttcacatttggctcgttctttgtcagattttccatccgtgcgaccaaaccgagccttcgttcctgcatcatcgccgagtctcttaaatcttcctggcacagccgacaggtacatcgaatccggtgtttcttcagtattgccgttcgcttgtcgagatcgatcctcgaagcgtacgatattgtgagctcctggcccttcttcaaacctgctctgggtcgaatgcacatagcgttaccccagaaggtaagcgagcagttgcctaagcattcgtgatttattactgaaggtaggatgtatagccctgtcggtgaggtgtccgataggggagaaagagaaccgtaatcaggattccattcgagcgcaggcgatatacgacgcggagagaacgaattaaaagagatggcggcctcgacatgtgaaatcttgaatgggaagaagcgaaaaacgcacaaagaaatcagatatgagtgcgaacaaacatcgagggagttcagattgagaggccgtaaggagcacgatcactcacatcaatgtctacgggctgcatagagggttgagttcttggctggacaacttcgagcgctgaaaagacgggtggaagtggaaattctggtccggcgtacagacaggaaaacgccttataagctgaagggtcgtctttgatgtgtgcgagcacaggttgggtcaaataagattgggtggcaatgtcgatagtgttagtatggaggttacaactgaacaaagattgatccgggcccaagtctgtcttataaaccgctgcaaactaagttgagagaggtttagaaggaagggttcagctaatggagtatttcatgagacagtttagagattggatgcgtcaaggttgaagatatacaaaccggttttgacaagatcagaagttgtccagccttgacgtcctccgtcaaaaatagccctcgccctcttccgggactcaggccgactttgaccggtcctgcgtactctgccacgtccaccgctggattcgtttgcgagctcttataaagctctatccagtcataatatccactcttcatctcgactagtcgagtggcgatggccgcaatcccgtttcgtgcctcctgggattgtggaaattgagaaagcaaggagccataggtagcgttggcgagtgagtattgaccaagtgcatactgagcggttgcggaacggaagagtgctttttcgagtagcggttctgggattgaagttgaatggtaggtaagtacgtgatcggtgtcaacaagcgcagatcgaaactgcttgagtctgatccggacggccgctcggttcaacctaagcgcgaggtgatttggatcgagagcgaggccttgagagtatgtatgctcggcagcgagcaacctgccggctgataataactggttgcctgtcgtcttaagctgctccgccgtcttttttggtttttcccgccaaatctcttctggccagaacggcgcctttttccaactgactccacgaacgagcgcgttgccttcgtcgacccagataagaccggttggggaatcgactcggatggaagccgcgccggcggaggacaatttgtaataaggctctcggacggccaaaatagagcctagaggaaaaagtatgtcgagatcaggtccagttggggtcattccgataggagcgttgtaaaacgcgagagtctcggccagcccggccgggtcttgaataacaaacgtgacgcctactatccgagctatccgacacagtacgaagagaaatggtcagcttgaaagtagtatacgttttttacgtgtcttgagtagcaggagacagttagacctacagggtctggagacaattcggcagagtagataacttccctatgcgcccgtcgggaaagcacaaagaaattagagacgacatgctttatgagcttgtttgtcggattgagattggattcttgatgatacgcgctatcaagcatttctttgaccggaaagatttaaagagattataaactaactacatgaacctttctgcacgacatatctcccagtccaatgcggttaagctttcgaatgtcgcagagtgaagagtgtttcttgccagcatatgtttgtttcatatcccggtgacccgtctgaacgagcttacccatggcgatacgtttctccctaatatattcggctgtttcgactagctgatctaccggagtaactgagagtaaaaaagaagccgatgatgatgagagaagagaaaggtcgcaagtttagtatttgctgaacaaggcgaacgaagcaagaccaaaacatagttgaaaaggcgaataaagagtgaaaaggggattctgagagcttgccgattgaaacgtatcgctcggaggactactgacatattctgttgaaaataaaaatgatttcaacattcagaagtaagcgtttcatcgtcatgatcgtcgtcgtcgtcgtcgtcatcatcatcatcaccatagctatgcccgtcatttcagcagcgataggagcgagcgcacacgcgactcacggatcctctgggacggcagtctgctcttgggcgaccgctcgtcttgtatcttctaaattgcgcagaaagtcgaccatctcggttgacgtttgatggtactcgaaagcctttgacattggcttgtcttttgggtcgcgaccagaatgatggccaaagtcgaaaggtaggaaacgctagacttgagggtattaaatggccaggacgtgatgagcagaatgaaacgctctatcgcttggccgatggacaaagtatgcttccagagcgaaccaaacggagatgaagcgagggatggatgagaaagaggaatgtgagctgcttcttgggttgtttctaggagaggcaagctgacaatggatttctcgagtcgcccaacgcgcgtgcgtacacatgtcctagtcaatgagactgaccctggttagtataaccctaactctgactttggccgacacaccacaagagttaaacctggacgagaatcatcactcatcgcaaagacactgtgatgatttttaaagaaaaagatcatcaaaggtgtagatgttgaagaaggcgcaagaaaaagaaggcaaaaaaagtgcaaaagatgaactagcccgatgggggggtcgaacccccaaccttgtgatcacgtgtgtcttcgagaagccttaaaagtcacacgctctaccgattgagctaaccgggcggttgttatcaagtgtaaacattatgactttatgtagacataatgttaaactcgacatctttttcgagccattcattgccttgtctcatcgttctccggtcatcacacatccttcaacaccctttggatctttctatttttggctcaaggatggctgcaaggttgactcggaagccattgctggatgatggtcttaccctggctcatgttcgttctctctttttcccttgtccttctgtttacatgtctgttcactctcgattgacactctgctttgacatatagtttactcatcagaccactgtaatctcattgtatcgacaattcctacgttctacccgaggtgcgcgtctctatttgaatcttctcacttcatctctatcgatctaggcgtctgctcatatctcatctggatacacgcgatacattgagtagcacttcaagcgttacctaatagaaaggaaagtatcgatttctaccgcaccgactttcggttgaagccccaaatgggccgacctccatcacctgtcagtccaccatctctctgttccttcctcgttcgtctctcgcgtcctaaacttgagtattcgttcttgatacgctatgctgccctacaatctatcgcgcgatggtttttcggatgctttcttcgataaaggatgcgctgcttgcccacttatcagcccttcgaaggttgttggccagagtcccatggtcatcttatagcttgctcggtcagagtgtacacgcgggcaccgagtggcagaccctaggacgtggacattggagaacaggagacgtcgtcgtacttaagaaggcaatcaaggataaaaactcggaaaagtgagagagaaacaccgaccatcgttccatccggttcgttttccttcttcatccgttctttgacgtcttctatccctgtcaggacgcgagatctgactttgatcgatctgttcatccttccaaacctagatagaaaaaagcttaaaaggactggaacgtagctatgaaaacaaacgttcgatcctgtatacacacaaatatacctcaagtacgaagagatctccgggtacatctttttccatataccaaactaaatgttggtcatccggaggccgaaaaggaagaagcgtatctcgccctctctgctgagctcgaaatacggccgggtcggtagagagcgcgtttatgagttttgttttatcggtcgatccatctatctaatgacggttcgaacgttttattttcttctctcatgtacgctggaagttgtccaacatgtataaagatgacaaaatggaagaaaaagtaggcagatgtagacaggtagggacggtacgatgttttgtttgtggaatgccgtcaaggtgtatcatacaaccataaacaaaaacatatttcaatctggaagaaacggtgaaaacaaaacaaatgatagtaacaaggaacagaaagacaacacagggagggaaaaagaaaggaggagaggaaagaagtcctgtggccgaatcacggcggaaaatcaataattgtaggtatgcggagctgatatcaactccctctagacacctccaccagacttttcaggcgagatcttgtttcggaagtaatcggaatctcccatagtgatatgggtgaatgcagagtcaatcgacaactccttcattccagcggccagctcgcagaagtcgtcgaaaaagatagctcctcgtcgatcaaaatcaacttcggagatgatagcttggatggtctcatcctcgacggaagagtatcccaaccttgagagcgcgtgcttcaaatccttggcagtgatcatctcgtcctgatcaaaatccatcttctggaaccgagtcttcaaatcagccacctcctcgggcgtgaagagcgctctagagtagaacgcggcctcgtctacgccgggcaaccgggctggtgagatcgaactcgtcactcgaggcacgtcggccaacttaatgttggctttgtgctcggccaaacccatagatcgcaggtagtagactagaaggacaaaagacagatcgcttacttaaagtcagcgcactatcgacaatgagaaaggatgtgaacaacgtaaggatacgcacgggcactgtcaaactccttctcgactctttcctggttccagcccaactcgctcgccataatctccaagattctcggcagcgcagagatagtagcgtcggtgttcaggaacgacaacctagatcgtcgaccgataaagtccgcggcatgctgagcgtactcaaatcgacaggcgtacctgacctcggcttcgatcactgggtagttgggtgaaagtcgaattccatgaagaggccaagcgtaacctgtgggggcggccatcgagcagatcgtccacgcccgatctccatactagtgaacgaaatgatggtaggaaacatagagagcgatgggattagagatccgcttacccttctcacactttacaagaatgatgtccgaatagacgtacgttttcactgagatgcttggcaacctcgatatcaagtccgaattgctgaattagcttgacaaacatcagattggtccatccgtgagagccgatcaacttgatatgtgcggtctcgctctttccatcagtcttgagtccaaagtgcttgacggcttcgtcgacggtctcttcggccatcgctcgatacgtcgtccatttaccaccggcgattgtgagcaggccagactctgagatattgatcatgtggtttcggacaagggactgggtgtccttagcagcgggatcccgaacgagcggtcggataccggaccaagctgacaacacgtctcctcgtcgaaccttgatatcaggagaaagatagtttcgaactggaagtaaacgaataaattggtctcagaatgtcttgtataacaaagtcgatctacatatgttggaaagagacaagagaattcataccttcatcaagaatccactggatctccttctcggacggtatcgggttttgttccacgttcgtaggagcatctgtcgttccagcgatgacattgccctgccagggcaagaagaaaatcactcggccgtctgaggtattgggatcaagcaaacccatcgttttaggtccgtagtacgccttttagagcgaaagagaattttgaaggaaacgaagaacagtgcgcgttgacagtaagctcgactgtcaaatcacaacattttacgacagatgtttcacgcacaggcaaggttatgtgaactccagaggaaggagcaacaatctcctgggtcatcggctcgtctagctttcgaagtccatcagagaagggaccggtagcattgatgatgccctgttatgatatttgtgcagattgctagtgtcaaattcaagtcgaatgcaagtaacttttcttcaaggaaaacataccttggccttgacctcccactcttctccatttagctcgtctcgaactcgagcacctctcagcttgccggcttcgtccttgagaagagcgacaacagacacatagttggctacggtcgccccattatggacctattgatgcaacgtgatatgattagagttttgaaagttacttgaagaccgggcagaagagacaaaaaagaattgaaggcgacaaacagcagagaggatcaaagccatgttcattcgagagtcattgtgctggcctgtgatgagaatcatccaggcatagtttctttagtatacaaggaaatagatcagactttgggaagaagagtgacaaaccgtcatagtagacgacacctccggtaagtccttcctgcttaagcatcgggaaagcgtccaacaccttggacttgcccatccagtacgcgccgatatttccgccctcagaaccagccaagatatcgtacatcttgcaaccgacgtagtagtagggcagctgccaccacgtgtacgttggaaggagaatgggcagcatgtgcgataggtatggcgctgtctcaaggaaaattcgtcgctcccgaagcgcttcgacgacgagcttgtattggtctaggttgagagagcagccaatggaagggatgtgagtctatggcgttcaagagcaagatgagcgaaaacacaggaaggaaaggaaaagacagaccatagtctagctcaaagatagccttctgaaggtatcgaacaccgccatgaacgagcttggttgattttgaagaggttcctgttaaacaaagtccattaatgagctctacgctgatcaaagcagatctcgagcgcaagattatcaaggaaaaaggaaaccaaccagacgaaaaatcatccctctctacgagcgcaaccttgagacctcggctggcagcatccaatgcgactccactcccggtagcacctccaccgacgaccaagagatcaaactcctgttggtccttttcttcaaacttggccaccttgacaccctttccggatttcttcaggttgtcgatcatttgcgctcgcgtaggaggcgaccagagcggtcccggacgagaatactttgacttctcattcaacctcgtggcggcctcgagagacaacggagaatttgatagagcgtaggtggtaccgacaagggcggtggttgtgattgctccagcgtataaataaggtttgctgattcgggggagggcacgacgaaacatggtaggaactgtcgtttaggctagcgagacagagagaaaaaggaagagaatgagcggatgcggttgtcaatgagatgaatatcgaagatgttgtaaggagggaggagagaaagaagaggaaaaaagaagggaatgaagaggattcaatccaggaattgataaacgttcgcttacctagatgaaatgtggattcaaaaggatgggagagacagagatgggaagagagaaacgatatatggtcggcgaaaggaacaaaagggaaaaaaagaaagagacagctggatctatccgaaagttgtcgaaagagatgttgggatttctagggatggtctggtttcgtcggagagaccataagagattagctttctttttttttcctcgatggagtaagaaacagaaagagaaaaaagagggtaaacggcactgatgtcacagctatattaattagtcccagtcgaatcagaggattgactaggctttttcgtttttcatgctctgctctcgtctgtcctacctatgcctcgaatctttctttataaacaaacgattaaaaactcaccgttcgttctaagtgcgagatgggtataccttgaaagtgagagaaacccaagaaaatagtcagatggagaaagaagagaagagggaacaaccgtcgagcttaaagagaagcgcgacgtttgccaccaagactacggtacctacggtacctacggctcggccggcattcccggtccctgaccggaccgggaacttacctaagtcggcaatacttgaatgtcagggtagccgaaggcggggtctccatttcaaactccttctttgttttctcgatcgtctcgggttcaggcacaaggcctatttgatcgcggatcgttggagtcccctggctgcgcaacccggacatcaaaaagaagcgtcagtacctgcgtattaagtaagcagacccctcacgtgttacctttcccccgccttgtgcctggccagctggctctcgtaggttctattgcttgccctgcgcggagggagatgggggccagcatgtgaatctctgggccaagccagccagcgtttttccgtctctccttcctagttctttgacggccaaccagatccatcaagaggaagaaaaagaagatagataatggccgacaaggaaactatggcttctaccgagtctggtctcagacatcggaaacctgcgcccatcactacaccttcccaacagactaccgataatgacgatgagaacgatgccgtttacgggcgaacgtgggatgggaaaggtatgtctacttgctcttctttcttttctctccttttccctttcatttctttttcctttgtccctctgttcgttgtcagctcgtccttgggtttgaagattgggctctttggggtcaacaccctcaagctctatcacacagataaaggagatgcaacagtgcgcacatattgtccatccaatgagcccctcatagtggtccgaaagacacaaagaaaaaaaaaggaagaaaacccagccagaggagaggagaggttgctttgagttgtgtctgcatcttctccgtttcttattgtcttgcttcattacattctcaacggaaaggaagaacgataggagacgttgagagcaccaagagattaatatctacgccttcggtttttcttaccaactctagttttcgtcgttcctgagacccattcattcatccatcatctcttctcatacggtacacgaaaatcacaacttgacctgctcaccctggctctgcttggatctcaatggttcgttcgtcgcctaaccttctctatctgctcttcctcttcctcttcctcttcgacgtcgcggtctgtctgagctaacaaaatattctttgtctcttccgttccatctctacagcattctctacctgctcatccctcgctcggttgcccagcccctctttctggctttgttcattatctttcgactgatgtacaacctcggcctcggtatcatcctcacgaagcaatctcagtctaggtggatcgtccgggaggtcctccgtcgaggttggctcgacttggagaagaaccccaagatcgccggctggtggaggaaagagctcgagggcaaagtcggcgggaccggtcagagtcgtttcgactgggagaaaactccaattgactttacggtttggctgctgttcagacaagtggttgatgtcatcctgctcaagtaagtcctcattctcatatggctctgtggtcctcggatgtcttagctgctgtcgttctcgtactcttttcttgtgttgtccactctaaaagaacgtttggctaaacactctctgcgcttcttctccacaaatttccccttttcgtcagtgactttgtttcatactcgcttatggccttttcgttctgcacgcttccttctaaccacgcctggtgggcccatgtccttcgatggaccgccggcttcatcctcattgctttcaacctttgggtcaaggtttgtaactcccttcattgcatcttcctttctcttcttacccccttttcagatcgtcaagtactgtcagattgatcgatttccctgaaaaacctccatagatcgacgctcacagagtcgtaaaggattacgcgtggtactggggagacgcgtcagtttctctctattctccatatctgcataccactgagcctgaatagcgccgttaacggtctctcttttttgttctccgcttcgaatagcttctacaccgccgtcctcaaaaaagatcttattttcgacggagtttacgatctggcaccccacccgtatgtcctgaagtctagtctgtccgttaagccaggtctgcgcttgatcttaacccttgcttttggtctttctctctgtctctttgattgccacagtatgtactctgttgggtatgctgggttctacgggctttccatttgcatggcctcctacactgtcctttttgtcagcattgccgcacatgccgcccagttcggcttcttgctcggtttcgaaaaccctcgttcgtctacagctcgtatcacacagccttgcctttcccttgcgctaaccccaatcactcttgatcatgacgttgtcagatatcgaaaaggtctacggaacccagcgaccgttggctgccagaattcctcttcatgctttcgaccccactaggcctaccgccttgaatggagagattatggaggaagaggaagattcgaccgaaccacacactcctggtctcaccgctggtacgtctaagttctttcctgtctcaaacatttatctggcttctcaatagacgatgtttacctatactatcttagcgtcctccgataccgactctgcggaccttagcgtcaccccgcccccgatatcctccccggccatcaatactcgttccctctcgttcatgtccttgtcttctcagcgattccagagcgaacactctgctaaggccaagaagctatcaatgttggatttggagaacaagttcttccggaaggatctgatcgtcttcaaaaactttgacatcttcaggtcagggcgtctaatccaagacatgattcagccgcacatcaacctgctgacgtccgttcttctttgctgaacatatagaactcaagacttgatgaccctcctgctccttgtctataccttgctccctacgcttttcccaaaggcaagttcgaccttgaccgcttacttcgcccatgctctcttctggcggctcttccactcgttcgtcctcggtttcgctttgaagaagcaaagtgagaaccagtggctcgtccgacacttcatgaagcactaccactatccaaccacctcgggcgcggtcgaggagtgcttcgggaactggaagggtgcttacaatctcagtctgtgtatgacttatggttcgtctcttccgacaagcgtcttcttcttctatctccaaatcaaggctgagccgtctgctcgggtcaatttcttccttttgtatagtttcgttcatcgcgtttgcttggaagacgtactcgattcccactgactggactgtaggaggtcaactgctgcgacataccctcggctttgttcgttccctctcttctcctctcattttctttccaagctgtattttgcttgttttctgtactgatcaagagttaatttggccaatacaactgccgatcaacagatgctcatcgctctacaactctacagttccgactcaaccttctccgcccttggacctttcggctggctttattctgatttctttctggctgatttctacccgcctcagttggcttacaccggaatctaccgattcctcaacaacccagaaaagttcatgggtggcgcggcctttgtcggtattgggttgatcagcggaagctggattgttggaggtttggctgtgctttctggtgtgtgccactggtggtttttgagcaacgttgaaaggtaagaatttgagtttcctcctgcttgtgatttctacatcttctttctagaattggaaacgactattgattccctacctttctcttctgcacaacccgatagtccgcatatggagaaggtctacggagacgctgtccgaaaggaggccggtgtgaccaagactctcaagactgtcgttgagagtcaggctaagcggtttgatggtaaaggcgacattcatcgagtcgtccgagaggttcgtgaattctctcattcccggactgtatcaacatactttccttccatctttttgaatagaaaaaaaaatctgacgttttgagtgcgttcattcaggttaagggcacgtttggaaaggtcgatcagaaaattcaggagacggtggatgagttcctcgagagtggttcgttgtctaattattaccgatcatgtacgacactgtgcctgttctgatgatttctgctgttgtggcctacagctcgacccaagttgtctggcgttgttcaggagggaaagtatctgctgcagcaatctcgggaaagactggttatcacgtatgtccagatgattcaagtgcagcgttatcttttttgttccgtaactgacgactgacttttacaaaaattacagtcgagttgccgacgtgtcttctctcgatccttctcagtacgcattgaaaacgttgccctcggccaacggctccacatctcgattccatatcggtgaacctatccctatcaagtggcaagctccccagaaccactctcgaaaagactggataggaatctaccgattgggcgcctgcaagtcccaactagtcacccgtgtatccagtgtggggaaatgggtgcccttgtttgccgaagagtatgacggagaccagccagtagacactaaaggagaggatggtgtgaccaatcatgtcgtcggccaggagtcgttcgaccaaggaaaggtcgtcttgcggggagatgcacttccctggcagagtggacagtatgagcttcgatatcaccacgatggttagtctgcaatctcttgtcattatgtacggatttgattttctatacctgtcttgtctgatcgagcgtgcgctttgtttttttctcgtccaacggctcttgtttacaggcaagcataacgtgatgactcggttggatcatcctatcgaaattttcgttcctcaggcgtccgatccgatctctatgacttctgttcaggacatccttactcggattgttaccctcgctttggactctgatccagcgttgattcccgcttgcgcggctgatgttcctgctccgaactttgtcaacccttcggttgataccaaggactcttccttggattcggcctcggcctcaaacttggcctcctccgatcattcggtcgcgacaggatccgttaggtccagtctggcttcctccttgaacggagttgaggctctcaacacctcgtctctgtcctcctcgagtcactcagacaggtcagacggctcctcggccgctccggatgatcaacgaccgacggtcgacaccatgccgtcctcccgacccgccgacgcggatcctggggactttatcgtcatgtccctttcccaagcgaaacggatggttctcggtattagggaaacgtttggagtcgagtttgcgacggatgtcgtccttcactgtttgaacgtgatcgagttgacagaaaagatcgtcgaggcgagaaggatcttaggaggtacactccagagaaaaacatctgggttctgaggaatctttcaagtatggagggggctgggcggcagaggagtcgttgagagggccaaaaagagaaagaatgggttggagacagattgtgggaagaagggacggggcttgtctttattttttgttccatttattttcttgtttcaaaatatgatagggaaaagacaaagataaatgtttcttattcggtatgatgggtaggaagtcatttaacgcgtaggcacgcgaggcaaaagagtcgcggtcgaaatcgaagaaaaacatgcaatgtttaattacacttccaacagcgatcatgtaagtctgaggaccaacatgtcttcttcactacatcaaaccctacagactctctctctctccgataatacttctccttcgtcctcatctcgagtgcaaaacaaacctctaccagcactcccgttccactcgtcccgcacgccgtattcaaacacatacgacgcattcggaagtcaaactggccgccctgtagcatcgacgtcgtatcgacccagcgagccta

SEQ ID NO: 339 - DNA, 18348 bp, Xanthophyllomyces dendrorhous
ccttattcactttacagccagccaattggatacacgcctgatgggtctgtccgatctcttgacgggcttcactctagtggtgcggcggatctagtcctgagaaggagaagtccgggtgtgcctggcgtcggaaggatggaccgtcatgagcctgaaggacgggtaggatatcatgtatctgggtaagttctgttgaagagatccgcttcattatttacagagacaaagccctaattgatgatagttgattgtttgttcttctgttctgttctttctttcttttgaacaaatagtagcgagtctcggatggatccaacgacaagggtgccaactacgggaactctgagcgagtctatgaacaacaggccgtactatgacctacatgggcgttttatagttgattctccatctccatatatacaccttcctcaagcagaccattcattccgtccaaatctgccatatggaaatcaacatgttcgatatcagcctcaagcgccgcctccgctcccggcaccacctctagagacgctctcctcatattcgacatcgccaaacagaagcgcgacaacagagacttaccagcctaggttaactagccagaggtatgacccagttggttctttgaattctacgccaggccgtatgatgagtgtgcatcctgctccttctcgacatgttctttcatcggtccagagccttccaaccacccctactactccgcctcgtccgatcgcgcagactgatgcggtctccgctcacatatactctccctctacttcctcgccaaaggctccgacacgtgtttctccttccaaaagaccacccagctcaccagcagactcgtcactcacagagtctccttccgaaaaatcgaaggataaagtacagtgcagcgggttcactcagaaaggcattcggtgtaagaagatgggtagtagttctggttgtcgacgtgctggaactggaactgtggatgacgataccacaggttggctttgctggattcatagagaagttgtcttggccgaggaagggttctatgttgatggaaaaggaaaatcatggatcgagtttgatggttcgtttttttttcctctttctttggttgtatcggagattagtactctggagccttacatatcattttattctgaccactttcatctccagcttggattccttcggaattgagcgaggatatccggctagcgatccggctcgaaatggaacgtccgatcactgcagctgatcagacgcctggatttgtatactgcttcgagtatcgaggtttgtttgaggcagagttttcatctttctcatcgttccaaagcacatccattctaacgatacttctcggcgtctgcgcttttgctttcccttctcctttttcgctctcaactaggtttacagacggaatctcataggacattcaaaatcggtcgctcgcttaacccagtggcaagaatggaggaatgggggaggcagtgtccgtctcatcgggcggtcttgttgggctatcgacctgctccggttgggtcagaggaagaggaacgtgcgggtggaggaaggatgagagggatgagacgactaggtggggatgaagaagggcaagggccagggatcaagggcagcgcaaagtttgaacgtcagtcacctttcgttttccttctcttttgaaccttctggagagaacttctcttctgactagatgagctactcaacattctgaacaggtcttgtgcatcttgaggttggagatatgtatcgaggtgtaaaaacgcgacaagagtgtgtcgactgcaaggtgtgttgtgtgtttccaattctattctatttctctagcttgcgctcatcaagaacgactttctgttcttcgtcactcctcctctacccacactcaccccctttagaaattccatcaagagctctttctcatcccccgggagacggacagtcaggaatggatccgacaggtcgaaccggtgatggaccgatgggaacggttcgtgcgggaactgttccggtgaactcggctctggcttacataagacacgtccggcttaaagagccacgtaatccgaaccagatgggctgttcccccggttgccaagactgatgccgagcctgggaagcgaaagagactggggccaaaggctgacacctaaattgggtctgccctgattggcaattaccgctcagaacacgtgtccaagcgatccgtgctcgcatctcatccgccccagacggtctgtgcacgagtcaacatcagatggcttcttaaggcgtccattgttttctcgtctctttttttttctttcctttttctacttctcttcttctatccatcaacgtccatctgctgctcttgttctccccgtccatccctttgctgttcatcgatcgctacatctgatctctcacctgttagtgtgttcctgtcggtcgattgtctgttatgatgactcgctagtttctcccatctgatcatctaccttggttccatctctcggcacgtgcactgttaactagaccggccatgacatctaacattcctctcaattcggaatccgagtccgaaggaagaccttccgtcgcctccgaggcttacaccgctgcaacagcacatattcctgtcaactcagagtccgagtttgagccagacaccgagacggccgttccggcgtacagccgaggcaggcagcaattgcctagcgcctctcatctcaacgaacccaactcgggagacgaggaggacccttcgtctctccaggtgtatccccctcgatctcgatcgtctcggtctcgaacgcccaaaggccagccaggtctcggtggatctcgaagtcgatctaggtcccgtgtcagccagaagggcaagctggaaccaagaatgatgaattccgagtcggaagatgcgagcgcgagcgaggtcgacggtccgggaggactgtcctcgctacacgagtctgccgagcacagcatcccggcctacgttgcacaaaactctggatccgaggctgatgagccagcggatcgaaagaccggcaggagcccgccaagggccaggtcggccggtttgagcacgggcgagcctaggaagctcggagggagtagaagcaggagcagaggaagagtgccaaagtacgatgtgcagatgaactcggagagtagttcagacgagattgaggggaccgagaccaactataccgatgttcgtcccgttccttctggcttatttttatccttctgatacttggataaacagaaactcatcgttcggctctctcgtttctttctttttgtcctcgtgaatagaatcgagtcggagtcgagaaggtcaacctctccaagggtctggaactcaactcggaaagcgagcgagagtgattctgatgttttcactcgtctgagctctattatgtattcaactccgtgttctgctagcacctctttctctcgtattccttttgctgtaacctatatcaaagatcaatgtgtcgctctctgttttacatctagcgttcagcatccaggctgtgcagatctgtgccgtcccagtcttctgccttctaaatccgggtacctctagatagttattgctatgatctcgcgcaaagggtcatatacaacccagcatgttagtgaatgagaacagaattttggatgagtggctgtatctctgctttgcttcaacaggcgtgttactagttcgcagtttggaaagaaacgcccccccgcccggagaatatctcctctttctttctttttctactttgaatctccatgttttattcttctgtatttagacttatatcttgcccagctcggccaataccactttgacgccctcgacgatgataccatgctcgaccttgtgcatcttttcctccaactgatcaagcgactggtccttgaagatctcaacctgtctgaccaacaacggctccccttggtcaacctgctcgactaccctgtgaaccatgacacccgtcctctcgatctctcctttctggaaagcggcgtaggcccgaccgatcgcgtcggctccgtcgaatgctccggggagagcgggatgaaggttgatgatcgggatctttgccaacgggttcaagaacgtaggcgagaggatatgcataaatccggcaagaacgatgagatcaggcttggtggcctccactcttctggataattcggcatcgtattcttttctggagtgggtagggtttgcgttcaggtatgtctttaggttgaacgtcgagcttgggatcggtgggttgtggttggccgctcgggtcagtccgtaggctttcgaccggttcgaaataacgtaggtcacaggaagggatgcgtcaagtagcgcttgaaggttgcttcctacgtttgattcatgttcgaaggagaggagaagcagacaaaagaagacagcataagagagaagaaagtggaaaaagatagagagagaaaaaggaaaaggaaagattgagaagaggaagtcattagattcagatcttctcgtcatagaaaaataggtgaaggtgaaatggaccgaccgcttccagaaataagcacggtaattcgagcagggctagacgaggaagacatgatcgtttgaattttcaatggttgtgtatatctcgctctttcttctcagcctacgtgtgatattgtcgttgtggtgaatggtgttagggtggagagagagatgaacggtaaaacccaaggctacgaaaaattgcgaaaaacgggtctcgaggcaaacaaaaaaaaaacacacgttcggccgtgtggtcctccggaggttcgtctcgttcatccatgcgctttaatgtccgtatgtcactttaattgatttgcttttctttctttctttgcacttttcaagacagtagatatgggcagaacatttgatagaatgaaaggaaaatatttcaagaatgtaccaggcattatcgactgaacaacctcttaccactcccgtccgtagacaggcagcggcggtcaggtgtccattcctatgtcctggtatgaggaaatctactgatcccccgtggcaccctttgaaggccgatagaaagaatgacggcagctcctgggcgtagcagagtgggggcagatgctttttgatgggggaaagagaaggaggatggcgtacaaacccacgtatttatacttctccggaattgatccgagcgtgactgccagcttgaactccgacgtgacatctctgtcgtagacccagcgtcgtccgatatgaacagcaagggcgagagagtagaagctcagcgcaaaagagagaaagtgttccatccagaagagaagaaacacttgatacaaaagaaactgttggagtttcagcagtcttgacataatttcatctgttatttgtaatctcttcttgagacatcatctgcctgcctctatttgcgcggagtcccaaggctctctttccgaagagctataaattttctggcgggtttcccttctgttatcctggtttctcaatccattttactgaaacacctgggtggtgtgtatatgatttgggaaaccagtgaggacttgattgggaacaagtgccagaacgaaaagtccattttcacccttttatttcagtaatattcttcagaaacgaacaagtcgagcaggttgagtagatcacctcgcccgtctgctcactactctgcctcaaacttttccttctcgtttcgtctggttttcgcctcttatcctattctcttcctctttccctccttgtctatctctctcttgttaccttgtatattgctattcagttcatgacgattttacacaaacctgaaaagacttatacaactgcgcgtgcttatgcgttctgcatacagaatagactatcccgagaaggcaacctagatttacatttgtcagctgaacttgagccaacacaccggcaacctctacctacctcaattccttggacaaggattaatgatcccacaagagaagtagaagaaatcgcgctgatgtggcttgttaacacaacataattatactaaaagacttcgtataacaaccgcccggttagctcaatcggtagagcgtgtgacttttaaggcttctcgaagacacacgtgatcacaaggttgggggttcgacccccccatcgggctagttcatcttttgcactttttttgtcttctcgccattctcacgtattcacctggaccgttcataaatacgaaactggaaccatggcatcattctacaaacttgtttccactacacgccttcgttcatcttctctagttgctctccatacgcatcataccacttcttggatgaatttgcagcaaacctgaaagatcgcgcacggtaggcacacaaacgaagccccatcatcaatatcgatctctcagcctctctgtttttcacactcaaccaccacggcagacaatctggatgaagagactcacccagcagcaatctccttgtcgcctgcactccatttctggtcgacctcggtaatgaaatccttgaccgttagcgccgcgctgttcttcgattttttgttgttgtcaggatcatcgtgatctctgttgacaaacgaacagcagggacgtagagaaggaaaaagaggatacattggagcttaaaatcagtaagaaggaagtgtcgtccgtagaaaaggctcgaaagtcagagagatacgaaccggtgcaagctagatcaaatgaatgaacacagataggttcgttagggagagaaaagttcagtcaataggtcgatcgaatagatctggagaacgattcaacgataagacccttacttggactcaaccaagggaggtgcaacctcgatcactcgaacatttgtcttctccagctgatatcggagggaaagagctggatggatcgtgtaaagttagccaaagcccaagtcagatcgaccgatgaatgtcgcgcgcatatatacaatcgattctcagaacgacttactccaagaatgaatgaacgcttttgtagcacaatatacaggtactcccgctttgggtacgaaagctagcccactggataccgtgcagataaccgctttgggctgtttcaatagatgaggcatcaatacggtcgtcagatggacaacgcttagaatgttggtcgtgatctcgtcatccgtatcttgaaggatatccttgactgcctcggtcgattcgagagcagcatatgagattggcttttgaattcctgcgttgagacagatggcatccagatcgggatgctcggccaagagttgctcgacgtactctggaaagtgcttgatattttgcaagtcgatctgcgaggttgacaccttcccagaatatgtcttggagagatcctccttggcagattcgagcgaagaggctgtccggccggcgatgatcactttctgcatagaaacaagagtaagggcatattgataagtcgaagaggatcactttgtaagaaagaagaagggaatttcattcgaacctttcccttttcaaggaacagtttagtgaaggcgagaccgagaccaccgctacctccggtgacgaggatcttgttaaactcaaggttagatgaagacattctttctttgataacttttgacagatgagagagcgcggttggatggtgcagtagagatggatggagtgtgggtatgtgtctacgagaacagttatatagtggctctcggtcatcccatcgaacatctggatatagatcagacaatgacgcatcggtcatccacgtcattaatgatcggctcatacgaatcttgtcttgcttctattgtgttgaagtctctgaatcctttcttcattcttttttcttttaactcctgattatcggtgagcacatccatatcgtgggcatgggtagagctatcagagatgagaaaaatgaccgaaaggaaaggcaagacagccgaaaagcaaggttacgacgacaaaaagggataaccatcttgatatatctgaatgtttcatattcacttcctgcattgaatccccttgcctctctccctctcttttgtctttctcaaggagaggaagccttcttaccagtctggcctgtaacccttgctctgatcgtccgtcgtcatcgacgcctgaaccctgaccaaccgggcctggaccttctgccaatcaacagcgcgcaaccaggccttgacataagcctcttttccccagacaccatgatcggctacataggcgtgctcgtgcaagttgatacatgccaacggaacgatcgttgatcggaagctcatatcctcgtgagagagcgcatttgtaggagtagacgactcgagctcttgccagatcggaggaagatcgtaaatcgacggagtcgtcgaagacgaaggcgatgatgatgatgatgacggagaaccctcttcggcctcgttgccctctatcgtatcctgctcaaccgggctcttttcgctgaaggtgtcagcatcctgttgatcagctaccccgacggttccgatcgaagcgagctcgccccacactcgaccttggtcgtccatcccgctagccaagaaaccgagtcgttcgtccgatccggccttggaggcaagccttccgttagacacaagcattgtcccctccccctgagaggtcaccagagcgagacctgactccttgagagcaggatcttggacgagccagagccagccgtcagaagaaagtcctgaagctgtaccgatcagggtttgctcgaagccagagtttgaaccgaacgatgaaacaatatgcttcgagatctggtaagggtattgaccgggtttcgatgtgtctcgctgtcggccaaggaggagatagtagagataacatgagctatccgctcacatacaacgctcgcagaggtttaaagaagaagaagaaagcacatacaagcgagctaaggaaaaagttgttgttcaacgcttcacaactcaacttgaacagtcgatcgcaatccttcgtccactgttccacagactgatcctccggcttgtctgacaatgagggtaccgctgtcttggagaccaaagactgaaccgtcgccgtctgcaaaggggaggacgaacctgttccaaagagacgcgtcaatagaaaaggggtccatatcgaattagaaacaaattagcaagggaaaatggatcagaaagctagagcaggctgaagagaggtaagagaagctagaagaacagaggaaaacgaaacgtacgaggtcgaagagccttgatggagctcataaggtatcgttggtactcatgggccacaacctggttataagagaacattcggcataaatcatagccacaagaggagcgaagtaagaatgaaacacaagaaaacgcccagcaaagttcttttcgtcagcctgtgttcagcctcaataagactttctataacgaattaggttttgcctcgtcgagagcgaaaaggatgaaaggtgaaggacgaagagagaaagtgcaagaaaccccactctctcgaggaacaaaaataccagaggaataacatgagcaagaggacaaaacgaaccttgacgcttcgtgcacttaaaaatccatcgacgtctctgtcagaccagatgtcgaacgacccgatcctcgatccttccggtcgggccagagccgtctgtgccgtctcagatgaagccggcgtaggttcggcagaagaagcgtaggatagtctggtagaagagattgctcttcgagagcttgaagaggatgaaaaggccgaaaaagaagaagaggtagtggcacaggatgaagaagggaaaaagagacctcgacggagggttcggagaggagaagccatggctgtttgatcgtcgactgtccgtttgttactttttctgtgtttgaaaggaggaagaaataggcgtagagggtccgactgttctgcctgtctacagttctaactgaaggatgaaagcaatcctggtatgaggaatctgaaccggtctcgtgctggctgtttgaatgatggacagatgaacgacttagaaggcgaaaaaggagaaaaagttgggttgggcggaagaaacgattggctagggttacacgtcaggctgggcgaggcattgtcttcccaacatgtacactcgtcttgcagcaaacacaatgtaaaattcatttatatatgatacaggataaacgcgtccaaaagtaatcgaagacagatcacagcagataaaacacgatagttggccttcgttcagatggggaggaatggagatagacgtggcttctactcaggaggaagagcagatgagagaaagcagaaaagaagaaaaaacacaacaatgtcagaatcagagatctcgaaaacacaaatgaggagaacagaaaggaacgaaagcaggagtgaatctaagacgaaaagaagatgtcacggtcgactgatggaagaagggaagggaagggaagacggaagggcacgcgatcctgatcagttctctaaatgacgcaacaaacacagacgtgtctgagggatgaaaaaagacaaaaaggctgatcgcttatcctttttctttccctgaagaggagtaccgtatctggcgttctgatttcaaagccaaagggagagagatccgtcgggagaataccctctaactgaatactttcgtccgggacagaacacgaaagagagaagcgatgaaagatggatggcagggagaagagcaagatagatggcaagaacagaaagagacgaagacaaacaatgaaagaaatcaagcaaacctacgtctatgaatgcctagcctactcgtcgtccttaggagcgaatttatgcttttcccgagatgaatactcagtcatccctctaccggatccgacaacgccaactagcgacgaagaaaggcgatccaaacatgtcagctgtgtagatacatatgcatatgtatcgggaagataacttctctgagcacttaccttttccgttgacggcatctggggtcttgaagatgctcgagccgtcaaggccggcgactttgacgcccttcttcttggccttctgaccgaatgcctgccagctcgactgcttcttgatttgctcctcgttcttaaccttcttgatctctttccacttttcgttttttacttttttacgctctttttcattctcctccttgaatttttcttcggcctttcgcttttggcttgccggcagaggcttcagcgacgagagaggaatggtcgaaggtggggatgacgcgtaagaggtatatagcacagtgtagattgggttgcctgccggaccggactgagagaggatttttgccgggtagaatgagccatcggtatacttcgcgagtacaaagtcagagactttgaactgggaagccgtcaccggtggttccacaccggtcgttgtcgaggagttcgactctaccggtgtggactttgaggatgatgctggtgcggatgtggaggaagaggctgctactttcgcggaagacagagatgaagaaggagcaggggcagaagggggaggaggaggaggggcataagcagcctttgtgagatcgatgagctcttgaagctcagactccaagccttgtagttcggcgttggatggatctgccgagagggcgatcttgacttgggagagtctatttccgaaagagtaaagacaaatgaatgagaatcaatgtataagaaatggacggaaaaggaaacaacggaatccaaaggatgctgctcactgatactcgtactgctgaatctcgtctgccatagcgggatggatgtggatggtacaaaggaagaagcaaggaaggaaggaaggaaggataaagaggaaacgccagagcctttacagggctgtggttacgagatggttacgtatatctttatcttatcgttattcttatcaacttatccttgcccgtgcctcgtttcttcctatatccttctcagagaccatccttcgtggccatctctatgcgtgtcttcccgagtgcatgcttctcagctcatgagtgtatgtgctagtacttggaatgatggtaataaatagaaggagttagttgatttgtcgatagcctgtctattcagatggggtctaccctcagtctccttcaccatctatcctctttgacggctgtgtgctataccggttgttccttctcaatgctgctgacgaccatgtctgctccctggttctctgcgctcgagatcttccttatgcagtacagtagctgacataatgaacgctcttgttccgcgtcttgggtttgttctaactcccgatatgcatcttccttgtttgctggaatggataggataaccagctccaacaaggcagactctctccgaaaaatctctgattcactatgagaccgaataacaagaggcagtataacatgtactcatcacctcatacccttcgattttctctcacttctcgaccataccggtggtgacagagacttgtgataatggtctgttcgtctttttccgagagcaatctgaggataatatctcgaaccagagttcataagaccatatcgttttcgcccggaagaggcagtagtctgccgttccaccaatacctctggactgggcgtcaactctcaaatagtcgaaatagtccataaaatctcaagatctcttaagatcatccagaatgctgtctgcttgaacgaggcaacctcaaatgcttaaggctgttcacctccagcagcatgtttcagagcttgtgctgtacatcctaataaaacgttcgtcgctgccttgaaagcgctatcggttatacaacaccaattttaccaaacgaccgtcgagacgtatagaaacgcgcacaaagtatcttttaactcattttgttgtcacacctatatctcgaatctgttaatatccgatgttatgagcttccacaagctgtaattgaaagacaccgctgtgagagttaacgtgaactgtcggctcgttgtacatacatgctcgcccataactttacaactatctatctcaagaccggctgataactatgctgagattcttgaatattttcaatctatgagctttttgagtccttctgaatgaggctggtcggcgtgctttgtaaagatttagaagtgttaatgtatgattgacgacggagcttggtacatacacatccccgactcactcaagcatcgatcatcgtgtatgccgctttgtttatatatcccatgttctgtatatatctgctacatatcatccccctttcagatgcacacgtcacacctctctctttcaagcatttgtcgatgtatgatatatgtccaatgtgtgggacagttatccaacgaaggactacaacgccatactacaactgttgtaataagagcttctaataaaaatctaacctctgaaaatgcatagagcacgtttccatctcgtctctctttctcctctcactctttctctcttccttcctcccatctctctgtcttctccatcctccattctttctccttctccctcacatacacatactatggccgaccctcggatcacccagaaagaggccttcaacatcaatgcggtatgtgtcaaattgtcgtacctcgatgagacacaatgatagtcaagatgagactaatctccctttctttctcgattcctttccaactccctgaatttttggtcctgttgattctgacgatctcaacgatcccaataggcggctgccgtcaagcagtacaatgttgagccccgactaggcaagtttatgtttcaagttatattgttcatcgtctccatcgatcacaacacttatcctgcttgtctcgcccttgtacagactatcgaaccgtatctggtgttaacgggtgagtccgatcagcctacattcccttcgttcgcattcttgggaggaacacgtttccttttcctccttttctgattgaacaagcatctagaataacatgcctattccacttcatattccttctttcacagtcctctagtcgtgttggataatgtcaaggtcagttgcggatccacccgacgctcacgtcttttaccctgaaaccacccttttcgattgacccttcgacttagcttcgtcaacccatactcaaactccttcttatgcttgaaccactagttcgcctcctacaacgagatcgtcacacttacccttcctgacggatccaagcgaggaggtcaggtcctcgaagttagcggaaagaaggctatcgttcaggtgcgtcatatctcttcgtattttgaccacgctttttgtcctgttcttatcatccaactttccctcatccttactatttataacaacaggtctttgagggaacttccggtgtagatgtcaagtcaacccacgtcgagttttctggatccgcgatgaaactccccgtctcggaggatatgcttggccgaatcttcaacggatccggaaacccgatcgacaagggacccaaggtatttgccgaggattatcttgacatcaacggttctcctatcaacccctattctagaatctacccagaagagatgatccagactggaatctccaccatcgacacgatgaactcgatcgctcgaggtcagaagatcccgatcttctcggctgccggtttgccccacaacgaggtctgtcattttctatccatcttctcagattactatctgtttgaatggcaagactaaatactgtttcttctcgtcttcttagattgctgcccagatttgtcgacaggccggtttggtcaagcgacctggatccaccaagggtgtccacgatggacacgaggacaacttctccatcgtgttcgccgccatgggtgtcaacatggagaccgcccgattcttcaagcaggatttcgaggagaacggttcgctcgaccgagtcactctcttcctcaacttggccaacgaccctacgttagtttggtcttcctagagaatttacaaagataacaacgattctgatcaaggggctctcttttgactgttttatcgtacaggatcgagcgaattatcacgccccgattggcgcttaccaccgccgagtactacgcttaccagctcgagaagcacgtgttggtcattttgacagatatgtcctcttacgccgacgcccttcgagaggtttcggccgcccgagaggaggtgcccggtagacgaggatatcccggtatgtcctttatcatgatcttatgcctgaacgccttctgccctcccccttctcccaaccagggggtttgttcatccgtttactaatggccacactgtctgataactacaggatacatgtacactgatttggcgaccatctatgagcgagccggtcgagttgaaggcaggaacggttcgatcacccagattccgatcttgacgatgcctaacgatggtctgtctcgttctcttcctattgtttcaattaagtcgtttcttcatttcggctcaacaggtttcgtcctaccaatttacagatatcacgcaccctattcctgatttgaccggttacattaccgaaggtcagatcttcattgatcgacagtaagtctgcaggtttcatcctttttaaagtcaaggatcatgggaagcctgaccattgaccatcttttcctctcttcctacctaaaagattgcacaaccgacagatctccccgcccatcaacattcttccctcgctctctcgattgatgaagtctgctatcggtgaaggtcttactaggaaggatcacggagatgtgtctaaccagatgtacgctctctacgctactggaagagatgccgctgcgatgaaggccgtcgttggagaggaggccctgagtgcgaacgataagctcgcgctggagttcttggagaggttcgagaaggactttgttggacagggaacatacgagtcgaggacgatcttcgagtcgctggacttggcttgggagcttcttcgaaaattccccaaggagtcgctcaaccgaatcaatcccaagatcatggccgagtactacacccgaaaaccatcttcgaagccaagcaacaaagacacgaccgacacccacgatgacaagctggttgacgcctaagggtctacgtttgtttttgtcattatcctctcatgaattttctatcatggctttctctagcttgttgttctagcttcttgttccagtccgactgtcctctaaactacaattctacacttcattggtcttggatatgccgacgcctgttcaatcttgactctcttctcgtcttcttattttcctccttctccttctctgcctcttctttctattcattgctcttgtgttgatagagttggtctcgatacatgattcctgctcttagattgcaacaaagaagacgtgcagatgagatagtttgagacaaaagaactaattcgagcactaaacgtatgtatccgccggggaagagcgtgcatgacgtctactaacttcgttagctcggccatccgttatctgtccgtccatctcttgttcgattgtctatccttcatctcatacccatcacaccccatcacatccatcgtgtctcttgcatctttcgtactgaagaaatgaacacatcgacagtcgctcaacagctctcaggtctgtctgtctgtcttgtcgtcctcttccttgtgatggccggctggttgtgtatcgatattcgatctcgatatctaattacatccgataatctcttctcgatctgttactttagatttggctcccgccttactctctccttcggtcggtcgtcgggatgaagtactcgacaactttgtatggcagcaagtcagactaacctcacctctcgtcgatattgaagggcttagcaaagtcagaaactttcttcaggccgaggcaatctacagagaaggcgaggttgacatcagcaagattgagtgggacgaagggtatcgttccttctcttccgtttccccctccccccttatttctccaggttctttggaatcctcatcgttctttatatgcagccggtcatttcataactgactgtttgtatgtcgttcttgtacggttgtacggtacatgggtttgcgctgaaccgcaggctacggttggccacgatcacgtttactcagatggtcacggtccctcttctcaagctactccgacttaagataatcgatacaaagaccacccttcacttgagaccttctcgagagaaacaagacaatgtcgagaaggacgatgaaggacaacctacgctttggtggattgatcatatctctatagaactcatcacatcaaaccctttagtgatgtacatctctcctcttcttgcgcgaacggtcctcgtggaaggaaagagggaacaaagagctgactttcttcctttgggtgtctgtgggacacaatctagctctccgatactttcggttgtcctgccttcctttggccagctgcttctgcgtactcattctttgcactctcgccttcaggccaaggcttcccagctaccagccctgacgagttcaatcactcgagctgtaaccaagctgacgttccacccgatcgagaacggtccagtcgttcttgccgtgtttgccctgttctggatcggacttgctcagtcggtcgttgacttctggcagagaaaggtcgtcaaggacaaaggactgttgatgaagcttgacctcaggtgagcagattgtcgaattggtttctctttaatcgttacaaccctcgactggacaaaggtggttctaactacttctttcgggtgacggttatggccacgtatcgtaccggcgtctagtacgaatgtagagcctgctaaaaaaccaaagaagaacatcgacccgatgagtccattgaatctgctgaacaacccagttccaggagaatcgtatgctgcggctgtcaagcaccaagtttacaccaacggctcgggatcctcgaatcagaccaccaataccgacaacgataaagctccagacgcttctgcagcttcttccgcctttaaagccgacaagaaggaaaccatcgatggtaatagcggggacactactccggaggctgccaaaccagagaaccttcagaacaaccctgtgcctggggaatcatacgctgcggcggccgatcccaacatcgataccatctcgaccactgttgatactgaggagagtcctgagatcgaagcagccgaatcggtgagtttgcaggacaatcctgtccctggggaaagttacgctgacgccgttaaggatagcgctcatgcccaccctgacggacctgaatcggatggggtcgcattgggtgacgtgatgccgacaccctcagagcatgattcggacgaagagtagtcgtaagcataagtgaacatatatttgtctcttctatatcttgacttttacatgtaaatatatat

SEQ ID NO: 340 - DNA, 23847 bp, Xanthophyllomyces dendrorhous
atatatatcatatgtttctatatctcatcttgatctattttctctctctcctttgcttcttctttttgatatggtctggtcaaaacttggttgtcagatagcattcaatcattctgtactgctgtgctcttagtgaaaaataaaataacatcgaacgacggaggtctcgcagattgtttcaagacaagaacagtatggctcgatccgattcatcccaatctatatatgcatatttcttctacggtttcctcgtttcctctctgtgtcatcccatccatcttcagacgatgatctatccacttctcttttcgaccgtctgatcagtctgctttgaagaagcccatctctttgcttctcgtaaaagcgcaagaacgtctgtttccgaggggagacccggagcaagggggagagtcctctgaagtttaaacaccttgcgtgtcggtcgggtgagaggaggtacaggatcatgcacaggaacgggtgcaggtgtaggtgcggatgtagatgcgagtgtaggtaaagtgacgggtacagaggtaggagtgaaagtagcagtgggagtagtagcgggcgcgggcgaacgttcagatgaccgagactgtaatgaagacgtatcagcaacgatccgagcaggagctgatttctttattgaaccccctccaccagacgtttgttcgctatccttattcttcccgttgtgccgatcgaccgcaaccgacaaaggtaccaacggttgcagggacccagtcgccgccgccgtttctgacgactgaggaaagctacttttaccttgagcgagagccgctctgacagtttccctctgttgggtatcaggcatctgcgagaattcgatcgtctctgcccctcgggtctgtgtcggctgagaatccaacggttgatcagtgtatgttggctggcccgttcgaagcataggaaccgtcgaccaagtctttgagctggtggtggtggcggtggtggtggtggtagtggcagcaacagcggcagtggtagcagcggcttgcttgtcgggttgattctggttttggtcctggccaaaatttggttcagtggtgggttcagcagtcttgggtctcttttgttcgttatgcgtcgtaaggaattcatcgaggaccggtcgctttctagagtttacattcgtaacagttgggatcagcgctgattctaccgctgttattgtcggtatagattctaccgtcatctcggatgtcgaaactatccggtctggaacttgaactagaggaggatggctgataggtggaacaggtttctctgttggttgtgatggcgattgtgtttgtgtttgtgtttgcgacagcgattgagtctgagagccagatacagaaggttgcgtcgacggacgaggtggagatagtgactgaggctggtcaagtggtcgggcttgagagggttgagaggacgacggttctgtcggtggccaagataacggtagagactgtgaccgagaaagcgagtcggtgtcgctgtttggaactagaacggtactggaagctcggccaagcggtctcttggttccatcctgggcttcggtcgtgcgtgagatgccgtccggcttatcggaagggaggacgactgtatgctggagcggagcggtggatgagagtcgagggggtatggaaggggatccgtgctgctgtgagggtgatcgaaattgtgattgaggttgagataaagaaggagggagtgagggtctggtcgaactaggagacgaatgggtgatcgtttgggattgagaagccagcaaggatttttcgcgttccggtactttcggatgggccacgtccgtttcgttctgaatcatttctgtgtcgttgttcgcatttacagtcatgatcgtagccacattgatttccgcagaaacgggtgtcgagggggccgactttggagggggcggagtcgctagggaagggacgaccggttctgtatgaggagctgtttctggtgcagagggtatctgccggacagggtgaaggagactgcctttgactgtacctgcatttgtgccgatgaccctcggttttcgaatggaaagctcctcttctgaatcttgatccacaattggaggatctgtcgtagttattggtggaataatcttctcgggaacggaactgggcggggatatcgctcgagatagctgaacaggatgagaagaatcagagtgccacgacggtgaaagccgtgggcgggatggttcatctgtatcctcagagtagtcaaaaactgtcaatcttcttctctctttctctgacaggaatgggcatgatggacaaaccgatagcatcgagtaaaatctgttgatcgggtggaataatccaccaacttagatccagtatattcttaggtttagtttttggcgggggttctgactctgacgggtttgcactgtatgatgggagggatgatgcatgagggggaggtggtaacgaggtattagctgacgatcctatggaagagctaggctgaatgagggtgggcgcaggtcgagtggagggatacggctcaacagaatcggtagtaggtgatgtcgggattggtctaagcccgatctggttgtacttcctagcaagacgagatagaaccggattttaagccaaagagatgaagaatgaggaggattctatcaatcagcacctggacgatatttgtttctacttgttgtaggcagtaagaagctccgacgaacctcttgagcccatcgacccagtctcttagttgtcctctatttatctctctgctcgtgtccttgacacgatcgtagtatacaggctcatgctctcctccactgttcatcactgtgaacgccaagacgtcgaacgcgagatctctcgtttgggctttggcgaagggaagaatcagcgttggtctgatcgacgtcaaccgaagcacagcacggcggagggaggtgatagatcgaccggtctgcctaacaatcgggatgatgatcaagccacaagttaacccagatggtctatctctgagaatagagaatgaaacagaacggacgtttgatattttagggcggattcctccgagaagacagcgaggatggataattctgaatctcctactctagcccagtacggactctcgaatgttagccactagatcaattcgacaagcccatcagaactagttagctgacaacatctctcgagttcactgccaaacagggatgctcagggtgtgattgagcgaaacgaatgacggacggacggactgactttatggacttgaatgagtttccctggttctgctatgtcgcattcgagtccatgttttctagcataactctctagccgacgagctatccatccgtctagagagtctgccatcgtgtgagaggaatgtgtctgtgtttgcgtaggacaaggatcaattgatgccagaaagagtcggcgaggagttggatgacggctgagagaacgcaatgttcatttcaccttctctcaccgactcggccttttcctacgttgatgatggggacacgcccgtttactcttcttcccgtgtcttttcctcacttcttctgagcatctcgaggcttttatagggacgcgtagaccagcagatgacataactgatttggaaaagaatccaagctgaacgcgcatcaccatgctgattttcttcagcgaggaggttttatctagattcaaacgctaacgtgttgcgacgcgcttcacttctccttctgtccgacatgatcgaaccttttctccttcttccttgttcattcttctatgtttaacacgctctccatgtgcatatctaattttgatgcagctgtgtcaatagaaatactccagttggctctcctccggcggacggtaaggctaactcgcatatttgtctatcaattcttaactctgcagcttggcatacaacaccaaatcatagcactcttgcgatacttcttggccaattgatacctgtttaagagccctcaaagactgtgctgtcatacttatacaacgaggatactccgctttctctctcgtacagcgctcactagatcattcaacggaacgacgcgtcccttgtggctcaccgccttctgacataactgcaccatcagtttctcaggtgggctgggccagtatgatctgatgtgatggcgttagaacgatcgatgttaggctttttaatctttaaaggcgtgagtgatgatgagaaaagaggaaacatcaaccgatatattataattttgagaaaaaaatgaaagaaaagatacttgagtacacctgaataggaccgaacgagctaatccagttaggacttactatctttctaccatacgagaactcttatggttgatctgaaggagaatcaatgagaagtctattccagtatcaagaaagtgtggcccaaaatgcattcccttgtcctttacagtatgatatagacgaacacatgttgatgggccgcctgcatgttgacaaacgcagcctgtctttgaacttgtcagtagaccatccatttcgtttctgaaacttcttgcctcttgaaacgtttggtgtgatgccgttgatatgtttgtaatgatctcgtcaagcagaggagggatgagggtaacccttgttcgcctggtgaatagtacggatcgattggcgcacgacgaaaagaaaagatctccccaggcaagtcttcggaacatgtttcttgttgcctctcactcagcatgttgccatcatggctggttagcgatttctcgtctttacttgctcctctcttcatgtcaacctccccttatttacagcgaagcgcccaagcagtttacttttcgcttcggtggatgaccctaggatcagaagtagattcttacccggtgaaaccgtagaagattgatttagctcagcacacaccatagggctgctatgtatatctgcctgctcgctcaccatcgcaacacaattaaccgaatcgaagaggatattgtaagacgtatcagagtctaggatcacaacgaagaaagagccatcccggctatccgcggttattggaattgaaaccgggttgtcggcccgcacttgcgatcgcttcatctacaaaagcagagtctctgctctctctaacgtatctttctccaaaacatctctctccattctacatctcatctagttaaaaaaacatactgatatcatagacatgctcgtcggtacaaccttcccttccactcaccccaccggtctctcctctggagaaggagcggatgtgatcgctaaaatcgaaacattccgagtggttagtttccatctacctcatttactctctgtttctttcgggaactctctttttgctcacttgtcttgcttttgttctcatcaagcttcctcgatggctcttcgttcgagttgagacatccggagggaccgtcggttggggtgaggccactctcgaaggacactctgaagcggttgagggagcgttcgaggactttagacaacgtttcaccggttggaatgtcgacaacattgaagacatctacacctcggcataccgacatcgattctaccgaggtggtccagtcctgatgagtgctatctctggattggatatcgcactatgggatatcaaaggaaagaagctgggggttcctatctggcagcttctcgtgagtatctcgatgttagtttcttcgaatgcttccaccagtttcggatccttctttcccgtcttcaagtatctgaccaaggaattttaccctgctctgcatgaatttactatagggtggtcgagtccgagacagaatccagtatgttcatttcctctttaactctgctcactctgcattttataaccgtgttggcaagttactaattctagatatgtattctacttcacgctcaacttagggtctacggttggatcggtggagataagccttcggacatctacgaacaagcaaagaagcgaaaggctgagggattcacaactgtcaagatgaatggctctgaatcggtatgtttctactccaggactttttcctcttatcgtcctaacgcgcggatgtctgaccgttcacttttatgaacgaacgaaaacagctgggctggttagcttcgcctgccgacttggacgcaacagtggaacgtctcaaggaggtcaagtctctcgggatggatgccggtctcgacttccacggtcgagtccacaagccaatgtccaagcaggtgagtcgtacactcttccaaatgttccatgtttatcctggttcttattgtttttatagcgctaaccaactgaaaatatttgtagcttgctcgaaaattagaacctcattctcctttgtttatcgaagaaccgatgttgcccggtcagatcgaggagcttaagaaactctatgctcagacgacgattcccatcgctgtgagtgatcgccctactattcccttgtacttgattgatgatcgtaactgacggcctatccaatctggatatttatatatgaatcgggaaacagttgggagagcgattgttcacaaggcaggatgtacgaccatatctggaggccgggtgcattgacatcattcagcctgatatcgctcatgccggaggtttgtctgtctttttccatcttcttcgatctactattacaagacaactgaggttctacttccccctctctctttctaaataggtatctcggagacgagaaagatcgcgctgatggctgagacgtacgacgtcggggttgctccccattgcccgctagggcctatcgcgtttgctgcttctttggctgtggctgcttcgacgtgagttttttcactctcttctatcgtcatctacttttcttcaaacttcaaaggggtgattccaagttcgcacgaattaataaacttcctttgctggctctctttcgaaaacaagtgtcaactttgttatctgcgagagtaagtcgatttaccctttcttctctctgttaccttcttgaggtaacccgttctctaactcttgaatctgattttgtcatcgcagtgagtatcgccatgcactacaacgtaggcgactatgatctcctgacgtatatcaagaaccccgaagtgtttgatgtcaaggagggaatggtcaccacgttgactggacccgggctgggaatagagatcaacgaggaactcgtcaggcaggtcgccgttgacagcaaagactactcgtggaggaacccggtttggagaggagaggacggaagcatcagggagtggtaggcgttgagctttgatgtcttggaacggacaaagagtcgggttatcttcaacctttgtctgatgttccatcatgtatttttctttttcttccatcctctttctttctttcacactaggggcgatacttccataatatttaaccagtcgtattcgcatatgtctatgaaacacttatgttctttatatctttccgggccgtttcctcattggctttcttgtgacccgagagagtgaaagaattgtacatgaactaatcactgcgcgcatcgaaaaagaaaagggaaagaatatgaatagaagagatctgaacgaaagtgaaaagggtagaaaaagaaaagaacagaaaaagccagatggtcgaagggggggaaaactggagaacaatatgccacagatgaaaccaaaaattggatgcatcctgaccagacgttcacagattagatcggtcagacagatcagacgaggaagaggactgcgaaggtagaaagaatcgaaggagactaggctgaagaaagagaatggaagaacgatggaaagatacgactaaaaaaaaaaagataaaaacagaagggccgggtgaataaggtctttttcaattttggggggaaaagatgcaacaacagagttcataagcgaagtggagggagaacagtgaacggattgataccaggagaaacaaattgttagaaaaatagtatagacagagtagtggtggatgtgatatgaagaaacattcaagtttcttcttgcggtgtttggtgtttcatgggttctcgattcctgctattatatgggctgaacgagagttctcctgcagctcaagtggcataaccaataagccccactttgaatttcagaacaatttagagaaagcgatgactcgaaagaacatgcggatgaccctagatcgtttgcgtaacgggctgcgaaggcggcgactgatgatgttgcaagctgtgcaacatcagtgtaaatatgtcagtcgtttcaataccaatatgctatttgaggaaagagcagaagcaagtctgctgttgggataaccaggagaaggacgaacctttttctcttcgctttcgtcatctccttcctcaacgctggtgcatctaatggcttaagtaactcgaatgcacacagtagttcctctgagacagccatgacagctgcatagttgtcgaatctacggtgtccaaatagaagaaaggtgttcagctagctggtctttgcatagggattgaatgcttgatgaaagagccttggttagaggaagactcactctccacaatagttctttagggcgacagttggtgtagacggttgagtcagtcacaagcactcaaattgttgagaagaatgcacaaaagatgagaagagacacgaacgggtgcggagaacactgtaactagcgttctttcattccagaattcgtatccatcttcgacaaccatatgcgctcgacatatcagctatcaatcaccatcaatagtggcgaggaagagaggggcgaaggcaagaagggttgaaccaaaggaagcaaagccatggatattgagttgtctgatgggtagtgcagttgcaggcagagagaagaagtagaagtagagaactcacgtcgatatcgtacgtagccaagaattggttaatcttggttcacaaaaataagtgatctactcatcaggcctagttttctcgtctttggatgaaggatggacaagattgtgagatcgtgagatgatagagacgtaccacgctctttccgaaacagtatgatacaccacgttcattgtcttcccaatcatacgctgtatctgagggatcactccacaacaggtcgttcaactgatatgccagaccttcagattagcatgtagacagtggtggaatagagacgtatgaagatcgagaaagaagagggaatggggtacaaaccaatccataatccggcacatcagtgggtcgctgaatctttcgaatatcatccatcgatgtcaaagaaggcgagagacctccgtgaacacagaagatctttgatgcgacgatagcagcgataggaagggtgttgaacacgtcgactggattgatggagattgataacgagcaaagaaaggagaagaaaccaaagacagctttagattatgcttgatgtattcggatatcaagcatttaaagtaggaagagagatgaggttaaagcacaaggacgaactgaagcctttccagatcttgatgttacagcgtcgcttgcactcgtcatagaacccgtagactcgggtcacgttcgctgcctcgtggtttcctctcaaaagaaagaaattctccggatacttgatcttgtagcagagaagctggtttgcagccacagaacgcaagccaaacgtgtttagttaggcgtcataccccgagatgatacaagggcatcctaacgtaccaaaaggatcgtttccaaactctgctttcctctatcgacatagtcgcccaagaataagaagttgctgctgggcgggaagccacacatctcaaacattctaatcaaatcactgaactgcccgtgtacatccccgacgactttgaccgggggtgacagctcgagcaacgttggctgggataagaagacctctctagcagcgagacagatgctcgtgatctctgcattctttaatgcaggtgtcttggtgatcttgcctgtgtaggcggaagagaggagccgggagatgagcgaatcgatatcaagtgttcgaggaggagttgggttcgaaggattcgagggagtatgggaaagtgtttgtgagaggagcgatgttaaaggcagggaggatgatggattagaagtggagagcgatgggttggataagattgtctgggtcgtaggaacctagagtaaatgacgataggtgaaccaggaatgccgtgagtgagttacgggttgggtccatctgcgaagagagcgttcaaggaaagataggcgtagatgtggatggatggactgatggatgattgatcccttggaaaagtaaaggatacaatgatgtttccgatcatgtgctgcacgaatctccacctcattcttctcagccccctgacaagcggctagcctctttttctatctcccggcgtacgacctctgtcttagataggtagaaaaacaaaattaaagagagaagatggagaggagagtgatggatcacatctcctcgtttgcatctctttgcttctgctattcgtcttggtcgacctctatcattcataggttgccagaacgtgcaatggtcatgcacgccttttggttcctttggttctgccatctcaaccatctatcttttggacagcctatgctccaaccacaatagacacaggacggaaaggcaagaagaagaaaagagagagagagagaggatacaaagagaaagaagaaaaagaagacaaacctcgttggctcccatgggtaccggctgagtgccgtccataccgtcttccgttggaggtccgtttcccgccgccatcgccgctgccgacccaacagatgatccaggcggaggtgatccgtcctcatcagcatcatctctaccctttcctttcttcctagaccctccagtcggtactcctgatccgacggacccagattcattatctccttgaaggcttcctggtctagccaaggccgaggcggatatccgcccagcgggcaccggcccagcaacagtgggagtgtcatttgggttgtaggacgagtgtttcaaaggagatggctctttagactttgtcctggatatctttttagacgaagacgatgacgatgtgtttcccattcttgtctgttctctttgggatggatgaaagacgggaagggaacgaagggaagatgtgggttgatggtcaggtaatagggaggattttccccgatcgcttgtatttaaaagggccccggggctgggcgcttggggttaggtaagacagttcgttgactatttgatttgtctaatcaggccaagcttactcttatgctcactatgtattcatcgttcgatgcatgctgagagaaagacatgaatcggatatatcgttgcttatgagagagtgagagaaaaaaagggaaaagaggaaagagaagagagataacaactggaaagaggacgagtatatggaacgaatgaacacaaagatgtacagagaaggaaacaagaacatgaacatgaaaaacggcaagcaaaacgactcctacacccaatcctcatcatcatcatcctcctcctcctcctcatcctcatcctcctcctcatcctcctcctcattaaacgctctgatagtgctcaccccgctaacagacctgcgagtagacgacctccggcgcgacagaccctgcgctcgacgaccaatcttcccgctgttccccatcgcgctcttgatactacccggacgagttgagacctgagcggcccgcgtggacttgtctcgtacccgtttccccatcagcttactctcgtccttgctagctgtctgatctgtctgttcggtcgatgatgacgagcgagttggagcttttctattgaagaagaaggaagaagtagctgatgaggattctggctcgtctccggccatcccttccgccgtcggcgttttgcacagagacgatagtctatccgtcgtgggagactcggcttcccctgtccagtcatcggccgataaaagctcaaattctgaacccagagctctcatcggcgcaggtcgtgtgttctggttatctagggactctgcttctcctcctcctcggtccaggggagatgggctggtcacagcatatgacgtcgtgtcaagcggtgaaagcgacgaaggaagagcggttgacactggcggaccgagactactagagaacccggatgggaacagacttggaccaggataggaagacgagatgatctcgtctctactgataaactctgcgatctcatcttcgccatcttgtgcgatcttgacgtcctcttcctcttcctcggtcggcttccgtcctagatccaatggaacagattgtggagcatgagaagaagagggccaagggacagcctcctgaagagaggacgatccatcatctggatcagtctccgagaacgattcgagtccagccgagtcgtcgtcatcccaattgacaggctcattcacgatcgaaaagatagcgttcggcatctttcaatcacaaagatacagcaacaactaagattagttctcgtccaatgccatcatctattaaactggattattcttttaggtaaacaaatgaaaaaggacacatacggcagaaactcttcgcttgaagtccaaccaatcggcttcatctaagcagaggaaccctaggagcatgctggggtcgagttggctgaacgccattttgcgaaccttctcacagtggaacgtctgaagcgcaccgaacgaatacgcatttgcataccatcctgacagcggatccaccccacctgttagagaactagttggcctaccctctgctctgagaagggaaggaggtgtagtcgcccggattgtcgaatcttcttcgggcagagagagcggcggcacgagatgacctgccgcagactccaaagtggtgtcctctgattctttcgttttgtcttcctcctttcgttcggggtaatcgatatcagtagtctgctccgttgtttgccgcatgtccgctcggtaaggaggcggtcgaagaaccactgctggtcgtgtgtgatgtggatcgaggtaaatcaaagaatcggcttggtagcccaagaaataatacgacgatgaaggacgaccacctgctatcccgaccgactgagggaaggtgaacaggttctgtattggtacaaagacacaaggtggagaggaggacatggtgagtagaagaatcagagtagaaacacatgagaagagatggcaagacacaccttaacggtctcatgataaatcgggttgactccgtccagtcctaacctcacgttgaccaaaatcaaaaccggtcttcctccccacgagtctgccgactttggccgtttcttctggatagagagagacgacgtggccgctgataattcgtctgaggttggtatagatggaggttgggaagcagaaagaacttcggattgaaaaatgacactgtcggccgcgagggttacagatacaccggcatgagggtacaccgtcgtcaacgctctaaggatgtatgcaagaagagttatcagcagcagcagtagcagcaagaaacagcaacagaacgaatttacttacttgatagcccctccagctgtactaggtccgaaccactctccgacctcttttccgagttgtttcccgacaagtgccatccgatgaacagagaaaggtgcgaaaggtgcaggatcatccatgaaccacgtcaggaccttgacatacgtcccgtactcgatgatttcttggtgagacgaagatgatgtcggaggtgacagtggacggcgccaatctatgaagcgagacggtgcatacagaattcaagaacgtttgggacgattggtgaatttaaaagaaacttttggaggaacaagtacaggaagcaggaaagtaaaatcaggctgtacctcgtccgagatggaatcgaatcaacgcattggctagcaaactttgacctgttcgtagcatacatccccatccagtgtctgctgtgaggcctttctcgtcaatcccacttgcactcttcacccaagcccatcctgtatgcgttttaggaataggcgaccgatccttcaacacatcccgggtttttctgatcagactaggaagaggtagaccgtccgcgtcgaactctgccggtgacggagtgagtagctcggaaggtagagaagagattgcggcatactgtgatcgataagtgcaccagatggaagtctgaaagtcggcgtagactgatcacaaacagagaaggagagaagattccatatttagtgctcagtgcgcttagatgggaggtagacgataacatggacggttgaactaacaatcctctggccacctgacctcctctcttccagctcttttatcctttcgaggagaagaggatccgtcttctgttccgacactactgccaggaagggtggaaaacagactggtgaacttgcttggggaagagaccgggggatgacttatggatggcgcagcctgtttccgaggtggggaaagcggtgttgaccccgaagaagaagtctatttatcatcagaaggaagaacagtgatctaatcagtcattctggtcctttctcccatcgctgccgtgttccttggtgttgatgtaggaaagcactcacaaagttttcagcctgaacagtgggttctgacaactcatcgctcggtctactcggcttccaaccttcatgaagttttcccatgatccagatcccctcctcacatcgatctggcttcccagcatcggtatcgagcaggtacctcattatcgcgccattttctctagcagcggccagaaaccctctcttaccttgtccagtggaagcatatgaggggagcgctctatgcgcggccgagacagtcggagatggagtacgcccaggatgaagagatggtgggatgggcgtcggcgtgaacgatgacgaatgatttgttgatgacaacggagagtgaacggacgaaggctccgagaatgttgacgagacggacgatgatggacgatgcattggacgaggtggacaggctgtgtttgatgtggatgttgactgaacaggtgattgatggtttggtaagagattggaaagccagccgcctagacgagttgggaaagtactaggaccagattccgacgacctcgctgtcgacccggcaataaaggtttgatgaagtccgttgggagcactgggatggcctccttctatactactcgtggacgctggctggctagcagaggtttggagtcctatcttcccagcgcttcgtcggcccaacgtaggagacgtaggtggagattggaatttgggaggagaatctaccacgatcgttggatctgactcagacgttgaggctggagctacagatgaggagaaagagtgactgaaaggaccggagtgggtgttgtcccgttcagttgcggaagaagccaagttgatggatccgttcgacggctgctgctgctgctgctgctgctgttcaggtcgggtgctcttgtctttgtcatggtaggagaacaacttggacgtctttttccgaagagttttggccctactcgtcttcttaggtggggccgggttcggttctctatcgatctgctgagctgacgaaaaagacgaaaggtctctaccctgttcgaaactgccctcggtatctagcgtgtcagatccgtcccgcccgcctccctcgctctcattcgtgtttgcaaaggaacctctggcagatcgtcggccacccgccgttcttgacctatcaccggaatctgaaccattctcgatctctgggagagggaattcctcgtgggtcaatagaaactcaaactggtctgaatctgactgccggcgggacgtcgtcgcctttgatctcgaggaaccggaggaagccgaatagtctcttcgtagaaactttgtgagcttgtgttgatggctggatggctggatggacacgcttgaggaggatgagactgatcgtgtggaccgataggagctcggccgtgagacctgaggagccggcagggcaggcgaactattgaaagacgtacgcggttgggaggatgtggaggaagaggacggagaggatgagcgctcggttgaaagaacagggcgggcgagggtgtttgccgagcctgcagcaggctctatggatggtactctagacgttgtcggcaaagacattatccgagcttgatcgcagagctgatccaatctcctgaacctatatacacaaaacaagacaagctgagtcagaaaaacagatgacgatcaattggctacagagatatcaagctgtgggaacgacctcctaaattacgtgttggacctgtcaggcgaagatggctgaacacagggaaagaagcatttagactggagctgataggacatgaacaagtcaggatctctgtgaatagacatgcttacgttgtgttgtgttgtgttatgttatggatacacccgaaagatggacgatctgctaggtggtgatggagtctgattgatagatagtcggtcgcctgcttactccagagtgatgatggggtttgctgtgtgctgtgcaagtctgtaaccctatccctttttttacataccttcccatcaaaccaccacttacacgacctcctttccggcctttaccctaccaccaccaccaccaatactcgtacaagcatcactatgagcggacgacctgcccagcgaaagtaagctatctatgggtgataaaattcttgagtttgttttaatctgtcaacactgtattgatcattctttttgcggtcgatgatagctacatcggaggaggagccgaggctcctgctaccaactttttctccgccttctggaagacccaggtgaccgctcctgataagattgagggtaacatcgcgttcgtatatagttcttgttgaataccgggaaggccgtagatggatagaggagatgctgtccggacgttaggaggcggattttgtggtcacctttttcatcccgcgttccagtctgtttgtagactcaacatacacactttcttaattgcttgttcttcttcttcttcttctactacagcatcgccgtgtcctctgctctctttgccggtgccatcatcttcacccgaaactttggtgatcttttgcttcctgctttctaaagcaaagagaatgaatgtaaaagagcaaaggaaaggacgagggaaacaaagagattggtacgtccgagtcttctcttcctccttttcttcttcttggccgtacaagagctcaaccgggtatgtttcctctcttgggtgtgacagtagccataatatcaatgcattcatgtgtataccttgggctcgatccggtgtatcggcctagtcgagcagtactgatgtgtaagaaaacgagccggttcgttcaggttgggcgttacgtcaatcgttcatcgaaggaacagttgcttgtgctctctcttttggtcagagagaagaagaagaaaaaaacgaagaaaagacacaagctatgatgccgcgatggatggctgcagctgatcgttatatctccctcttgggacttcgttcgagctctagaccttgagatcgacgtgcttgattacttacgcttgcgatcacaagtaacggcggagagtgattcgtgtgtacctggttacgggtcgacgaaggcatcttgtacgacaaggaaagattgatcctagttctagtactgagctagccagagagagtcatggaacaaaacacgacttgcagaatacacgacaagaagaggagtctgagtgtaacttgtctttttgtttgaccggacgacatccatcgttctgcgagagtttttctgtgcggcccggatgtgggtagatgactgacctgtttgagcgaaccaatttatcggggtttaaagcccattggccttagtactcgttctttcaagagggcaaacagagagtaaacgcgtcatcctatctatgaagcggagatccactagaacaagcgggcttatttcgcagcatagacttcaaatgaataattaagcgtggtgcttgaacagaggagagagagcgacaagaagcaaacgatcgaacgaatgagagacagagcagaaaacacttgtatgtttcgacctatcaagttctcgcagacggacattgcttgatctaattcaacgacaagcatccacaaagagaaggcaaggaaggcaacgtgggctctcgatgcgcagtatccaaccgaacctggatgggaaccggcacgaaccggcataagctctttccaggttagtcgatcaaaaaaatgaaagcctctttggggacgcactcagtccacccaggtttctgcctttcctgatctctctccgatccatcagcgattaccgaaatatccttctagttgatctgctttctcgtgtacctctctcgtttaggcctgcctccgatccctgaagagaaaactgagagaaactggggacaagcagagagtgatcgatcaacaagcgtttaaatagaggggggacaggaaactaccaagaaggcccagactgtcccgacggctgccgcgcctgtgctctaatcatattctccgctaccaagccttttttttggcgtgtttgttctgatttgtcggttggctatagacgactatgaagtgagtccgagattgactatgaaggctatcaatatttcgtttctatctgttgcttccgctttcttttttctttttccaatctctttttttttttctcttgtctcttctaaagcactcaacctcatccgctcccttttcttccaaggccagcgccttgtttgtccatcatacacaaatggacggcaaaagatatcggagagggagtggacggtagccgcttttcatccgcttcttatactccgtttctcacatacaatcctttttctttttctgttttttccttctttctctctcctcgggctctatccctcttcttgtttaacaaagtgaccccgatcagactcattccccgtctgccacggcttcatcaacggacgacatgccttttctatcccgaccggccttggcggctactctatcgtcctcctcaggtgtatcgacctcctcgaccggttcatcccctatgcgaagcggtggcattctcctccatcatccctcgccttcgttgtcgtcaaatccggtagaccctacgcacccacactcttcatcatcaacgctgccgccgccatcgtcgtcgtcgtcgtcgtcgtcgtcgacatcatgggcccagacacggcctccaccaagaaaaccagcggtctcgttcgcaccgcttcctcctccaccgagagagcgaagaaactcaatcaccattggtgttgctgccagaggacatatgctggctacacagcagggcggtggtggttcccgaccaaagaaaggtcaacagagtgttcgtccctcatgcgcttgtgtctctccttcgtgtattcattgttggtagagtaacgatgaaactgatcatgtttgcgactgacttttgatgtcggatgcgcaatcttctttccaggtggtgtacatacagatgtccgacgaggattgggaagcgtacagagcgcgatacgcgtctcaggaggatggcaggtcggtctccctctcgctcgtgtattgatatcatcatcattgccatcgacgacctaattcgatccttcaatctctttggatgaatttctttgcttctgcagtgttagcgtgccagacatcggcacgtttgctgtgcaatcgtcaaaaaagctgttttccaaacttcgctcactctccactcattctcaaacgagttcatcatccacaccttcaaacacatcgtctggccgtcggtccttgttctcatctacgaaagcttccgccggttcttcgagcgaccaggatccatctcggtcgaccgcttcttcctcttcgagaccatcatcgtcagcatcctcggccgttggggctccgttggatccgggttctagccggctgcctggtcaggctctaccaccgagtggagagccaactcagtcatacagtcagaccccgagaagaggtcgaagtccaccaccaccgcccagaccccgaagtccatgcccatcggcgttaccacagacagaattatcgtcttcatactcagtaccatcgatatccacccaatctgataggtctgactgtctgtccgatctaaacgatgggtttgatgagtactcggatgaggacgctctggatgacgaggacgaggaggacgagggcgagggtgatgaggtagacagagatgaagagaaaagggaagaagatgaaggtgatggtgagaggaggttctcactaggcgagatcaacgaagctttgtactcgattgcaagatctcaacaacaacagcaaaatcaaagacaccaatatcgatgggaatcgggaaccttttcggacgcagaatctgacgcaaacgcccgtctggacgagcgaggctcgagacggaactcggctttcctcgcccaacagcattggtggttggatgatcagaagtatgcgcctaacgggatgatcgtaggaagtgccggcactgccgatgacatacgatccggtgagatcactcctagacgacgaactagtttcggggataacagtcgggtcggggctgtccttgacaaggaactctcgaccgagggaaggacgccaagtgtaagccaagcctctttcttttcttcctgttgtgatctggctaccgagaccttgtactgaaaatatgtctgtgcttgactcactggttctcagcgagctttcgttcttgggttcgacaaactggatgccgatcgagctccggccaactgacctactgtttatgtctctctacacaaacctcttctctcttctttcttctgttttgtatatcctctcggttcgtttcttgttgtatctatatggctcttttgggttttctacataaggaggggttcatcaaacctctcgtgcggaggtatcatcagttccccattcggtgtggctctcacactttccttcctccaccttctgttctctcgtacatccccgcacatgtggggaagggatgaattacctgtgctctgtatcatgtctcgagtttttccccttcttttttgctgcatcaccgtgtctactcggctccgcactgaataccctttctcttatatttaggatccaatatgctgctattcttctgcctcttcccgttcaagtattccctcgaatagttcctctcttgatcacgtctctccatgaatattttctcaagagtttaccacacaagttcatgtttcatgctttgctccttccagatcgggtcatcaggaagttttgggaatatcgatccttatgttactctgttctattcccttcgacttgtctgactggcatttggacctttgtgaatgaaggaaacatcgatcttttgagatatttacatatattattgtgacagccacgcaccactaattatcagcttatcagagtcagttctacacaaagcgatgacacttgtgtcgaaaagaggaaagccgcgtgttgtctgataaagtgaatttgatcgagttgtctgagacaggagaaatacatgtcttcatatatatagaaagaaaggagaaaacaaaaaaggccgagctgcggaacacgtggtagcccgagtgatccgaaaccctgcatcgcaacgcccaccgggccgcgctgtttatttcctctctcccgatcggcgatgtaacgcggaaagaatcttgaaccacacccagtctgtgcaactcatagaacgcagacaaaccgatcgaggaggattagatcgagaataaacaggatatgttctcctgaaaccctattcttttccattttgcttcccgcgggcgagaccgagttggtgtatcaatgggtacagcacacccaaaagggaccagatgactcggtaagacacggagagaaagaaagactcgaaaaagaagaagaagaaggagcatagatacgatgaagtctgagcaagatccgagactgtgaaaaaagacgaggtatcttctctatgacgatcagagagaaacagaaatgaataataaataaaattcagcatgaagtctcacttcctcgtgttcggtcgggttcgcctttcttcattatttccccgctcccttcgcacttttacccatgtgctcagcgcaaacacgcataaatatagatttccccgaacaaccagcacatcatggtcaatgacgtctcggactcagaaagaaacgtccgtcgaaaccaagtgacgcgtgctgttttgtcatataaagcaaaagtagaaagagaaggaggataggaggaagtgggtcgagatatctttttaagaaagcaaacaaacccccttctgtcccgttactcttcttgatccttttcaagaagcccagataccaaacgcagacagtctggaaatccgttggatccttttcacatctaccataaaccatcatcgagacctacacacaaacacatacagagaaatacatccgtgactgatacccaccttcgccatgcacaccgatatgcttgcgcctatagatgcacaccaaccctcaacgtggtctttcaacatcgagaacaccagcggcgacgactctttcgataacgatctaacccctctgccaactttggagggtgtctccccgttctttgtctctccggaggacgagctcgatggatcacttcaccaatcgtttgttgcagacgctcaaccattgatcggacttccatttgggtgagttttttctttctttctttttttcccttttcgtcctcttttcttcttcggatgtttcattactcttgtagacgtactgacagcggtggatttttaattacacatttgtttgcctattcgtctatttgtttgtttattcgttcattcgtttgtctgtttcaacgcaaaaggtttgctcaagagttgaacactcaatcaagtctgcaacagaactactttccatggagctcgacctggcgatgtgagcccgtctatgtctctcttctcctcactctaccaaatacatgtgttcaacgttcttccctgttttccttcttttctctagcattccaacaggcaaaccaggtccgccgggcgagtgcgggttcgttggacagtgatcgagaccgaaacggttcggcctcgtccagctgcaacggcgagagacgagatagctactaccaaggatccatcgggaccaacgacgacggttgggatgatctgtacgaagatcccgaatacaactgtgcacctccgccttcgttgccacttccttctttaccgatcgccgatggcttttccgctctttctctcgctatcgagaatgaattctcttcttcgtgctcttcgtgttcctccagagaggctggcgaccagtatgcgaacgccgaggacgaggagtcggcgaaccgatacgattacgacagtggagtcgagacgtcgatgacccaacgtgcacaggacctgccgggcaatttcgatttccggcctcattcagactctttctcgagcgagacttcccaactttcgttctcgaggttcgaggttgaatatgctcaattctcacaaaccgtaccgaaaatgacaacgatgataacggcggcgacagtatcgtatcgcccggagcctgtgcaagacagcttcgagcacgatgaagacgatgacgatgatgaggaagaggagaaagacgtccgaacaccgggattggtctgtggaatccgttactcccatcataaagatcaacaaccaagtttctttttcgatcaccaatctcgaaagacaggcccgttgagcgtctggaaggagagttctgttagtgccgatcctcatctcgaggtcgatgttgtaggagaggtctagagcgcgcttctcattctgtcttcaataaatctgtgtctcatcgaaacgcgctgtccctctctctctctctctc

SEQ ID NO: 341 - DNA, 6380 bp, Xanthophyllomyces dendrorhous
tctctctctctgtttgtatctctgctttccagttgcttgtccttccacacttcctgctctttctcgcccctcgatcttgactggtcctctttactgtaagaccatctgtatgactatcttatgttttccctacaaagtctcgctgttttattttgcaaagatcgtgtgaatatgggagaaggtattgcttggcctgcctgacgtgacatagtctggactaatcaaaaacctgtccataactcggaggacaccgacacaacgaggaaaacaagagaagaccgatgacagagagtgaatgcaaacaccgagaccgaagaaagacaactgtcgaatgtgggctgtgagtatgtaagcatgacatgatgagaactgggaaaacgagaaaacattcccggggaaggacgaaaggggaaggaaggtagagcgatgaacattggaagatatgttccagacaaagatctagacaagaagcgggtaggtcgtttcgcaggttgaattggaataaaaataaaaataaaaataaaaataaaaataaaaataagaaaaaatcggtctttcaagacgaacaggaatagatgcttgtgacagagcaaaggaagaggacatattccccaacccggctagctttccatccgtctctggattctgatcagattcatcgttcgatctgttgttcgttttttgttctttttctgtttttctttgatttttcttttcttttctctcctgtttaatctgcacgcgacacttctccttctgttcaagcttttagacccagctgacaatgttttcttcgtctgtgcgacaaacggtgtaaacattgactgtgacggtacgctgataactgagaatgtaacaaagactcatagatcgctcgggaacaaacgattgatgatctaagcagagggctgggttccctcggcgaaggtgtaggtaagactgtggatgagggagaagaaaaaattgtcagaccgagtgcacacgttcaaattcagacatcgaccaaaaaaaaaaaaaaggaaaggcttggctatacgtacccacactttccgcaagtctgtcggttggagtggaaagccatgaagataccagctccgcactggggctgggggcactctcgacgaagtcgcttgatctttccatcagagtcgaccttgtagtacttaagaatagccatcttgaccttctttcgcttgtgcttgatcttcttggggctgttcgagaaaagagaagaggtgattgatgtcagatggagtctatttagccactggaaaagaacgaaaaagcacacttacgtagtgtactgcttcttctttcgcttcttggctcctcctcgcaacctaaggacgaggtggagggtggactctttctggatgttgtaatccgaaagggttcggccatcctcgagctgcttaccggcgaagataagtcgctgctgatcagggggaattccttccttgtcctggatcttggccttgacgttgtcgatggtgtcagaagactccacctcaagggtgatggtcttacccgtgagggtctttacgaagatctctaaagaatgggaagaaaaaaatggtttgtcatggtgagtttttgatcctttttttctatttcgcagcctgctctcccaacggacagaccctcgcttgattcagaccagagaggcaaaagatttactcacgcatgtcgtcgaaactaaccaagtgttggtgtccttgttgttgacgtgaggaaaaaagagacgggggagcgggggggaggggcgacagataatttttctgacggactcatgcttgcaggagccgaccattgtgtaagtaacgaaaaaccaggctgcacggatgtaacacataatgattacgtaagactttcaatagaggggtggtattgaacatggtaaatggcctcgagagttgtttacacatcttttcgacgttgattctctctcagacccataacatagttttgtttgctatgtgtccgctgaggaggtatgatggttgaactagtgaattgaatcttcaggctctcaagaaattcgcagcgctccgttcgatcaatgcgcaaacaatcgaggtatcatcattataggcatgtgttactgatcctaaggctaaagagacctacgcgacaatgaaagggctatttcgatctaggaggaagtcattcaagagcattcaagagtgattcgaattaataaatgaagcgaacgaaaggtatttgatagagttgatgccttgcgcgcaagaaagcaacgaaagtgagaatggaagggggaaaggataggatgacattctcttgtatgatcacgtgagaatcgaggatattatttgaatataggtagcatatatgaagtaccttgttagggttacaccaaacgatcactcagcttacatctctctgcatccaccaggccaatgccacggcctcttgagtgctctaaagccactgatgccctcagtgatacctattctctttttgttctgttttatattatattatattatatagtctcgctgaaactgtgcgttcgagtatacagggagctctcggagcgttctcagaagagtgcatagtctcctgtgactccgagtttgagcccggagagaaccagagtcactagggaagccacgcaggattaaaagacagcttagagcagccagcggacgactaggctgaataatctatgatccgaacgaaccaacaatttacgttctgggcaattgggccataatttcatttttctatttttctatggttcctttattttatttatccattatttatttatttccccttctttcttctttttcaaataaggagagaaaagggaaacccggcgaaccgctgccttgcccgctcgcgcttatcagtctgaaattaatcaaaaccgatgaaaccttaggctcaggggcgaaagtcggccgaggcggcaggcgagaaccatgtgtggacggaagtatggccagcagggatgagaggcgagcttcaattcaaactgcgctttgatgacgatcaggcgcggctgagaaagaagccagggtaataaggggaaaaaagataacgctcgacgcggccggacgggcacacgacaagagcatacacggatactgttccatacacgtgaaatctttctaggcggctcgttttttttttcccttccttcctttctttcttcctttcttcctccctatcaggccgaacagagaccgacgatagaggcaatcaggaacggaagatctgatatgcgcagttgacgtgagccaatttgtctcctgccatcccacgcctctacgcgtccaatcggtcattccttcttattctccttctgcctctgcagcctctggcttcgtgctcgccctctgctctggtgcctcccaatcggtttccctggcctttggccccgttagcttctcttctggctttccccttcttttccttctccttccaccctcacccaatcccccggaggcaacccaatccaaaccgtcaacccatctcgagtgtcgtccaacgttctctgttctctttctccgtttgttcaaccctcatcctcatcgtacatacacatctttgttcttcgtctaggtgagctcttttaattcgttgtttctctgttcggaagcttggtgtccgcgtcggtgtgctcgtcaatcttccttcccttcctcccagctcgccgcccttctctttgtctctttccatcgcttttgattcgcttcgtctctttttgtcctcctggttctggagacgcctctccttccttcttttcagcctacatcgtccagttcgagctggtctttgtttcaatcacccatccacacgcaccttcttggtctccttcggctcatttcctgagcatagtcggctactttctctctccaatttcccgttctaagatcttccgcgtcgtccacctatcgtcctttttttttttcttcccttcgttcaaccaacctgacaatcgaaccgttctcatctcttttctcttcctattgcccagcccagatctctcttctctcttctctctctctctctctctctttctctcttcttccttctatttcttgctctttttctccttcactgtctctctgcttctcccggccgttcaaccagcaaccgttgcataccgcactcggcctctctgcttcaggaaacaaacacgaaatagcctagctcctcgcggccacgtcctacagatcgctcaactcttcctatctctccctcaccggcacccatctttctgctttcgcctcaagctcaagccaaattccttcttgagattcatgcatctcaaaccaaaaggttcattctcatcttccttcaagtctactacggcttctatatcaaacatgggcaaatcattcactgtgagtaatctcaacgtgtcttcctcttcccttctcttctctgctctctccattcccttcctttccttctattctctttgcacatcagacagagctgcagccgagagagaaggagaaaaaaacctcccaaagacgacgtgttgctgatccaccccccacgtcactttgccttcttcccgcgtccacgcttctcggtcatcgtccacctgatcttccatcttatccatccacctctctcgtctttcaaaatccaatctcgcctacaatcatgttttctcattcattcacttccacctgtactcccacctccgctcttcctattctaccccgctctgtgcgtcgatctcatcctgaacgcacacagacatcctcccctaagccgattcctgcaccggctcccgtgtctccctcgctcgagtcacccattccttccaacccgtcgtcctcccagtccgccacatccgttatgaccgaggacgaggaagtaagtctctataagccttctatttttggcctgtttctcgtagagacggtcactctgacgcgtccgtccctttatctgtgcgttctttcccttgtcgccatctatcaggatctcgagggataccggcaaggtggctaccaccccgtccgtatcggtgatctctacaaagacggacgttatgtcatcatccgaaaactcggttggggccacttttctaccgtctggctcgctagggataacatgtgagtattttgccggtcagatcgaaaggatatgctaggcgggcgaggattgaatcaatgggatcctgcgaaatatccgattgggctgtgaactgaatgcgagagacgaaggagattaaacacaaagcccacatccttccaatccgtcgctctgcattcagattcgcctattggccggatttttctctgatcaatccgaccaacatggcgaatgagcaaccctcctcttctcaaacgctcctcttctcaaacggcgttttgctcaagctgaccatcccatctcgcctcgtccatcttgcctacagtgctcaacgccatgtagctctcaaagttgtaaagtcggattcacactataccgagactgctctggacgagatccaacttctccaacggctctcgaccgctgatccgaaccatccgggcaagagacacgtcgtcgctcttcttgatgatttccagcatgtcgggccgaacggaacccatgtgtgcatggtgtttgaggtatgctctctcctctctttctcgcatcctaaggggtatgctatatgtgtccaagctgaatcttgttctccttgctccgccaggtcctgggtgagaacctgttgggtctcatcaaacgataccagcaccgaggagttccgcctcatatcgtccaacagatcgcgaagcaggttcttctcggactggactacctccatagcgaatgccaaatcattcacactgatctcaagccggagaatgtgttgatctgtatcgacgacgtagagtctgtggtcgctgccgagctcgcgagctgtccggcagccgtacccaccaagcttgtcggtgtgcctcccagtcaaggcagaggtggcactcagacacccaagagcgagggaatattcatcgtcggaagtcaaccgttaccaagtccgagcagctcctatggaagcaaccaccagatgctcgacaagtacaactttggaatgactagcatgacaaacgagtctgcttcatcttcgctctttgcaaagaacgctgtaccagccgccggtagcaaccaaaagaccgcccttccttccaaaggatcatcctcgacctcctccatctcatcctccactggatccgaccttcactttggagaaaagacccaagtgaccccggccatccaatatcacggcccctctctactgtcccaacaggttcatggtcatccgtccccatcgatggcgccaaccgcttacctcggttcgacacttcccccgagctatccttccagtaatacgaacaacacaaacaacc

SEQ ID NO: 342 - DNA, 1475 bp, Xanthophyllomyces dendrorhous
ctcagaccccgaatgacgggccggccaccccaccacccatcaacatttcaacatctatcatgtcctctctctctgtcgccgacgacggcgcaccagacggagatgacattggagtgaactcgagtgtgtccgacacaaagtacggtactgttcctcagtcccacggggcgggtgctaggtccttaccagactacccggttgccccgggggtgaacgacccggccgggctgccctcccctccgccagcaccttatgatccggcaagcttggagcggatcaccgtcaagattgccgatctgggaaatgcgtgctgggtcgaccatcatttcacgaacgacatccagaccagacagtaccgatgtccagagatcattctcggcacgcagtggggaccgacagttgacaactggagtgcggcctgtctgacgttcgagctggtcactggggactacttgtttgatccccagccgggcacaaagtacgacaaggacgatgatcacatggctcagatcatcgagctcctcggagagatacccaaacagctcgccacgtccggtcgatattctcaagaactgttcaacaagaagggtgaactccgacatattcacaagcttcgatactggccgatcacctcggtcctgaaagaaaaatacgggatgacggacgaggaggccgacttgttctcgtcgttcctgaccccgatgctgaacgtctggggcacaaaacgagcccaggcgaaggacatgctggaccacccctggttaggtggtgtcgtcgtccagggtgaattggactgtttggaaagagaagagaaaagaaggcccaggacaaacccgatcgccgagagtttgggaggaggagcagccgacgccagttggatccaaccgccgaaaggaccgatcgaagatacctcggccggcgggtttacgcccgggtcgggcaacccaatcagcctgccgccaaagtcggctccgtcgaaagctgtcccacaaaagaagactggagggttcaacatcaaggcctaacttttttctcttctccccctcccccccctcttatctgttattcatgtctctctaaacttgtattgtgttcgttcggccagacctttctcccggccaaggtcttgtctttgtttccttaattctcttgatccaacctttcgtccaccacggccggaggtttccaaatccaacagtctctttctttttcgttcgagtctttatagtttctttctttcccctctcttcattaagtttctctggtgattttacttctcttttcttcccactgttctcgtgacgcatcgtatggttcctcttttcatatcgtttgttcttctctttctccttctcttccatattgactgcgatcttgtttgcccgccgtctttatattgtttggttcttgatctctccatcttaatacgtttgcctttctatttctcctgctctttttctcccccgtcccccctc

SEQ ID NO: 343 - DNA, 15166 bp, Xanthophyllomyces dendrorhous
cttctctctcctttatcggccaacccatctttttgtagctcttcctttgtctttttttcgttcttgtcttaacttccgcttctggccattttctttctcttcatattcccaatacagacccctcctcgtcggactcgtcttcctttgttttctcgcctacttttctcttctctccttctatctaattttctttcctttatagatgcatctgtctgtctgtcttctactcgttgtgacttttttcgagcgcaaagcatttcatctgataagaaaggggagaggttcactaattgatacagtttacgaatcgatcacccagacctgatgatgtcaccagggaggggaggggggcgagaataacaggcgaaacgacccaagtcttagcccagcgcttcacacacgcacacatgtatacatacacacgtccaggggaaagggaagagaccacgcacctaagtctccggaaccctcggggttctacttcttgtcctctggcttgaccaactctggggtgtcgtttccgttctttgtctctgggtcacatacataatgtggcttggatttgtccccggccgaatcctcggacgacgcgtttggcttcggcaggtctttacccttgctacccccggcagcgctctctcctccgctctcggctccggcagaggtagcaggcgccttaccctccacatcgggcgaagggatatccttgccctcgggactgccgtgcttgtctaggaattctttggtagcaggtggtacagaggaatccttgtcggccggcccggagccgtagccgtgggaagatcgggcgatgctatgagatcaagaacggtgagatgagacgagatgagatggcggtttgtacagggtatgctgagcctttatgcgcacacgctagacagatacacttacgatgtcgtctggatagaccgacggagggcgggcgagccgatcgctcggaggataggaacggatctgatgaatgcagcgcacatggttgctgtgtatgctatggtatgatagatagacgagacggatgaagcaaaggacagggaagatggggagatgggaagaaggaaacgaaagaatagaaagagatccaaagaaaggccgctcttttgaacgatcgggaagccgtcaaggcgtcagggcatcagggcaccagggcaccagggcatcagggcatcagggcagtcagggcagtcagggcatcgagatggagttcaggtacgattgcgcacgggccgtcgtcattatgggctacacgatcggctgcctggctgtaaccgatcgggcatcgggcgagagccaaagattgtaaccatgacgtgcactgtgattacataagcgagccttccggtccggtaaacctcacttgcttgctgtatcgctttcggtcactaagacctatcaactagccatcaactagccatcagtatcgtaagaatgcccgttggcgatactgttaacgatgctgctgatagcagagccgagacatcttcatcccgaccaggtcttccggcaagaaagtcgttcaagaatatcgtcaagatcgattgggacgcgttcacctcgcttgggaatgtggcagaacgtccagactggatgggcggctttgtcctgctaggtacggattcatccttcgtgctgtaataggctaatgtctgtcgccatatatctcggttgtcggatcttatcttccacagaaaccctctagaagacgagagaaaaggagcaggaggtgtgtttggcgcatcagacgagctcttaactggtcacactaccaaagggtgagaacgccagctggcttgacagaacgattgggatgctagtgtataggaaagagagaccagacaaactactccagatgctatatcctacctctgatcagcgtactgttcattaatcaggcgacatggttcagtcttcaatcaaaagcaacttgaaattgaccattgttgtttcgtcatccctctctcttcccttctcgcgtgctgttcttaccttctgatgataactatgaggacagatgtattggagagtaagtcaatcccagcctaaattcctgctatcataactttactaatgacccccctctctatcgaaccctttggattatcaatcacgacagcgttcttcgattctagactggacttgatcgagcgacagcttaaagtccataaagatagactaaaatacaaggctggcgaagttttgtcaaaatcaagcgccaatctccggtgagttctgaatctttggtttcacactggctctttatcattattgaacttcactgacgctgacaaggctggaaaacaccacggataataatgataatgataatgatgggcacatacttaatcgctcagtgctttggcacccaagagtcctcgtatatggccttctgatcgaccagaaggggacgaagactttacggatagagggataagtcgtgcccggtcagactcacttgaggaagcagcagccacggaacatgcaagaaaaggtatgaagaaggaggaacgctggctcttggccgagaaggaattgagaaagttcaaagacaaggtcagtcatgaattctctattccaagcttcgtctcccctgcgcgtcgtcggtttagtgttccgtcccgataggatctctgcctcagagcactaatctaaggttttatgcgttctacgatatctcagactcaggatcggctgcaatcgctgtcaacctcttgggagtccgccagacatctccgaaccagggacaaagtctctttcttcttcggagttatgaccgtcttgacgagttgtctgatggtcgggctgtatccagaatggattccactttggtagtacgtctcaattcccagtactatcgacaaacgaactgggaaaggctgataagagactgaacggaccgacatggatgtgggacaatttttcaaccttttctcgtcgaacagcactatccagagtgcattctatctgcctgttcggatatggacatacaagaagaagcaatggcactactttctttgggacatgtgctattgtacgtcgcttcgactctgtcatttatgttgttaacctcatgtcgcttgaactaaagacctaatctatattgtctttcacgctcgtgatccagatgtgaatgtgctggatcttatttggatgtgtacgcatgctccttccttttccgtttcatgtatctcgaaagatctcattctcaccacgtcttgagatccatatctctcacttctcgatgcttcacagggttcttccctgcaaacaccatcttcttcacggcctgttacttattgacaatgggtaaacacgttccacggttttttgttatgtgatcaaaaactgaccatctacttctttcactggattctctggttctgataggccctctggcgtcggccattatcacttggaggaattcgtaagtcgctcgtatcaatccggccgccaagtacattactgaactgttctgacttctgttgtctatttgtatagcctggtcttccactctttggataaagtcacctcactatttatccacatatgttcgtccgtctctatttgtcatacgcaaccgctttttcgtcccctttcttttaaaataaatttgttaacccgtctgaatgaatttatctcttgacagaccctccattgacactcacaacgatcatccatttttacccaaatggagcggagagatggcccggaatcgtaaggagtggagaaattgcttggtggaggaagatggttctagggatcgggttctatcttgtttggcagatgatgtactggagagttcgtctttctctttctcaacactgtgtcactttgggccatctgacgtcaagtattcaacttagtttgtcgtgatcgggcgtagggaaaagattaacgctggaaggattacttctttctccacgtacgtcttgttcaattcggaaaaagcattactggctacctaggcatgttctcacaagcgactatcttcattattcttctattatcgccttctggattaataccttgataatgccacagactgctgaaagataaacacaatgtgatcggccgttggatgagagctactaagccagagaagagagagtcgcttttcatgttctggcaactaggtccgttacgagcccgatgtttcacacgtcctcctcttgcaaactccctctgactaaactcttgcttcttttcgtctcgttcattaccatgttgtagtttacacggccgtatgctttttaccgcctatcttcttcttatggaagagcaaagtaggatcaggagtgttcttgattacagttttcgctgttgctacctggaacggagcgtcctactatgttgaggtttggggtcgaaagtcagttctcttctttatatttcgtctccttctctaagcatctacaagagcagcgattaaacttactttttgttaacgatcttcacagattcgaacgagaactggaggcacttcgaaaagagatggccactctcaccacttcgtcgtctcccgcaatgtctcaggcagatcttcccttttcagaaacttcatctgttgggttatcttcggcgatggcgacaacatctcatgacgtgtcatcaacagctgagaaaagacctgggttgactcaagttccttcgttctcgttagatgagaacagtgaaaaaagcgaaggtgcattggataaggtcgaccgaaagttgagagatcatggagcggagattggaggtggatgaggtcttattcatttttgttttcattaagactttttactttctttattgctgttttttttttctttcttcttcgatgcaattgttgtatctccgtctttctctcgttaagatctacgacttcgtactttgtttgcgtattgattaagtcttgtaaagattggacaagtgacaagcatctgaaagaaagaaaaaaactatatatatacttatcgatatgctcctacgacacattcgtacctagtactgctttttacctctcagatgagtctccatcgctctctgtccccgtgtcctcaagactttccagtccttccgatctatcactgtcttatccggcacgtggtagagtccttcgaaatcatccaacgtgcgaagtcctcgtctgcctttcttcttcctgttcttcctgttctcccattgcttctcctgtttcgcaaccaacacggcatctaactgagcctcctttcgtctggtttgaccctcagatccttcgttcaatttggccgctcggtatcgtcgaagagcaaactcataagtcaaaatgacatatgtgagatgggcaatctttgagccctgctgataaacgacgtatcgagcgtgaagcgctcgaacgtctggccagaccagatgaggcggaagaggatcaggtcggatagtatgacggggaatcattcggaccaacgatttcgaaggaagagctggtatagaagaagatccaataagggacggcggatacagttcgacaaatcgtcgtaggatcgaatccgccaaagacagttcatccgctctgtcggagaggatggaaaatgaaaacaaagaagaatacaaggaacaaagagaagtagaaagagtcaaagcgaataagtataaataatgaatgaatgattgatagtaagaagagactgggacttgcctcgtcatgattcgaatcatgtacacccagactccttcgatgtttctctcatttaaccccagactctccttcagtgactttgcgaacgtcgcccctttcgagagttcttccttctcgcccatgttctctaccttcctctcaaacgcctgccactctttgaaaatctcaaatgcttccttcgctgctctctgtctatctgacgaatttacggtcatcaaccgttgaaggatatgcaagtacgaccacccgtttggtctgaccttgacttctgaccaaacgtttctgaatcgttcgacacaatgggtcaaggacgaagcatggtggtataccaccgaaaggtacgaatttaccaatcgaggggtcatttgaacgaatcgaagtggaggtggatggttggacggtgatcgccaatcagggttgattacatagatatgcgagtcattgtaggcatgggataaaagaacgttggcttcatgaagaatttcttgagacgtttgagggaggtaaggggaagcaacactaggggctggctgagattcctttttgggcgaaggagggtcagatacgcctttctcgtttgatgaggtagatgaggtagatgatgatgatgatgatgatgatgctgccgttagtgtggcggtggtggcttcagctgtcaggcctgagacgattgatgatgtcggaggagagttcaaagatccagacggggatgtagacatatcaaatgtctccttaaaagccgcctttccatcttcatccttaccggtggccaagtcgatgttgctaacctctcctcccgttgccttctttctgtctgttctctccttcttaccctccttcttttttcggttaagcttgaccatccctctcacgagcgacggttttgcagccgcataagccatcaacgcaagctccaacgtcctactccttggtgcaaccgcatccccaccatgagacgatctcgagaaccgaatcatctcagtcaatacccacctcgtcctcgccaagtcgccgttcttggccgctccttggagaagcaattcgaacgtctctctattcggagtatacatcttcctctgttcagactcgccctgttcttgggcgctctgaccaggaattactccagctgggacggagtatttgtagaagtccaacatggtcttaaacatccgaagggcttctccccagaacctacctaccggcactaacgcgcacaacgcagcattgaaagcattgacctcgggcagatagccatgctcctcggtcatctctttccagagatcaagcgctcgttcaggctgaggatcagtcgatgagccacatgccttgataagagagataaatgcctcgcgctgtggggttgcataagcgacaagccgcatgtgagcaaagagattaaatccggttgctcggtgagctggaatttcagagtggagtagaggttctatcaaggaaatataagtcttttcggggacaaatatcgattgatcctcgagagaatgaagcgtagtgatggcgcccgggaggtcggcgttagaaaggcgggcaattatcaggtgagagtgggcacttgctgttattttggcaccacctgataaaattttaggaaagaagtgaatcgttcgactctattgagcttggttgtacatgtattcgatcatctttctacgatgaatgtctttcagaaggagcgactcacatgtttgcattgcgtgtaaggttgactgaactccggccaagtctcctctcttggcaaacccatctagaaccatctcaaatccttctttccatacactctctccagactttgacattaacgttaaggccttgatactctgctcaagtgccttcccttccagagcattcacaaccttctccaaaggcgtgaactgtctcactcttttggcatcgaccgtcatcttattcctcaactgacgcaacggttttagttgggtttgtacttccacaggaagtcttgaaatgtagttatcagcttcgtgaaccgcatccgttatcatcttgcgccattcgttggtggtgatcagtccaagagggacatcatttttccggcggccttgacgtttcgacggctgtgtctctttatccaagccaacgagtgatggtctaggaaacacgttcgacgggaggtccaacacgagcttttctaatttgttgagaatctctgactgtggaggggagggcaagggaggtaggttttgtagtgaacgaaactgcttttgaaaagagttaggcagagtatgcatgggagtgtcagccaccgcggccgaggaggtagtatcagtgatgctcgaggaggtagacaaggccgatgaggtatcttgaaggtcaggctcgtctgttcgttcggtgtttgatgtgatctcctcagaattttgttcactcttcgttgcgtttccctcccagttcttcgagatatcggcctggttttcgaatagtgagttcaactcaaacagcgatttcgcgctccaatcactatcctcttttgtcctttcgactttattctccctctttatctccatagatttgagctttggcgtctgatcaggtcttgcgccgaccatcaccaattccggctcctcgtcctcttcgccaaagagatctgaggcttcagaaacttttcgtacctcacggtctggctcccatgtttcaaggtctttgagtgacggtattgttccttctcctccagaggagattgatttgagaagattctgtcggccttggtcaatttgttctgatccggcttgcttgtcctgagccggagggaaggaagacgcaggagcgggatgggtgggtgacgcgaggtgtggaatattaccgagctcatttcctgaggcaagcaaattgagataaaagtcttcgatctcttcttcagtcaaaggaggaagatctttgattgcctcctacgaagccagcatggatacagaagaagagatttgttaaaacagtgagttttgtccaaggtatatgacgcaagtacacgcagaggaacatatgccatcgcgagaagtcagaacgttgagtggacgacagacctcggtagcaatctctctatcctgtcgaagaacctgttccttgaaatatttgctctggacttttatccccttcatcctgtctttgagcttatgtcctgtcagaggcgtgagctgttcctcgatactcttttccctagagaaagaagcacgaccgacccaaaagagaaagaccacaatgagagtatcatcggtcagccattacaagaggaccaagttgtcatttgaatcaagagagttgatagcgtactctttctctctctcgttcaacggcctctttgaatgcggctgaaagatgtttctttctggcacgactcgatgatccaaaggattcgatcttgagaacgatctagagtggagtgttgtcaattggagaaccgtcgagcgtgagaccgatacggtccatcgagaggacaccctagatggactacatagtatcataacgttgtcgttcggttgcagaaggagagagaaatggccgtcagagcttggatgcgtgccaggtggagggagagtgctcacattttgttcagagtcgacgagaggggaatttccaaattatcgtcaatgcttatgtaatatggttagtcaccctatgtgcctcctcattctggatttcaatctttctgttcgttcgtttgttgatctcgaacgatttacgcattctagcgctaaatgtgttgattgaaagaaggataaagagataatgggtgcttcagaagaactcaatctataaatgaccttttattgaggtttaaaagtgcaatgtatgtaatctagggaaatgctagaaaccaagagaagtgaaaaacactaaatctagtcgatgatggatgcaacacagtaaccagcctgcgcttgagtggttgagagaagagacgaaaagagaatttgacgaaaagaagaaataagaaaaatcccaaaagaaagagacagagtaaatcccaaaagaaagaatgaagtcccaaaagaaagacctccccgcccaaaagaaataaataaataaaaagaaggaaagataaagaataaaaataaaaaagcagaagaactgtacgcgattggttgagatattggtatgaggatgtctgatattttggtgttgttcaacttattaagtcggaacaagcttgaaggtctttgagagagtggttggagaaggaagatgaaaattagccattaagaaccaaggcgcatgatgcatagagtcgtatgtaggatacgtacaacagcactataggtgtcggccgtatatcttgaagagaatttggattgattgccaacaagaaaaattgcctttgatttattgccgaccataccgagcatgctaataacggctgtatagcgaaggtttcaacagacacggatgtctgttcagtcacctcaattctttaagagaggaaaaggagagagaaagaacgtacatccatcaggattgacccaccgagtggtaagcgagctcgacgaagaggtgtatgtccaaatcgaggtctccacctgtagagatctccctgtggcagtattacagttattgctggcatactctgggccggaattggcggaagctgtgtgagaacaaaaaggaaagaacaaaggttgagcgacctagttgattctatctccatcttaaagtgctaaagagatcgatctgtgaacttactggaagcagacgcggtcaacgcaaggtaacttgagatcggttgggaggagagatggttgacgtcaggacacttgagattgtctctttagattcgtaagggataagaggaaggaaaactaacttgtagctatctgcagacatcacactgctaggactgtttggaccaacgattgctcctacgtttttatttccagaattggcaaacgcgaggttcccaggggatgaagatctgtagaaatcgtgaagaatggggacgaaatcagtgaacatggcgaacttaagacttctatgaaactttgtgacagagccaaagacatacggaacagagaccttgagggcatcgctcgcagactgggtgtagatgtagaaggtcgatgctaacgtgataatttttttccggaagagatttacggatatttaggcatgtttaaaactctcaaaaagtccaagagagaaggtgaagactcaccagcgttactgtcatcgacagctagatatccccgaacatcgccttgagagtcgatgatctggacatgatacccacaattgatcggtgcaccagaaacttgagcatctagaccaaaacaaatgagagaacgaaagaacgttgtcagtgaactcgattgcagaaacagcgctcagaatcaggatcaacttactcgatggcttggaccgtttcattcttgacggcctctcgatcaactgctgtttggaaaatactgaggacggttcgttatcgacgtgccacctgggcactcggatctcactatgtcgcttatcaatcgatgtcatctggccggccagattaccgaggccatcgagtggatcaaacgggaaaagcgagtccacactgtcaatgtcttctaccgatctggtcatgatcgacgtgaactttgttgtcaccgtgggcgcggcatcggaaaatctagtgaggagggatagtgcagtggcagcaaggatgaaaacggatcgcatcgttgagaaagaagcgcgcaggaggagaggaatattagaaagtaagaagatggatgaaaaggttggagggtatggggattgcgccaggcgaaggaacgaagtaggagtagagaaggagaaggatgagacaggtctagattagatgaagagcacgaggggatatcattctatgtgacgatgcctaccctcttttatatccatccaggtgtttaggatggctggtcgggtgaggtattgaagagttcgagccagttccggattgagacgagctttacgaagaagtaaagaaggagagtgagctagaggaacttagagaaaagagacgaggggcaacagaccacgttagcagagcaagggtgtgaattcaaaacttaatcaaccagccgagcgaccagccaacctcaatcgaccggccgtcacaagtaggttgtgagttcgcctatagtaaacaaagggacaacagaacagagagaagaggaagaggacgaaactttacattccagaagcggtattgtactcgaggatcggagacttgggcacacctcgagaagaaaaacaagaaaagaaagtaaataaactttcagacgaggaaagcccccgcaggagaggccagatcatgctcggaaagtaaactaccagtcagttggctagccatcaaccaggatcgggagtaaggtcgagatcagaagcgaaaaagagaggaaagatttgtagaaggtaagtaaatatcagcccagtttcagtcaacaaaattaaacgatggatcgaactccaggatagctgattgaggaggtaataagggcggaaagagagagaaagctccatctctcaaagcccgaagggtccttgctccgtatacactcataccccaatccgatatgctctctcggatgggacgaaggaaagaagtaagatgatgaaatagagaatcccgcgcctctatttactcttcgggaagcgcgttctcgactttttttcttctcgtggagattaaacgaaataaacaaatccacgaggctggcgctagctagactgcatttcctttgccacgagccacggccatgctcaccacgtgagtgtagaggccgagtgattcggcattcaaatgaatgagagtccgccccggactcgctattcctaaggagagagtagatcaacaactcaactagcccgttcaccctcaagccctgtctgctcacaacctctccttaccatatcagtcaaatccataaacaagacagtcccgtcaacagtgtcaacaattgtactgtgttcgatatccaaatactcatcttttaatcttcctttctcggtctcgctctgccttttgcgcttccttctgttaccctgcttgggtttcattgaaatcgtcacctttgtttacatcgaaaaagcatcattctggcaccatcatgttcactgctgttctcaatcgtcttgcaacacaatggacggcttcctttctctcctgttattcggcatcacttcgcttccctctcgcccccttgctcgtctcgatcaagcaacttttttcctatttctggtgtcgactcttgctcgcctcatgcaccagaccaaatagagtcccgaaagggtcccgagaaggccctttctttggctaggtgaacagatttaggctgagcgaaaagatcaagacgggacggcatatcactttcagaccccgttcgatcgccgcctatagagctcgacagatattatcagacagaaaagaagaaagaaaaaggatagcattccagatggaatggtctaactgtctgagacggaagtaagatagaaccaagtaagatatgtgatgaggaagaatattaaaggagtattgggcaggcgttgacagtgataattcaagttagcgcactgaagtgttcaggaacgactgaacatcatcgtctttcgcgacaattcatccagggtcatagagggaggatatcgggtgaaatctccatcactgtacgtttcgtcttgttatgttcccgaagtgccacaaaacgacatgcaatacagagaaggagagagaagatggaaaatagaaaaagacaaacaaatatttagcgtcaaagagtgatggatctacgttggctggctgtgtgtgtgtaaacatgatcagaaggaaagatttcaagatgatcagcaacatatcagggctctctttcagatttacaaccccagaaattgatagacatgatgattttaccatggcttccaaaacataagatcaaagctagctcaagacacactcagatctgctatatgcacagcttatataacaagaaggaaagaacgcgaaagtagtctctctacccgatactatctatcctctttaacatctggttggaagatacggacagaagaatgggttggattgaggccagatgagaaaagaagaacgtcagagtgcagcagagacgatcagtagacgaatgggtgcggattcgagacgtgaaccgactagccaaccgaccgaccagccatcatgggtttccagcattcttgagataggagaaaggaagaggacataacattgcaatccagaagctgagaaatctaaatgaacaagtcgaataatgaaggatgtatccttgtttctattagaaaatatgagaggcatatcaggggactgttcacatgcggaaatattcacagaatttgatgtttcatatctattcttcgaggaacactgttttgctgaatcaagatacgggggatcggctatatatgtagtggtcatatacaatctagttagagtataccgaggaacgagcttgtgtagtttcaacgtatcagatgaaaacgcttccattgttcgtttgttctgtgagtttccagcaataaggtaggagagattgctatgatgatatctctgtagcggtgtacgcgtgtgtttctacaagagttagaaaatgttcctccaagacaacaaggtcactgtttgagctgcagtttgaacagcagatatcacgtctcgcacgttgacgcggcttaagggaaagacggaaacaaataaacaaagatcgagccacatgatcatagcggtcgagtgatcgatgacttccgcaaggagaggtaaacaagtaaagctcagtcgccgttcaagctctctacttggattttgatcttaccttacctttccagtctgtctgtgtctcgtccttgcatgcctcgtctagtccaaattatcaacatctatgtttacctcgaagagtgactacgattcaacactctgtcacttctgaagacgacggcctttcgtttgtttgtttgtttttctaaataaaaaaaaatgcatcactctgctttccttcgcttattttcttctttgatctctgtcaagcaaccatctccggacctcggtgttttatatatgttcgttgctgtcttgtttctcacagcacagatcaagccagatccctcgtagagtgctgttcatagtctgacgaggcaaaaagaagaatctacgccggttgataaaccatgtcgtctatctaaatctgatcaatagaaccataaaatggaaactcctgtaaaggctgatacaccaaataggccaagaattagaaatagagagaaagaaaaaagggccaaaaattaagggtctaaacaaatatgtaagcagattgtggaagattgaacgacaaaagcaaactggagaagcactcttgagtgaggaagagaagtgtccaaaccaggacccaagagcggaagggaataaaacaaagataaaatgaagaagattgaactatatgacgaagaaaaccaatgagaggaaatagaagtatgcaagtggaacgaaac

SEQ ID NO: 344 - DNA, 8954 bp, Xanthophyllomyces dendrorhous
  misc_feature (7430)..(7439): n is a, c, g, or t
cgatacagcaggagacagcaagagacaaagagagacagagacgcagagagaaaggagaaaaagagaaggagaggaaagaggggaaaatctaaatgccggataacccataggaaaatgagaaggaaaccttggaacagagctgagcttatcggatcaacgtaagcttgaaggtgacagcagtgtaggtgtccccgttgaacttcttggcaaatgcgcttcggtcgccgataaggaagacattttggtaggtgttaccgatcgcaccgagcatggtgaacgtcgacgagtcagggttaacccagacggcgttgagcgcaccggtcgatgggctgtactgccagacggcagtctctaccttctgggtcttgccgttcgcggtgttgtagtcgttggtggaggtggcagggacggagccggcggcagtggcaacggcaccggtgagcgggcagtagttgtacgagccagtgcccatggtgttggaggcagcgttgggaccaacgaaagcagcgacgttgttgttaccagaggcagcaaagacaagattgctagaagaggaggacgaggggagggcgacggccacagcaccggttgtcgaggtagtgtaagtccaatagtctagggagaaattcagaaaagatagaacgatagttcaggggtcagtcatttggtaaaagggtttgaagtgaaagaaataactcactggctttactgcttgaaggagcgacgtaaccgaagacagaaccatcagtgttgaggatctgaatgttgtagttgtacaaagtagctgtggtggaagctcgggcagccaggttcttggtcttctttatcctagtaggctcctcgatgagctgacgcttggagaacatagcagaaggctcattctcgatgtatcgtctgggcatctggacctttcgatcggtcgactgaagggtgggcgcggcagtagaaaggccggcaaagagagagagagcggcggtagcaaggaaaagaacggatcgcatagttgcaataagagttgagagtgtgttgtttttgaagttttgaagagagttaaaggcttgaaggagatagagcaggacgagaagcgagcaagatatcagaagaatacgatagccgagcaaacagcaattgacgcgatgggagagggcgagttggtagagggattggtttgaacggcgcaggtgttaggacgggaggaagaataacgggggagggatgggcagatagagaaggaaagccgtagaaaccagaaggaacgaggaaagagaaaaagatgcgtgaagactttcttgcatcggacggacgatacacatcctactttatagtctgccaagaatgaaagatgaataaggttttcgaacggtgtgcttatccagtgtgtgcgaatcgagagagagaacgggagatataaggtaaggtaagtgcagtggatttgatatctacagcaaggttagacataccttgttgtaacgacggcccaggctggtcgataggaagaaagttcggaactgaatgaacatttatctctatgatgtctcactttggagatagatccggaagatgatgtgcatcagtgtgtatgcagcccatgcggtcagtgcggttagtgcgttctacgcatgtatgtgagcggctgtgtactttgattaatgatatgatgaccgaggatagagttcgctaaggatccaagcgtgttcagtcgggtaattcgatggctctggtttcatgacattgtttattcatatgggttttgatgttatttccctcatatgtttctcctacagccaaagctgtttatgatcttcatttgtcgattcataaggctagccgaaaccatttctggtgaataatacgtgcgcagtcactcatacattcatgacgcagtttttgattatcatcctctcttcgtacgccttagcaaggggtaggacatcaactgagagaactagtgacgatcgagttcgttcggaagccgagaggccactaggagaatgagaggaaaagaaagaaaaagaaaaagaaaaagaaaaagaaaaagagatgggaaagtaaacatacgatatgtacagtcgagaatgtaaacaagaacgaggaagaaaaggcaggaataacgttgtattcactcataaaagattcgaacagaagttggttttcgtagctctggagacccccgttgtgtaacttgtctcgcgttctctaggtgtcattcaggcaagatcgcacaagaagatcacgaaagaagaaagaggagaatgataagaagaaagacatttgatatttcgggaaggtgagattagtctctattggctgtgtgtgctcagacatgatttgttgtcagcaaagcagaagtgctggaacaatcaacaaagcggaacatcagatggtgtctcctatgttccccttctttagttgttctatatttcggaagatgtaggtttgctcaggcacagtatagcattcgaggcgagcgtatccaagtcatattcgagtgatatccgaacttgtcatatacataggtttatcatgaacgaatgcaaaactctggtaatctcatatcgcagctgtcagggatgtgacctgagtgttgcatgtttatagtctacggctcaaagatcctctgccacaacttctagtcgttttgctagtatgtagtcttacaacgcatttgttcctatcacatcctgtaatcccttcttgcgtggatttcttccgcgcagtatatctctatggcatgtcgcctgattacagaatctctgggatctgatgagcacatataacacgaccttccttttccatccacagcatagcctctcaagcctgaactcttccctaattccctctttgtttactttccccggtcatccttgttctcagtctctgttattgatatctatccttgcgtctcatcagtagcgtatccatcctgttctcttgcgtcagtgttctcatcagacccagccaaaagtctggacttttacttctgtgctcatctctctacctgtttaacattcttgcaattcctaccaccagccgagttctgcggtccctgacagcgtgttagaatccagggttcgggtggcaacggcgggattgcgaaagtcgtaaccagacggaactgcagctgttaaggaggaatttcaggctcctttgctgaagcggttgtgaagaaggcgcaaggcggagagaatgaaagaacaagattggtatggatcgaaaatataagtatacaagggataacgaagcattcaggcttgagagactgtgctatgagtggtaaaggaagtccgtcctatatgtcatcctcatatcacagcggttatgcataagaaggtatggcatacaaggtgctagaagcatctacgctggaggtctatacacttgcaggttaatgcctttgtatgagcaggagaaatgaaggagctgaagaggcgcaacagtcgaagattacaaggttgtaacattcaggtcatgtccctgacagcgatcatcagaaagccacgtgaccatgatgttagggttagacactgtttaatgagctagaaaccccaacattctaaacacacaattcctcatcaaacatacgacaccacttgaagtgacattcttcctcctcaaaagatggactcgcagcttgttcaaacgctttctgatacactctcctccgatggatcaataagacacgctgctgaagaggctctacagcgagcgatggacaaccaaggttggtcttaatcaaatcgttcttgatccttcccctcttcaacggatcaagtttctcgctcctctttcacgaggaaagaggagcgatctctcttgtaatcagtagccaagacccttgggttgacaccgcatctctgatctctaattcgtgcttctagatatggggattgctctcactcagattatcttgactgaagacgttgacctaagtgttcgtcagacggctggagtaatgctcaaaaagttcatggacaaatggtgggacgtccttagtgaggagaacagtttatccgtacaggcaagccatcattcgtctctgttcatgcgtttgaccgtatctgagccgttatgttgacctgccgcgtcatctgtgattgcatttctctatatatcttttcgctcttatgacagacaaagcaaacgatgcttcagtacttgctccagtcactttccctaccatcgtccaaacttcgaacgctcgccgggtactcactctctgtcgttctactcacctcaaacacgtcttcgctcgtacttccttcgctgctcaatctgttagccacaggatctcctgatcaggttcacggagctatgcgcgtatttagagagtctgttcgtaagggagagttggatctcggagaggttgttggagatggacttgaaggtagagaggccgacctcagagtgctcggagtcgtaaacgaactgagtccagtgttattgcaggtgcttggaaacgaagcaagtcctaggtttccttcattttggttcctctttggatttactttgggttgaccatctctgttctaatcgcgttttcctcttttcggaatttatttggcaaaccgttcttcttgatcttccgctcctatagactcactctccttcaactcgggcatcgacgatctctgtgtttagacaatgcctgttcacaattcacatgatgaaagaccagctcccacaagaatcaaacgagcttatcggcttggtaattcctccctggcttgaggctttcgtcgtcatcctcggtagagatgaacaatcactcgactcggccgatggctgggaacatttgggtatcaaaaaggaaatttacaaggcaagtcgggtgacccccttttttggcgcgcatatatccgctcaaattgactgtctgctgatcgtcgatgatgatttgctctctcatatagaccatcaacgctctacaccaaagtttccctcgctcaatctcttccgacctgatcatctcgcttctcccattaatttttagagatatgaagacactacttcctccattctaccgccatttcgtgtcgactacgtcggacgatgctgtgccgagctcgctcggagagaaggatgaggaaacaagaatcgaacaggtcgtctgtccgattttagatttgatgatcgcgctgactagagcaaacaagttgggatccacctgggtaggaatcggccggaagaagaaaggaaccaaggctgaagctggggaagggacggagaccgcagagttggagctcgtggtcgaggccgtcctcggattcactgctatgacgactgaggatgtgagtttatagttggcctcctcttcaaggccaaacattttgaggccaggactgactcaaacttgtttggctactttgatctttgtgaatttccgctccgggtcgattgcgcaaatcctactcacaggaagacagctgggctaatgatccaaatgcgttcgtcgcggatgatgacgatgagactgatttgtataacatgaggattgccggacacgactttgtttctgtaagtgtttttttttgtccttattcatagaaaatcccgagtctgatcgaatgctcgtttgtgttgacgcgtttgatagacgttactcgagaaatatcctcggccggtggcccgagtgttgcaaaaaaccgtccacgctcggatcgagtcttccaaagcgggccaaatttcaggagatccagactggtgagtatcaatctgatcatgctgtgaaatcaactaacatggacgtcatgcccgtattgattcacgctctttcgcacttcgattcttgtgtatacatcaaaggtggaaaggactggagtcctcgttagccttaatcggagggatatcagataacttgcttgacttgttagaagaggaagagacggtcggtggtcccaagagtttcgacctcggagccttgttcgatcaggtgatctccaggtgtttgggcgccagaggttcgtctccggtttcttttaccagtgcgctattaagaacaagtaagacacgctgattcctgctttgctgtcaaactacatatccagacgtacctttcttgcaaggtcgagcatttgtgatggctagtcagtacgcgactgcgctctcgtctaatctggcgactcagtatttggaggctgcggtccaagtgttggaaggtgaggggtctggtgtggccgttaagatctgtgctgtaaaaaccatcaaaaagtaaatgctttagtctttgtcttctgcaacggagaaagccatcgactgggtccttctggctgacttgtatatcttttcctcttggtgacagcttctgtcgacatatctcgacaaaagccgtgcagccgctgtcccaccgaatattaagtacgatcgtgccgctgatccttcaagcaggtgacgaggtccttgcgctcgtcttagaatctcttcgggcggtattgggtgtggacgagtctgcgctcgagccagggctgatgggccaattggtggatgtcctccttgaggtctgggctaaaaacgtcaagggtaagaatgtctcgatctgactgtctctccgcgtctgctttctctgtgttgatatctctttccctgctcttttctctaatctttttcgttcggctttcggtcattcagatccaatcatctcatcgacgtttgaggacttgtttgctcatctggcgtcgacaccatcgaccgccgcatatgccgcactcggcagtcattccatcccccgattatgcacgacaatctcttctgttaactatgccgatcctgactcgaccacgctcgccggagcggctgttgagctgttgtcgaatatcttccgaggccgaagagcagggttagatccagaaggcaaaggttggacgggtctggtggcaaacgcgatattcccttgtttgattcatggcgacgatatggagctcgtccaggtaggactcttttcttgttagaaatttcccttttggaagacgttagatacttacgaacacctgaggaacaaacacagaacggagtcgaagtgctgatcctgctgattaggaaggattgccaaacgatactctcctcgacggatccttcgaccggccagactggattggattctacctttgccgtcatcgctaggttgcttcgaccaggagagagcgagtcgaaagggttgttcctcggcgatctgttggtccatctctttaggaacgccgggcaggccgttggaccggtcttgcctgatttagtgagagccatagtggagaggctgcagaccgcggtgtacgctacgttccagcaggttcgtctggctagcttgccttctccttcccttttcttttcttcggaaatatgccaacgtcaaagtgaacggttctgatttgggtttgaggagatctccctcttctttccttttctttttcttcttcttttcttttcttttcttttcttgnnnnnnnnnngcgggacataacagagtttgatcatcccgttagcgtacttgatctatacatcgttcgacatgatcctacctatcctcgaatcttgcttgatatcgacaactagtgggcaaagttctggtctggcagtattactccgatcatggtgtgagaacgcagagacgttccatggctcatgggccatccgagtgagcaccctcggtctcggcgcgctcttagtcagtggaagggaaagcttgaagggcgtgaccgtcagaggggatatgattgtggacgagagaaatgccggaggtctgtctgtcacgcgttttcttcctcttcttgtctcaattgggacgttcatgagctgacgatggagagtgatcttgttcgattctgggttgcggattggaaaacgtgtagtaatcatgaccaggtctcgaacgaagaatagtaagtctctttttctttccctcttgaatgaacgatgttacttgtatatttagttttcctcctttgttcttgctttccatgatttcagatccaacgacatactcttcaattccgttcctactgaaagcgttgaaattgacggtatccgagttgaacacgaccaaggcaagcgcatcctacaacgctgcctgggaggtcggcggagaggaagatggagatgaggatgaagacgacgatggagaggatgacgggaactgggaggacgatggaccgggtttcatcaagcggggacccgcgccaacagacgagtttggcttcctctctggttcggatgttttttagtttcactttttcatgctcgttaagctttcttgagctgaacttgatggtgtcttacaacttggtctttcttgcttgccctactcggatagatatgatgggcccggatggactaatcgatgacgacgaaggagacagagaggacgaagatctcgcgaccgactctgtttctacgatcgatatgaatgttcgtccagaagggggtttctttttttttgtgctctgcaaggactgctgctgcatgggttgaaccgactgatgtttagtttcttttctttctttcttttctttctttctttctttcttgttactctccggtgtccgccggttgactgtaggcatatctggtcggcgccattcggagggcctacgaaggcttggatagctttggagcgctcgctggtggattgaatgagggtgagatgagctcgctcggcaacgtcttggcctgaaccggtcatgaatcaaatcggggttgtgcctgcgagttttcgatggggattggacaaaactagtatgaacataaaaccggggaggtcggcggtttggtgtgtatgagttaatttcgtagattaaagatgagatcgtatttattgagcgatctggaatgatcttattgagcacagaatacagaaaggagcgctagtttgtgctgtcgtcattttctgttacaatccgtgtctttgtaaccatcactcaacaaagattgacaacaaaacaggaaagaaaaaaaaaagaaaagaaaaa

SEQ ID NO: 345 - DNA, 903 bp, Xanthophyllomyces dendrorhous
aaaaaaaaagaaaagaaaaaggagatatacatatttaaaaacaaaaatagaatcgaatcagatgaagaacgaaacgaacaatactaccatccagaaaacagatggttacccaagtaggactttatcgtggtcgatgtgtttatagtaagaaggacaagaagacgctgaacgacaacccactgaggccggagcggatgattgtatcacatgagccagctggcacacgcgcgtatcggcgcagcaggtgcacagacaactaaattttgtgactggaccgatatttcgttttccttcttactttttttttaatacgcgggcgcttgtttcactcttcacgaccatttctctcgcctgcccagcaatcttcccgctttcacccactcggagattctcttccttctgtcgttcgcctgtggtcgactgccccattgtgtgcacagtgggcgctccttttgaacgaaggatcttgatattcaactgatcggccggcctggtcccctctcactttcatctgttctttcattcgtgattgaatcctgatcctaattctgtaatgttaccgctgctaaccgcttatccgctcacggtggcgatatattcatcgaggcttctgttggtgtgagataccgatactcggtcgagaggattgatccatgatgtcggaatccaatccgaatgctggggaatggttcctgtgcgggagagtgcctccgtgttacacgcgtccaacacgctctagggttgaattacccacgctgtcccttctgctgctgcttcttcctctgggccaatcctggtggcaagatctcggccaactctgggttttcttgttgtgttctcgtctcattcatttgcctttgcctttggcatctttttctttttctttttctttttctttttctt

SEQ ID NO: 346 - DNA, 24431 bp, Xanthophyllomyces dendrorhous
attttattttattattttgcattttacacaaacaaatacagagtgcggggagattataacgaaggaggaagagaattcaaacaatcaaaaaaaatataaaaggtgcgaagaagtggagaaggtcaatctggaggaaaggagaaaggagggaacgacgctggagaacgttgtcagtcgacgggcgttcaaggtgagggggaggggggggatgagtggctaggaaaggacaagccaaaagggtaaaagagcagggaaaagagaagagaagagaaaagcagaaaactatataggaaaagggggttgagattagaacagaatgaggaagaacacgaggagagaggtagtggaggtaaagctatttgacacgcttacgggttctctatccgatccagtggctgatcaaaacgcgaccatcgagttgaactacctcgccttcctcaccttttctgccttcttcccctaaattatctaatttatcttatttcccttctttgctctctcgctcgtcgagtcgtacgaaaatctaacgatcctatttcctttcgaaagaacgcccgccagcccgcccgaggctgatcagcgattttttttcctttcttttttcttcttcttcctgagcccactttatatttttaatctcttttcctcgcctctctgtctgtttcttgctgttcttcttcgccgctacagcaaagaattagaccactcccatttcatgaaggggggtttcattcaacgacaacccgttgtcctccatcccaccctttccctctccgtcgcgttcgtccaagagatcgtgctgctgccagcgtggtttcaaagcacatagaccgtcgtctcttcctccttccccttttcatcctctctctcgcttccactttctctccttccatcaatcctctgctcttgcttctgcctctgtttctctcttcttctcttcctcctttgacagtctcgacaggacacatcacgtttgtctgctctctttccctcccttcaccactagtggtcccaacggatgctttcatatacaaaaaactaaagacacctctgtcgacgtcaacttcagccatccattttttcttttaataaaacaaacaaacaaacaaacacagcctacacgtacttacggagataactcgtccgacaggctttcgacccacagaagagctagaagttttggcgcgtccatcaaaaccccgatctttcaactttctatatctctccctctcctctcttccttggggacaggtcctctacggaaacctattcccgaaaacatgagttcttgccggacgattgctagtaccggaggtggtcaaccaggagttccttcgctgtcgaactcgttcaccgcagcgacatcctccagaaaagtcttgagctttgatggttgtgtcacttgcagattgaggaagaaggttagtctctcctctctctctctctctctctctctctctctttctctccttcttcttctttttctccttctccggatcggaaagaggagacgaaaaaaagaagagtgccccgtctttatgcttttccttacaagggaaacagaacgtccagccctgaagccatcccttttctttctttctctctcctgatatcgttctctgtctttcattctcatggtccttgccggtctgtgtaagaaatgcgacatgggtaagatctgcatcgtttttctttactctttcattcccgttctgaagcgctaattaggttctcttcttttcttttccttctcagcgacatcggtttgtgaagtatgtgatcgatgttcttgtatatcccgatgatgccgatcttatccttttgatcttactgattccaactttcgggttcttcttctcttctcttcccatttctctttaataatctctctgcttaaactcataaaaccaaaatcaaacatttgtctcttgctacggaactaacggatgaaaataataatatttgcggtatgaaggcatgcagacgattgaacctagaatgtattccgccttccaagaaacggccggcgtttctgaaatcaccatccgtcgtcgctcagatcaggtccgatctcaaggtctttctcggttcccaaggaaaattagccaacatgcggaaagttgggtcttcactcggctcttccgaccaggggcaaacagctcaatggccaacagaagaccatccaccaccatcgtcaccgccaatgttcaggttcgatcgatacagggatgcactagatggcgagagcaaaaaggacgaatccgagccgtctagatcgcctcccaaaatccctactgtgccgctgtcgtcgtcgtcgtcgtcgtcatcatccatcgcggggtctagaccggcgacgacgtcaacaaagggcaaggctagggatctctggcagaacacagggacgatggatggtattgggaaaggcaaaggcagaggcagaggtaaaagagaaggagaaggagaaggagaaggagaagcagaagcagaagggatagaaagagaaagatcaatggtcgaggcaccacgaatggatccatccggttcctggtggccatcttccccatcgttgtccacccagtcttcttccggctcgcttcaagttaaccagcctcacgtccaaccccgttcaaactctcgtcctgaacatcattcccactctctctctctcaacaatgtgagagatccaggcttggccgggttttctggtaggacattcgatccaacgacttcatcctcgtcctcgtcttcagcttcagccccgttattctcttatgcaccttcctcactccagtcgatgaactctcaatactctcctcgtccagtcagaccggcttcacaaccgatgacgctgatcgaacgtaccgccagaacgccctctaggtttccttaccatcaacctgcatatggtcgtccccaaccggttaccaatcccggccctcatcccggccctcctcatcatcctcctcctcctcctcatcttcatccacatccacaaggttcctcattcgactatcagtctgcccctccaaacgtctaccagcaggtgccctatcctcccgcaccggaccatgtcttgtcgacataccccttatccatgttcgattatcgtcagaatgagcaatcagtttggcgaccagcagtaaacagatctcagccggccagatggacagctcaggacatgcacggaggagcaggaggtggtgctgggtcatcaggatttcatctatcatccggttacagtccctctgcggaagatacatcttcttcgcaaacaacgacgacggcgatgacaccagtggtaccggtcactggaccaaatggtatggataccagtcgacgacaatcttccaattcttactggcctaccgggtaggtcttgcgcctctatctttactttcctgttcttgaatgtaatcctgacccagagagttttccctcctctctttctctcttgttttcttcatgcattcatgttcttattgatacgtcgcgcgcgtcttcatcatgcatcaaagatttgatccatcaatgatctatcaattcaaccctccttcaaacccaggtccttaccgacctgtgaccaacgatagctcatacaattggattcaagatcctaccattccgatcgacttgacggcttcttccaactcggataccgctctaccggcaacggtcgaaggaacatactcgaataggccggcgactacgtcttccatgccaatgatgccatcttccgtgccgacgtcagctcaagtgcaagcgcaagcacagctccagccgcaggttcagatgttctttccggatccttatctatacccttctccttctcctttccttcaacagcgacaacaacagcagcaacagcagcagcagcagcagcagcagcagcagcagcagcagcagcagcaacagcagcaacagcagcagcagcaacagcagcaacagcagcagatccgacgagaagcatcgatgtcggtaccaatgacaagtcggtctttccaatcttcatcccagactaacacccagcaaacgaatccagagccaggtcaaggtcaaggtcaaggtcaaggccagatcgagtctaatcagagatccgtcctcgtagatcacgagatcccggaaggccagccaaacggattgatagacccttctttagtgagaggagcagcaaacagactttcacgaggcaaggaaggcggtgtagggcatatagagatagacgacgagagaacgggtcattaaccttgttccatgaggtgttgccagttggtttcatccgcctctttgttttctcctctcttttctcctctcttttctttcttcttcgcatttaaaaaatgacgtggtagacctttctctttaggaattgtcgtgctccgtataactcgattatcaaacccgatcatacaccatcatcttctcttgcctttccgccatatcttgcatatacgttttgcattctcttggtctatcctaccccttctctttctttcttgcttcctttctctatttcttgttatgttcaactttgcgactgcctacttccattggtttgcttgggttcatctgtttgtttgttgtcctataatctgttgcgtccctccttttgcccgtccatctaaagtgtaaacaaaataatatttttgctccccccccggaatgtatctgatcgattccaaaacaaatgaactatacctgtaaagtttaggccgagagttccttgcacgattagatgaactcaactttggcgtttaatctcgcgcggttcccggcatcaaaggaagaaacgaccatccgatattcattcttttccttttttgttgaaataacaaccctttctttgaaattaccatacagaaggcaacgtcattcctttccccccttcttctctccccaccatcacttgttccctcttcttctcttccgggaactcaatgaccgacgaatcgaccgagctttctcgcttccgcccgcacgctctcatcccaatgtttctccaaaagtccgatctcgaagaaacttccagcgaacgtgtttgccatctgagggtcatccacatcccctctccagacgccatcagccgttcggtcttcggacgccaatagagcttctacctttggctctctcaccatgagagcgacgacaaacttgatggcccgaagggcagaaccaggcgggaaataaagagaggctgacaaaagtcgtttggcaaaggcggcagctcgccaaggaggggagatcgaatgtgaggcgaagggtgaaaaaaagatgaggtcgagagcgcggaagaacagatcggatgaagcggccagttgagatttcttgtgggccaccctggcggtcgatgggttgtattcagtcgtctgtgagggtgaatcttcgatccgggggtcaaaggcgatgagcgggatcagtccgtacagattcgtcataaagtcgctcagatcaatgttgagagcttctccctggccactgagcagctcgaaagcggtcacagtggccaacagtctgagcctggtcttgtcgcctccgacccggagagaacttccttccgggttggtctcctcatcttcatccgccaactcgtccatctcgtcgagtttgtctcctttgatgagctcccgaagaaccttgagaagatctctgaaaaagtcaacgttgacgagatgagcgaatcgggcgagtccttcaagcgcagcaggcaacaaaggcgtccgtttggtttgtttcaggatcgagaagtataggacaaagagatgttgtaacgtctcggtttgctatttaaataccgaatgcaaaatttagcacaattgtgttcaagacaagcatctaagagtaggaaggaagaaagaaagaaaagaaaaagaaagacccacgtttcgaccggcctcctcctcatccacctcggcctcggcctcttccatatccctctcaatctctttgcgctccctcatgtccttccgcatcttcttcgttctccactctctcttcttgtccgcccattcaccagtctgcagcttttcctttcccttattgacaccctttcccctttcggccttcttccgccagtctcgatctttatcccaccgtctctttggtttaccccgatcgtcctttgacatagccgcccggactttgacgtgccataggcaggaaagaacgttcgggtgaacggcgaacttgcgctctttgatcattcgggcgagcagtcggacaagcggaagcgagtgggtcgaagacagatctgattggaagattgacgtgatcgctcggaggcatacgtcagagtcctaaggagttgatcatcagatggaaacacaggtagtgattggattccagtcagagaagaaaaaaaaggcagattcagaggatagaacatgcaaggaaaagaagaaaaaaaagacaggaagcgtacgcacagaatcccaagattttcgactgagtcgaccaactatgacggccatgatgttatccctaaagttgaagtgggtcacgcttgacagaagatcacacatgcacttgatacccaagctagccaaaggtgacttgtctacgttttcgtgcgaaacaaaagcaggtaaagaggaacttgatgagtcgcggttacggagagaacgagataaagaaaagatggcgaacagacccttaatctctttctccagcatcttgaggtaagcggcgtaggcacgaacaaggccagcctcaccatctcgctgccttcgaacttcttctcggaccttttcagcttgctcgagctcggtcaactctcgaattctagagtaaacacaaaaagatcccagctgattagacagattgttgagatttgccaggcgcagaacagggagaaacaacgaacctgtaacccgggatgatatctttaaacacagccatcatggacacgatggccagtgctcggacactcattgggttaggaattcggggaagttcggggttgggattcggaacggtaggtaaaccgaatgcggatagacgagtgatcaatgggatctttggagtaaaaaagaaagggaaacaaaacgaagagcagccgtgttaagaatgtcactcctacgaaaccatactcttctcgatgaagacgaacgcgacagcacttacgttatccaataattcgccccctcctacgatctccgctccaagactggcgatctgctccttgactgctcgctttctctctgccgaatttttgattcggaccgcatcagccaccgccattctaccccacctctgacccaaaccaagcccctctcctcgctgttcctcttcttcctgctcctcctcatcagaagagacgtcctctttcgcaacctctttcggaggcagtaccgtcattcctggcctcgcttgaatttctccaccaggcaatttgataggcaaccttcgcacctttgctcctcgcgtcgggtcatcctctccagaatcagaagaatctgatccacgtcgggttcggtggaatgatcgaggctgatcatcataagcctcttcttctggctgagcatgtcgctttcgcttgttgggctgcgaaggtcctggctgagagggaaggaaaggacgagaatcttccaaatcggaagcatccagcaggtcgtctgagtcttcttcatcttcttcctcttcgccttcagagtcgtccggagcggaatcttccaggtcagacacgtcggagccgtccaaatcagagtttaggtcggaatcgagctcgacgtcagacatggtcgaagagatatcggaagattcaatatctgaaagatcagccatcgacggcgagtttcctcgttgtcgtttttgtttaggaagcggattttgagttttgtcaattttgtgaagtcgttcggtctcctgaagtgtcctgtatagcggaagaaggaaagttgtgtcaaaacaaagaaaaaggaaaaaataaacagaccgagcaacaagtgccagtaggcatagacacaccttccgattctagacttgtcgatatccatcaaaaatcctgcgccttggttgtccttaaaaaatgccagcgtttcctcatccagtccgtcggcactgtctccatccgaatccgagttggcatccccgtacgggtctggatcctggtcggggatggcgattgtctttctgtcttgagccttgatcttctttgtggtgggatttttggggggagcaggcttaatcgactcggatttaagtgttcccttaggagcagcctgatcgagagaaagcaagtacagacaaagagaacgaaggctaacgtgagcacgcaagaacacactagtcgacaaaggcaacacctcataatcttaccgaagaagacaaaacaggcttcttggatttcccttttgccttgttggcgatcttggtctgcttccctgctttcagcttgaccatgatgtgcttcggacgtgtgtatgtgctgagcgaagcgagagaaatggacgtaaaggttcgggggaatcgctgggtcaaggtggattttgagaattacctgttcgaaattcctccagccaggcggtgtcttgagaaaagctatgtaagatacgccacacagccaaaacattcatctcatattgaccgccaaacacgtgactctgcctggacgtccttcaccgctctaatatcaccactcctctctactctatcccacggccagatcagatcacacaatggacgaccgaggcgcgatgagagacaatctgagggggactcttccttctcagggatctgtagacacagccgaaggaggaccgacaagtaagaagcagaaggagaacgcagagaggcggaagcttcgagtcgagtttagagagctgatcgatcggacgaatggtcagtgagcatagtgtgtttctatgggaatgactcgatggacattgacaaatgtaatcctttgttgcctcacatcgcagctgatagagtaaatcttacgaacctcacgtctgccgacctcaaaaagtcaatcttggagcaagagaaactattttctagaggtatgttggagtgtgttctcttctttcctcgggctcggtcaggctgatcagaagcaatctctctttttagtccaacggcctcaggaagctgctttggacgcgaaagcgtttatcacgacctccacatctgctgcccataaggctcggcagatgaaagtggaccaaaacgcgtttgatactaatgagttcatcattcggtccgtctcacgcgtctttctttggctagatcaggccagacctttactcatatgtcttattcttcaaattggaaagtctcaagtccaagcttggccagaaaagaacagcaagtgcagcgataggtgaagatgaggatgatgagatagatgagattggaggagggtttgggaattgggagcatataggctggatgggagcacgcttctccaaaagggtctgtctgacagattttctgtgagtagcctgtccaaatgccttttatacctatatgctgaagcgactgaccagtacatatgtgtgaactgacccggtcgcagactgggacctttgtcagttgagcaaaagacacgatcaatcgttaggcgagcgaagcttaacatccgggctgaagacaaagcggcgccaataaacgtcaattcggacagggtacccaaggacgccaatgagacgagtataatgacgcttcaggtgcgtttgctcgttcatcaaatggcacaaggcatcaagataccaaatgaagagttagttatctttattaacatctgttgttttttcttccttctttctcccaactcaggtggaagacttgctggctgaggctacaggagaaaacgggggagaaggtgtcaactttttcgaatttatgtacgttgtatttctcttcctgttagcttcacatatgtattgtggatgaagcctttaataaatatgaggttacttcgcatggaatgtgacatatagcatcaaccctcactcattctctcaaacggtggaaaacatgtttcatctctcgttcgttattggtaaagggaaagctgcacgtaagtacacctattctttctttatccgagcttcgacctgtgtttcttactttcaattgctctcccgtcaaacacgtatatagtcgatatcatccctgagactggcatacttggcgtctctggatctgagccagcagatgatacagacgctcagcaaggagttagtaaacttcagatggtcatggagatggatatcgacacctggaaggtaagcatttgctttctttctttgttgccaagagttcgctagcatatattaatacagtagttccatcgcgtataataggaagcaatcgaagtattcgacatccgagaacctagatggatcccacaccgacaagaaaagtagctaccactcaatagtaaaccttttgcttacatattcctccttggttttacttcctgccgtcattccaagtttcctagtttggtatggatcgaatcgcccgtcttgttgtatactaccttctctctatattcactaattagccgttttaataggattctaggcgccttccttatatatataccttgtcgacagtacaaaaaaaaatgataccatctatctgttcctctgtgcgtgtgcgtttatgtgtgtgcgtgtatgtgtgtgcgtgtgtgggtgtatgtctgtatctgtgtctgtgtttgtgtttatcgagagtggacagaacagacactcccatccgccaagattccgcagtttcacctttcgcttgcttgccaaacgatctctcttgaattctctcctgctgttcttgctcatcaacaagccagccggtatatcttttgcatctttctctttctctccctcatccgtcgcctctctcactcaaggatgagtgaccaggatacaccggagacgtttacacatcccgtttccagccggctcggtcgatctccttatccaccaccaccaccaataccggcttcaccgtccagatctcgttcggctcttcctcaacccggagatgaagtgtatacctcctcacgatggaatgaaaacccggataaggaaaaagaaactgggagagacaaagagcgaaggtaagcatcgatctagtcctctttttttttgggacaaaactttcttgtgttgagcacgatttcttttctcccttctctttaccgttacccaataaggcctcgtgctacctatccgtccaacatgtctaattcccggttggccgtacctcatccacctacaccaccccctcaccgatcaacttcgtcccccaaaagatcatatgcgccttccaacaatagatcatcccaccatcctcagtcatcccagcctcactccttcgcgtcctcttctcgaagatatccccgggccgcagtctcaggaagtgactacgatcgtagtctacctgtaaaaaccttaacatcaacagcgaccagcacatcgattgatggcagccatcccgaatctctaaacatgtcccagggtacctcggtgactcttccatctgggttggcggctagcgtgacaaaacatgggacgaattccagtagcgggcggacgttgtttgacccaatgggtggtcgagccaatagctctagggaaccaggaccgactagatcaggcgcttccgttgggagctcaagcagacgaagtcatgaccgagcagctggatcttcgggatcgacacctataggtggatacggaaaccatgctttaccgaaccaaactatctcgatgagcccatcgggctctttcgcacctgggatgacaaatgtcggcagtagctctgagcaaccccggcagttgtttgatcctaggttgcatgatcctgttcggttcgctcagaggtcgagaaacggagcgccgagtgtgacatcaaactcgacagggacttcccacccctcggtttcgagcaaaacggcgagtacgactttgacatcgatccacgaaccttcgggcgatagagaaagagaacgaagaaaaagaagagagggtagcgaacgaaaagcaaaatcgagaaacggggacagagacgagaccaagagcagaagctcggaaggaagcgaaagtttaaaggacagacagaggggtaaaggagggttagtcgatctagattcttcgccttgaaaaaagtcagggttgcttcgagggctaatgtaactgaaggcgtgcatttacagagatactggtgtgctcggaactttacgggaacagtacaaagctatccaagctctcgagctcaatctccaagacatccatcgacgaatgggccgggatgaggttgtccttcttggctcaggtgttcaccttggagcaaagatgggtgatgaaggctgggtagagcttatatcccgacacatgaagtacatatctgttcattcatcctcatagtttgatgatggccacttacttacaactgaccattgtatcttccactagacttgcacacgcacatcatgattttttgacagcctcactcgacgcccggttacctgcatctctccactctctccctgtcaaatacaacattccagctcgactatggcaaaatagttttcatcttttgatcgaacgtatgcgaagcacctggctcgctccttcctcctcgacatctcgagatttggcgaccatctctgatacgctcgcctctgcttcgacatcatccgctcgcgcgctcgaacatctcacagactatatactagacgcttattcattctataccacccttctggacgagcaagtccttcaatcgttccggtccgcatggattgaggctctaggtgatctggcccgatatcgaatggcagtagccaacatggtcggttccacagctgcttcttccggcgctggcacaacttctgcgtcgagccgtctgggtgaggagtccgatcgaatggcccgaattgacgacgaagaggaagaagctcagatggttccatcaggaaacagtataggaaaagaggttgctgacgcgtgggacgtcgaggatagagaaacctggagaacgaccgcgagggactggtacgctctaggcgtaggagagaaaccaggagagggcaggttgcatcatcggttggcgttgctcagtcgagacgtcaaaggggaggaagagagagcgttatatcatttctcaaaaaggtctgtctctcattcgagtttgcctgtgacaataaagaataagctgactgacacacgatatcggttatacagtctaatcacaaacaatgatttcccagcatcgcgggagtcgatcctcccactcttcgacaccgctcttcagaacaaacgattccatccagatgccacggcttccgagctttttgtccttctacatgggatgatattcacaaagatccagctggacgacttcgacgatatctttgctcggttctttgagcggttagaagaggaccggctgggtactcgaccagtgccttctttggaatggcttatgatgggaatcatcaacctttctgcctgccttcagtatggcgcggaggatgggctgctccgacgagcagcagcggaagacatagttagaaaaggaggaaagggcgaagacagagaggggtcaacggtcatgccccatgcaattatggttcattccgggcaaggaaagcgtgaagggccccctgagggcgtaacagggccggaatctgacgaaggaagtgacgggcttaccaaggataacctcgatgccattagcagtgaaggcgaggttcgtcagttaggcacccatactgtctctgctgaggacgaagaaagtctgccgcttcccttccgacacgctctccggctgtcgttctcgatcctctcattttgtcttgtgcacccgattcgaaaagatagctcgctcaagtcgatcgtgaatccgtacattccgattttcctcacgttcctctcaacaatcgccaaacaacctctggcactggctctggtcgaacgagccgtcccttgggaagccctggtctctttcctaaactcgatcccccgaaaagttgaagtcaaacagactgtgcctccaaaattatctggaggaggtcccctgcccgaggattggtgtcttcgagggatggaatgggtcggccgtcgagtttatgagcgaggattttggaaacagaggtcgaattcacctaccataagagaccaaaacgatcgatggtcgactgccgtggaagggcctcgatcaggacaggtcgtccaaagtgaaatggacgtcctccagttcgaggtcgagtccctcacgatggtcgattcattccaagaagggattgtcgagggtgaaggcgatggagcggacgcgctcgatctgtcacttaagaggtggaggcggattgcatggtctttgggcgtgttcgtccgtcacgttcctgggctcgagtttgatcgttccgctttgtcttcattgtcgggtgcaacatcctcagttggctcaaacgtatcgcaggcgggccgcaaagtgagaatcattcctagaggagcgttgcagcgcaagttggaggcttgggcagaagaacgtaggatccaggccgagttggttcaggccagattggctagagaggaagaaacgaggcttgctgcttgggagggtagtggattcgatgaagaggaagatgaggaagagagtgatccggacgacgaggaggatccagagttgcgtgcattgaaggcatgtgacttcccccatgtgtataccgtcaccagtttaagttctaactttttgaaaaacaacttcttgtcttttggtttgactctacagactcagagacgacaacttcgagccattcttcaagagacccgacgaaatgtgaaacctcgacgaagccgcgtggccaattcccgagcccacgttcggtctggggctcatctttcccatcgatcgttcaaaacgaccgccgatcttccacctgttcttcctggctacaccgtcctcgtattcgacacaaacgtcttgctctcctctctcgccgtgtttgcaaccgtggttgaatccgccagatggacgacgatggttcctttaccggtgatcaccgagttggacggtctgacgaaacaacctcctccgctgggactacaggcaaacgaagcattggcttacgtcacgtcccatattcgttctcacgccagaactctcaaggtgcagacgtcaagaggaaactacttgtcggatttgacgatccggtcggaagacctgagtttctcattctccagcgatgccgggctcgatcgggctcgaaacatggacgatctgatccttcgcgcctgttcgttccaggaagagcattttgtagaccgaaccggcatactcggcgtcagcggaaacagacacagtaacgacatcaatgatgataacgacggtgaaggtactgccgatcgacaaacagaggaggcgagaaaggcatttgctgtcaaggtcgtactgatgacgttcgatcggaacctccggctgagagcgaaagctcaaggaattcaagcagtcgatgagaaatcgatgttgagaattctggggttgggtagaaacggaaaacctctggccgagccttaattgagccgacttgtgtgtggcttacgcaacggggtttcttctttcccaaaaaagaaaagaagattagacaaggcctgtttgatgatacataaaaagcagatccttcttcttcgaatgaagaacatattctgaaggaggggaagcaaggcttgaagttgcgcatacgtaacgttgtttagtttcgtatctcttctttccctttctttcctgaggaggaggagaacatcatgatttcggattctagagcacgttgctctgtagtcgtcgtcttccaaatctggatccaacatcaggcttcttcttcatttctgtttgctcgaggatgcaaatcaagcataatcggaaatcagaattaagaggcttccttatcattaccttcctttcttctttcagtgttttcttctcgttgttcagctttgtattcttttcgctctaatttgcattctttcatgattttttcccttctctttgatgttttcctcactttcatcatcttatctaccattaaccattaaccactagatgcaccccgatccattccgcttctcattcatttatctacacatccatccaatattttgcacaacctatactaactttcctcacggtcgcacatcttcttctggtttcaagtgcatcaaaactcaaccatcatcgatcctctccgaatctgatcaatcttatctgtctagattactcgttccaccttggttcgatcacatgtcaccacgttgtgttgcgttagctcgtggagttttggaaggtcatgagagcaagattaaaactgattgaacaagtcattgaaagtgaatggagaatagatgtattatcaagagaggtcttcgtgatagatcgttagtacaaaaatgaaagaagagggaaggcaaaaagggggtgtggggcaaagaggagaaagagaaggaaagagaaggaaagtaaagggagaacatgagagcaaagtcgaccgtttagtgcttcacaccagagctctgaatataggtttgaccttgtccaggtgcataagctgcttggtgggatccataaggagcgggtccaccgacagggacttgcccaggataggcatgagggcctggctggaagtgaccactggtggatgtgtggagaaagaagtgcaagaaagagaaaataatgtcagaagcaagagttttcaatgggggttgtggatgactaaactaactttccgacatagatgtagttatttttgccgtacttctcgttggcctgcgctttcttgtagacgatccagatggcatggatctaagtttgtgaaagaaccaacatggacagatgagtgcaaggtgagtctgaaggaataaatacgagcgggaaggataggtaagactgggagagcacgaaccacgccgggaatataagccaagaaggtaagaatgatgttgagtaggagatcacatccacagccgctggttgcgagaacagcctaagatgagaggaaataaactatgactagttagggttgatatgtttgtggtgatcgaccaggctggatagccttgccaagcttgatggcacatgaggacagccatactcacaccgggggctgttcagtcagaccattgaagagatgaagaggatcagcttcaatatatggtgatcgtaacgaagacaggtagaaggcggaaaagtcttacggaagaagatcgccagctaatttgaggttgattgtcattgttggatgagcaagggaaaagagtgaagagcgcgaggccaagagatgaacatgaaggaactacgtcagtcgggatattccaaggaaacgagcgaaagagccaagaggagagataggaagcgagctgggtgagacgtacaatgacgagtagaagatcagctccttccattatgtgagtgtgagtgagtgagtgggtgagtgaaatccaagtgagtgaggttcaagtgagtgaaggtttggatgagaaataaaattcgttagatggaggaacaggaacggcagtaggaacaggaacagcaatagggactagtacggtcgggtatagccgatggctacgccgctgttacggtgtaatcatccgtgtacgtcattcactcacactcaactagtcatgagccacgtggacgactcgatgacgttcgtcggtcggcacgctcgatcgccagtcaaactgagatcgtacgcgaccgatcggactgtacctgatgtgccctgaacgtcgtgcctgatccgggtgcctgttcctccagaggttctgtctgatcccttaaaagagcgaagaagctgaaggaggagtcgttctttccttcttcttaaccaatcaagatcgctgtaaatccattccatcccacccttcttcttctcttccatacccatctttgtattgcttgagattgtatccatcgtctgctttagctcttgttaattcatcttaatcaaacatcacacttacacacatcatggacactatcaagaacgctctttctaacggcgcatcggccggtgagtagttgccaccaccacaacttctttcatcgttatttgaacctctgatccttaagctaacctgcctggttctctctcttccctcagctgctgacactatcgacaacctcactaacgctaagcgcaaagatctggagaaggtcacgatcgactacagtggacaccctgggttgaccactgcgcagggtatcaagctcgaggttcgtctaaaagtcccctctttctgttttactgcggttgacctccacctccacttttttttctctcttcctcagaacactgataccgcgctcaaagccggcgtcagagggccgactctcatcgaagacttccacaacagagagaagattactgctttcgatcacgagagaatccccgagcgagcagttcacgcccgagtatgtctcgtttatgtttcctcaccatcccttatcctttctgatagtcttaccgacctccctttgttttacgtgaaaatctccacagggtgccggagcccatggtcacttcaaattacacactcccattcccgagttaaccaaggcggctgtcctgaatgacacctcgaggacgactcctatgtttgttagattctcaaccgtcgctggaagcagaggatctgccgactccgtccgagatgttcgaggatttgccaccagattttatactgatgaaggaaactgggacatcggtacgttctagtcaatcaatacggagctcagaatctataaactgacagccttacgtcacattgatatttttagtcggaaacaacattcctgtctttttcattcaggaggcgattcagttccctgatctcgttcatgccttgaagcccgagccacacaacgagattcctcaagcccagtctgcacatgacaatgcttgggattggatggggctgcagacccaggcgctccacatgaacatgtggcagctttcggatcgaacgattcctcgatctttccggatgatgcaaggtttcggtgtaaacacatacaccttcgtggccgaggacggcaagtctcgatttgtcaagttccactgggagcctaaacttgggtctcacggtctcgtttgggacgaggccctcaagctcgctgggcaggatccagattttcaccgacgagacctttacgacgctatcgaagccggggcatatccttcttgggagttgggagtccagataatcgagcaggagaatgagcacgactttgattttgacatccttgacgccaccaagatctggcctgaagagcaggttcccgtcaagtttattggaactatgaccctcaaccgaaataccgacgactactttgcagagaccgagcaggttgcctttatgactagcaatttggttcccggtatttcgttctcgaacgaccctcttcttcatggacgtaaccactcttacctcgacacccagatctctagactgggtattaacttccatcagtacccgatcaatcagcccgtatgccccgttatgtctcacatccgagatggaaaggcttcgcacaggattcacaggtcgaaggtcaactaccacccgtgagtcttgctactgttgttcattcgtttctcctgcgcggacttcttaagccttaatctcaatactaaactactgtcttgaatgtcatcaacagtaaccgattcgacactcctactcccgttcctgaggccaagggaggttacgttcacccccctgacgtcattgaggctggtcacaaagttcgagctcgaggtcccaagttccaggagcacgtcaagcaggctcagcttttcttcaactcgatgtcgcccatcgagaagaagcacatctgtcaggccgccgcgttcgagttgggcaagtgtgaggaagagcctgtgcagcagaagatgctcgagaatttgaacttggtcaaccgagaactcgccgaatttgtcgccggcgagctttgcttggagctcactgctcctcctcctcaggtcgacggccgaaagaccgactttgtgtcgatggtgactggtcgaaagaacacattcaccgctgaaggtcgaaaggtcggaatcttcatcatggacggctttgacgtcaaggcgctcaccgccatccagactgctattgttggtgccaaggccatggccatgcttgtcggtgagaagcagaagatcaaatcgacagacggaattcacaagtgccagttcactttcgacacctgtcgatctacccactttgatgccatcgtgattgtcggaggatcaggtgattaccagagcaagctcaacgttggccgactcaagcacgccgcgatcgaagcctacggtcatcagaaggcaatcctcgttcaaggccaggccgttccctgggtgaccgacgtctgtctgcccggtcagggtcttgccgtcagcggagatagcggcgtcacagacggtgttgtctttgcgcacaccgtgcctggacccaaggatatttctacgttcatcgatttgattgccaaccaccgagtttggtctcgaaacgttgactctgtcgctttctaaaaaaatcgaaaataggaaagaaaaagaatgaatagaataggagaatcgcctggttgaagttgtttcgcttttgctcttttccttttttgttttccccacggcccgttgctctcctttgggtcatgtaactttctaatcttatctaaacccaatgaggttgggacatgatatatatatgtacctgtatctataaaagccatatgccatgatcttgtatctcgaatcatttcttttttttttctttgtggatttcttcaagcttcaaaaatactcaatactttaacaagaaagaaaagagaaagaatgattagtgttcaactacaatgtacgtcctccctgacaaacattttagctttcagttctatcggtattgttttagatacgttcttctccccttgccttctcgcctcgtcgcgtaccagtcacccccgtagcatcactgcatacatctttcgttccactagaatctctgaactcagttctcaagactttgattttgagttgcagtcgtacagggcacgaacggtgcgtctttagaaaagattagaaggtgaaactcctcatgaatgtcagtcgagccagctcctttgaggttctgatcgtacgaaaagaaaaaagggaagaagatgaaacggacaacgtatcaaacccttccatacttgactccaagtcatgtaacctttggcggatgatatgtcgagatgatcaatgatatgatgaagtaaaaagaagaggggaggatcagagcgaaaagatccaaatgacctttctctggcatatttatcagtagtctgtctgtcggttgactattcagccggtcagtgaatcaacgaaccaacgggggaaagagatcagaaacaagaagcaatcagcaggtaagaaagttctcgtccatccgtgtcagttgatttcgtgcatgtcaacatgatagacaggttccaaagattgaagaaaagaaaaatgaagatcgagagtatatcttgctagaccgagactgggtcagttccaagatgcctgttgttcgtctgtttctttagaacgaccctatcctcgagttgaaaaagtttcttctcctccccactcagagcgcgtgtggtttgttctgtagccactctgcgatcagagatacgtgcacactggagcgacccaagaaagggaatgatttttttaagggggaaattattcttatttattttacgacaaagccgatgcatcaccggactgtctagctctctccgctctcctctcccttccactctccaaggcctccaatcgctctttctcgaccgactggatcttcgaccatcgggtctcgtcatccggcttgatctgtcgtttaacgaacgagtcgaatgcaaaccgtttcttgagggagattagaccgatcggccgggcgaggatctgatcagccggtcgggtttctgcaggtttcaagataccattaagaagggcggattatcagattcaacaaaaggaacatgttagcgtgaatgatgatagaaagaaattcaaagaggttgacaccctagcctgatgaaaagacaagacgagaaaaagggaaaggaacagaagacgaaccttctaatgggtcatggatcatgatatccgtctttccgattgtgatctgtccgaacggattattacatcgtaccagaacatcatacgtgacaaacattccgataaggaatcaatatgagtagaggaagaaggtgtgaaggagagcagacaaagagggatcaagaaatggatcagtcatttaggtttagcacgacacccctttccctgatccttctctctaacgtccaatgctcaacccaacacgagggcgatgaagaccatacggatatcctgaacacataccttgccggtcttctcgtgtttttgctcaaacagtcttgtcaaagtcctcgtcttgggcgatgcacccgtctttgagataatcccgaatatcgttcccgggttttcagccaatagtttgctgattcgttcaggtgacggccatagttttctcagaaccgaattgggaacgattagaggaggcatggcttctttctagttctgaagttgaaaggcgaacgtggggactgttaagctcgttgaagattggagaggagctggctttgatggacgtaagagaatgaaaggccagaggtcgatcctttggacttctctttagaaagctgtgtaagctaacgaactccttgtttctttcttccgtttctcctccactttgagtgctacaaacgtcttgacgctgaccggatctgcttgtgcttgtttcttaatgtctccatgggttctcatgttcttgttataatggcacgtctgttttgctcaagtggcaacagggtgatttgctcttatttactctgtcttcattttctcaagcctaaacgccattgcttcatcaatccaggacgaaaagattacgcatcgataatccccccgttcagtagctcaaagcaaacacttccaaagaaatcaaagggtaacttagatgttggaagggctgtggagaaggaaaaaaatcaacgaggttcatagtcagcaaaggacaaccaaatcgacagaatgagaaggacacatactaaagcatgatcctgcaggaagctccgaagagtcgagcgggaaggttgactcggaacttggccttgacggcaccagagtttccgtgggatcgggtcactcgtccccagctgtttgtgtcatcagaaaaaaattcaaaaaaacaaaaaaggggccaaaaaaacgccccccagcgagtggttggtaccaaggttttacagcagttggccaactcccagaggaagtaactattggacaaacataactcggatcttagatccgttgatctcccgctgagcacggtagacgtaggcaactcgctttgtatttggggggttagttttagtggaagggatttgggagatcgacgggattaagcacgcgtgatgcaaaggagagaagaagcgaaaagaaggaaaatgataaagctacaaaccttgccgaggtagaactgagcctcctccttagcggcaacaccctcgatctggagcaaactgtgaggacagggaaaaaaaaggcaaaagggtcaggaagggcttgggtaaagaaaggatcatccgtttgacagatatacatacgaggtgttgggtcgggagtttcgctttctgtgagtttgcaagaaagcaagagcaagaagaaaaagatagtctccagtcagtctccgatagcttgtccttcttcacacgaacccaccctcctctctctcttcctctcttgttccacaccgaccgccccctaaatttcatccagccaagagcgaacgaaccctcgcttgtgtccggtgattcgggccttggtgtaaagtcgagtggatcccatgattgctgatcttgaagttgacgaaggtgacgacggcttggagaggaagagaagaaagaaagagagcaagaaaaaaaaaagaaagaccagggaaattttcagggtccgtgcgcagcagtcacagcctcaggcgttacagtcacatctggcgtgtgcatggttacgtgagtccgcgcggaagtcacgtggcgtgttggtatcgttactacgaccggtgtgagaatctagatagctcgaccttcgacatcgtagtccattgtttaatccttgttctaggacgtcgtacttcttgatagtctctgaagaagacagaggaaggccatatttgtttacgcgcacgaatttgttgctggtgatctttcagttcgctcgcttgttctttgggacaagcatccataacgagatcccctatctagattgaaacaagtacaaaagacggactgtatgaaaagcaaaggtaatgacgtccgccacggggtgaagagagacaaaaccaaaaaaaaaaaaa

SEQ ID NO: 347 - DNA, 10088 bp, Xanthophyllomyces dendrorhous
acaaaaaaaaaaaagaaaagtagagataaagaggaaagaccctgttggaaagaagagaaaggatgaaagaaacacaagacgacgtatgtagatgcgcaaagagtgctgatgatggtaaccaagaaagataacggagaacacattaaaccactaagaccagccagacacacaaagaagaaaaatgtttgttcagcaagaaaagtcgaaatcgtcgcaaacaactgcagtataatgaaatataggaaactcacagaggatcgagttaatgcatccatcgttctccgggttgtttgttatctgagcatactttccccctgtgagattcatcagaaccgagacgcgtcagaaaatcgcccgcacgcacgatccatcactacctttcaagaagaagaaaaaacaagaaaggacgcacaaacaacctttccaccagtggtaaccaaaccgagctcagacacgttgacctcgatgatcgttcctttagtcatgactccaagctgggtatacatcggagactgagggttcttcttgacaccgagaatagcgagctggaaggtagccttcaagtcggggtgcgtcacgttggccttcttgtatcgaagagccataggtcggacgaatcgctccatcttcacgggctttcgagtgaaaccctcaccgacaaaggtagccttggataccattcgcttccactgcttggtcttggactttccggacttgagaaccttgaacatctcatcctccgcaattcctcggactgtaagttgtgagatgaggagatgaaaagtcgatcagaacctcgagcattctttccatctgcacatgtatgcgcgcacgcgtgcgttcgctccctctctatctctgtttccttactcacccttaggaagaggaaccgagtacttggcggccttgtcctttcgtcgctctttcacagcagatgacaacgatttggcgtcctagaaggattattcacgagacatcacaagccaaccaagaatcagacgataccaaaggttaagtaacgtaaatcgtgtctcctcttgatcaccactcgctactcgctactcccaaatgcctggaaatcagacgaatcagactaaccttctgaccctctcgatccaacaaataggtgggcaaagctccttccggcacagcaccctcgtccttctgcttgacgtttcgctcgtcgtgagccttgagcgtcttcttcatctggaccttctcagagtgtcgcttggcgtggtggagcttggccttcagaccgtgaagcttctgggtgtactgggacgacttgtggacttgacgagcctctctctttcgacttttttatttatttgttcatatcgaaggagggccagaaggaagatcgagagtatggaagaagaatgatgtataatcaagagaccaagaatgatgagccaaggttcgatgatgcgatagcttgattacaaaatactcacgttcgctcctcgtgctgtaaatcggtggaagacgagaatatcaagacgaatgaggacgcggatcagaaacacagagaaacagtcaagtggatagcttacatccatctgacgaccatgtctgattgagaaggcaaccaaagaaagagcgaagaaagatgatacagctatcaggcccagttctcagacaaaacaaaaaggtctacacaagtggagtcgagacttaccgcttgatggactcttcgatgtactcgttctgtcaacacagtaatcgcgtcaagagaaagaggaaaatgggtaaaattgattagcgtgaaatacttttaccttactgttccagtacaaacagttcaagacagaagggagaagtatcaatcgtcacctgaggctgttagacggaaagaaaaggaaagtcgggccaaggtgtagaggataaaggcaagcattgtcagtctagctctacagatctgagaatttgacaagagcagtctcaagaacagcattctcaatagaacatgctatgagtttatgctccaagatcaatcgacataccatattagattctgtacagggtagggtatgtcgagttggttgtgtgtatgtgtgctgatatgagtgtgcacgagtttaaagagaaaagataatttacactgggtggggagcttgccacacacgtgcctttgctagctgtgtaatgatgactaatctagccacgcgcccagtccttacttcctcctgccttgtctttcacccgaacattctcctccctcttttagaacacactcctttttagacgactctcctctttgctctctttgctcttcttgctctctccctaggtctctaaaaagagagaaataaagaaacctttccttcttccttcttcgctttcactttgacagttaaagccgataatctccagtcactctctccttttctctccctcaacttcttccgccctctgcctcgccttgcctctttttagagccttgaacgcatcgcctcttcaagctctcttctgtcgttttcccctcaaaaactctatcagaaacacgagagcatacacatattatatcaccatcagaattttccggatagtaagttctctcgttatagtagagttcgttagttcagcaggatggcttgctagatcgcctcagaagtggcttcacagtctgtatcgcagctttgtttatttttgggaatacacactggcttcaacccatcatttatatccacttgcaacttgcttctagctctgcaagtctctgcatcatgtcgaatatgatcacctgacgaccctgttctatcatcctgcctctagtgttaagcaccatcgctcattcccttgtcgctctcgccagtgcctcactcgcctcggctgcgttggatctatcgtgagtctccagaggaatcttcttcaaccatccaccactatagtctctgactcctcgcgacttgcattttcccctttctttccttcgacacgacaccactcttcttcttcgtaggtccagtcataacgtcacgtcactcttcggtgaatggtcgactggatccggaggtgtcggaactggtctcgggttcgcgaaccctttgacgtacacattcaactacccggcaactacaggcgttgccctatccttgtatgtagtttctcttttcttccttttaaaaacagaaactgttcgaatcatcaactatcgaaactgacgtactttgatggtcgcaatggggattaagcacgaatgatggatactatgaggaagcgcagtatcggatcaatgccaatggtacgtaacgttctgttgttgttgtttttcctcatacggatagattttgctcatcatgacacgctgtcttccgctcatgtctatctttgcacatcagcttctcttcctaattgtggtacgtctccttttaaagagagagacagaaaatgtttttgatatctcatgtgttctgacaatttggaacttgaattcttaccgcatcctctttcagccgaagcggtatgtacttttctttccgaactcagtttctcatctcattgccgccgaaacagatcgacctaaacctatttctttcttccttatggaactcaggtcgtcatctttactcatggagtttacgacatgaacgccaacggatctctcattctctcgccgtttagtggagacggtcgaatccaggtccagaacccttgctccgctgtaacaaatgtcatcacgacctacaaccagactgttcgtctactttcccttcttgtttaccgagtgcttgtcaattgacacgcccgttccattatcgttagacgatgtacgccgcctggagtatcaaggtggacacattcaagcataactacgcccttcatctgacccggtttgacggagcatccttaccgccaatgtatctcaaggctcgaccgcccaacatgctgcctaccgtcgcgctgtctggttacggagaggactctgccagtgtctaaaactcttggctttcctctgcttgtctatctactctcacctttatcctcttctctttctgccctctttcataccattaaaggaaatttcttagaatctgctctggccgttgatcccccattcttattttcaacccctcttttcttgcatctcttatctttccccctttctcttcttcttctatcgccactcacgctttttacctttgacatatcccccattttctgctctgatttgtcttctttcttccttttttttcgtgtgtcatctatctctgatgatttctcttttcttttccaacgcgctgcgcgattgttcttctttctcttgtttcgcgctttcccaaggactctccactttttctattactgttcccagacactctctataacatcttctttcctacacacgacgatcaatctcgttgtgttctttcgagcactcgatgctttgttgctctcgaatggaatgaaaagcaagtctgatgggatgatacacagacacgcgagatggactcgaaagagaagaaaaaatcaagttcgcccgatagaacccacactgacatatcgttggtcgtgatagaccaacggtaagcccaaacttgatccgttatgttcggacgctccttctgctgccgatggggaagaggaaggtgacggtactgatgctgatgctggtatcgacgacgaggagagcgccgacagggaaggtgatgaagcagacagaccgtcacaatcctccatcctgatcacctcggccacgtacagctcactcgatgcctccccgcctcccagcttttcgtccagctcgtgctctccttcaggattgatcgatcgagagagactaccgagatcccaacctacttctgataggccggctctcgaaagtttgaccgaaccgagcacacgacaagagatcgcaccgacgcaaccttggaggatagggatcccttcgagggatagcttgtgtttatgaatgttgaacgggttcgggaccatcgggccacctgggctttggccaagttttgacggatccggagggcttggaagagctttggcgaaggaagatgccaaatctgtttgagaggaagatagataatgaaggataatgtttggtttcgtgtttgatagttctattgattctgctactgctgctgctgctgctgctgctgctgttgttgacgacggtgtagtcgagtccggattagaggccgaaggagtaacgatcggatcgagggcagaagccaacctcgaaggtaacctgatcgagaaagccaccaaaggtaatggtgccaatgcgatagatgtcaagctagaaagtgtggctccatgaaagtgaggactgggatgtgataccgagacagtcgctattgagactggctaagaatgagggtaaggaagaggagaggagagtttcagatgaacaagaaaatgagcaaacgacgaaaaagagaaaggaacgagccaagcaaaaaggaaagcctcacttgaggaacacgtctcataagaccttttaaggaagctgcgaggctcattggattgcgcaagatgtctctcggtcaacgaacgaggtgaaaggtgttgatatatgtatgtgtgtgcttaggttgaagttgagtttaaggaaaatattaaagtgttgaaacaattccgtcactactttagatactccttattcccaaattattatcaatccgtccatacgcttgacgctcagcatccgacacacatatacccgactggcggctatgtcgacattcaggacatcatacaatacattcatacccttaaaccgaacatcttcattcaaaaccacttatagacatcttctcagaacggcggctcttcatcaagacgctttcgttgggttggtctattcgtctcgacgatctctttccttctgcttggccttgcagctttcgcgtattcctaagaagcgcggtctgctatagttgacccttggctgagaccagcgtttgttctctatcattgcttcttcatttatgtcagatccttcttcaaaaagaagtggagaatacgattccggtcgtggctcgagagaacggcttcacgtgaggacgatatcgaggctcgactggcaggcgctcgaaaggtatgttcccttcacactctatcttccacttcgctctttctgctcatcccatcatgctcacgctctgataagtatcgtatcttgggcgttaggaacttcgacgactccaaagagctgtatctggtcatccaaggttgtattcctggtccattgacgcggcatacggactttgtgggtctgcccgacatgatgtctctcgcgtaggttcatttatttagttatttctagtttgtctttttcctcgccttaaaggagaatgtgaggatgtaaaaggaagtatttttgatctggtttgcaagtgcatctcacaaacagccctttattgacccaggagtgttaaatccgggtattccctcgagatcaccgttgcctccgccgatagatccttcggatccaagcacagtcgtaccgacatactctccttgtttagtatctattctgacatcgtcgacaaagatcttcagggacaaatcgatcagcccgatgtggttggcttttccaccgacgctgcctgacaacgcgaaacctggcgatcctgaactggccaacaggctgttcttagcaccgataagagaagtcagattgaggagggaacatttcagagaaatcaccgtgggcaagaccagtcgacttccgatcacccggtttccgctcgtcgttcgtgttgtgggtgtgccgccagtgtcagccgcagacggagaaacggaagacggagtggtcgagagagaattaagaaggttgggaatcgaatggtcgttctatagggacggtggtagggaaaaggtattgcattggttagagttgagagcagggaaggatgtcaagcgtggaaaccttgctccgaagaaggaacctatcagatctcttgatttgactcttccaatacctaccgcaccccgccgaccgacaccagcggtatcagcctcgagatcaagctcttcggttggacgtataccagcatcaagatcaaagaagaatcctggcttgccggccgaccaccgactgctataccaagatttactcttcaacctgccaatcttgactgtcgatctctctcggatggattcccctgcgtggttccaaccatcgatttctccatactctaaacgaggagcctatctgttccgtccgacgagcacggatgatatcgggtggcttcgaccggctgaaccgacggcgaagaaggagccacccggcaagctgagtaggacggaggaagagcaggcggagtttatggcgaagaagcaggaatacgtcgattggaaattaaagatgacgccgcaggagagatactggcatgagattgggcagtggatagagagggacaagcagttggaccaggaggaaatcagattggttgcagagtgggaagcagaacaggagcgcacgaagctagagatccaacagagaaaggtagctagggcgttggagagggcgaaattagcttgaaacgaacgagacctgcatctatatctatgttggtctatgttctgatgcgaaacgacttgaaacgaatggacatcgtatatcctgctccatcaatgatcccctctttctggtgcttgacccaaacgtaggaaggtattgaggggagtgaaagagagagtgagagtcacgtggttgtgaccgagcttgaccccaaattgcgcccataaagtgtttacagcctgcccaaatatgggcaacccttactgactaagccaagaacgaccaagaaagcctgtgctcttccagaaggcacgcacacgttcgttggggtgtaagaattgtggcaccgccggcggcggcacagggcatagcggcaaatgctcgagcacagcttttgccccatggcgagtcagtctatcagtcaacgctgtcaacagccctgtcaatttcttcagttctctttcctgtcagctcaagatagcatacacccatcagcatatacccgtccttctgtaccttataggatggaaacacttccacctctaagcataaaacaccatgcgacagtcgaccagatggtggactgcaagaacaacgcgcagaacagagagcaggtagagaacgagaaactccaggcgctgctcagagaagcttttaggccttgtagtgaggaagagcagagttggaatcaggtcagtagctttctatgttgctcttcttttctctcgttctctatctcgttcttcttgttcttcttgagcgtaaatgttggaggatcataggcatgagacgttatctggtacatctacaaccttgtgtgtgtatatacctgcgtgcgtgcgtgtgtgtgtgtgtgtgtccgtcctatctcctgctatccacagctctggtcggttggggttactagcgaacgtttccatgccgtcatcgagtttcgttgccgctcgctatctctatcctattccctgcaaactgtgcctgatatcaatagattccccatccaaagcacaagcactccggatctgatactcatctgatcttcctctactttcttcacagctctcgtcagaactgatctcgccagagacaacgacagctcttcaactaggccaggcgtctgcctacggcgcgcttagatcttatctaatggacgagtacaacctcctcggcggcggctggctgttcattagaccgagaagggggaacggtggtcaggaagtattgaactgttgtgttcggtcagcccaagactcgctgttcaccctgctctctagagcgcggtctatgttgaaggatggtgattactcagctgccaaagagattgccagacgatccattatcagagctcttgtcaggctgggtgacctaccgtacgatcatgccgagcagggcacaagtaccagaaaggtctggctcgctcaagacgaggtaggtctcttctttcttgttcgctactcatgttcattcctttctaaaaacatcaccgacctctttactttgtattctcatctatctcgctcgttttagggctccatactggagttacctcatctggcaccagcgtattcaccccctatgatcgaccaaacatctaaggagctcggtcaaactatcaaccttcctccctcccctcgagcatcgcctttacctttgccccagttatctcctacggccgtcattcgctccgcctcttcctcttcttactcatctgccaatccgaccttccgacaggacccaccacctcataccccattggactctccgttgctccagccggtcgactcggtcatcgggataggaatcggtctcgctggtttaaattcggccgtcggcctcagattcagagatgacgaagggagcagtgatgaagaagaggaagacgttgagggaagtagctcggggagtatcacaccgacgttaatgaacgtcggacttccttctctttgtcactgatatctcaacctatctcctttcctgcttctttctctttcgtttcggtttctttttttgctcctgtctagctttgtccttgatttatcttcagaacgcttctcaactgttgcctgtactctcctcttactccttgtcctgcttcctctcgatcttctttgctcgcctctccttcttttatgaaacctatcttccctcctttaatcggtaccctttcttgcagccgaacgatatgactggtgttttttctggccgcctttctccctcgctcctttcgcttttagatctgtttatgacgttgaactttcctttcttccactccatgccgtccatcctatcatgacttataaacgcaatagatcttagagaaactcccttctttctttttatccccccccccttcgtcccacacgtccccttatctttcctcactcatgtccttttccttcatccataagtctcttttgtttccggctctcttctgttgttgtctccaatcacatccatgtccatcttcttttatccaatgagaatctcgatcgttcaacttggaacgtttccgattgaatagcgcatatcgagcacatgtaggaagatcgagagaaaggccaaacgagggaaagataacaagaaagccataaatagacaaggggaaaga

SEQ ID NO: 348 - DNA, 6943 bp, Xanthophyllomyces dendrorhous
tatatccccccctcacccttccctctctcaagaaaaagaaaaagaaaattcgaaaaagaaaatcaaagtaggaatagaacgaaggaggatgccgtatatgcgggtggatggacgcagatagaatatagatataaacgtttatataggatctaatttgaaaaagaagatagaaagctcgagagttctggaagaagaatggtgacgataaaatacaactgagcaggctgaacgagaaagaaaaggagaggattgagtaaagaaaacagagtctacaacattgtgagaaggagcatatacggttccgtacgagtatatacagagaaagaagaaagaaaaaggaaaaaaaaggaaaggaaaaaaacgtatcggaatgaatgagagaaagatcacggtgtatgaattgacgaaagacgccttgcccatagatgaggaagaataagaaagagaaagaaaggacagaagatgaaaacgaaattcatccaagtttcatcccgctaagcccagcttcatcatcctcccatgttccgaaaccagacacactagacctcctaccttccctctccctggccaacaaactcgttcccagcccgggtcctgcgtaacctggcgcgctccctcccagagacctcgctgtccctccaccggcgctcgaagaaagaatttgagaatgcatcggcaagggggaaccgtgcctcgaagatgcggtgtagtatgtcagcgatatcgggatcggttgggtctggctttgagattgagattgagattgaggattcgggtgaaaagccgaaagggatggcaccggagattgttgaaggaaggaaggtgtgttggtgtatgacgaagaagtaggtggaggtagcaatgtggtggatggtgagacggctcgtcgtttgaacgccaacgaagaagcgtatggatcgaatcgcttaaggaagaagagattaataatgtcgtcagtccgacagttacaacaacggcaacaagaccgtgtgagggatagcataagaaaacgaaatgaatcgaggtcttacctcgtcaatggcgactttccgctttttccctccactctccctccaccccatacctgcacttcctggtgtcaccggtcttaccccgaatccagaccctggaatcgagctagacatcgaccctccgccgatacttccagaaccactacagctcccgcttcgtctcctcggacttcccatcacagggctcgacccaacaaccatcatgcctgtgtctccttctccatcgccaattacgtgtgtgtttgttttggaaggggatctgcccgaagggttaatcatcatcggtgtgactgacaatttggcgagccctagctgctggtgttggccggaaggtctgttgtcggacgtgaacgtctgatggggaagcgccggtgactggctagtttgcccgaacgaagaagaaccgccaaacaaacttgccggatcgaccggagagtctgtggtcgagatctcgtcttccatgcaaagatcatcatcctcactcgtatcctcctcgctcaaagggtctcggtcaaacaagtcgccttcgtcctctggaaatcgatttcgaccacccgcaaagaacggtctgaatcgattgccaggcccgactctgtgtcctccaccgccgatggacgagggtccacctgagagtgaggatcgggatcggaacggtgtgggtgaagaggaatgggaagtgagaagtcgttggatctgagcttcagaacgaatctcggaagtagacgggttggattcggtcgagagcaactttgcggtcaatgtgtgggcgatatgcttcggctgtaaggttgatgttatattaatcatatggtccagacaatcccccaatgatgaaaacagcagaaagaggagtgaatgtcagaatctctagtctcagacacacgcaaaagggaagggaagaaacgaacatagagactaccccttctggtgactgctctgatgcttgcttccgtcttgccctcttcagccccgttcgggtttaataccggaatcccaggcgggctattacttcttagtctacctttggtcgaagaaggtgacaacatggctgtcgactcagctgagagaggtcttgagctatcttgagcctgggcccatatcgatggactgtctgttcggtcggatccttctccgtcaggtcccccaactcttgatgagccagggtgagaggccgcggaggttgacgagccaatggattggaaggggagtggatacgaacgcacagacggttggagtgtcccgaatgaagacgccgacggagttggaccaaacgagaaaacacctggctgattgatgataggagaaccttcaccaggggaagatgtcaggagtgatgaaccggccgaggaggggaacctgggtgtcggtcggttttggggtaatcgattgatgatccgaagatgatcatcgtgcgcatggttattgagtgatagtgtggagctctttcttgtatgtttcttgggatgaaacagtggatatccctccagactttcattcatcgccaccgtcgatggaccggtagacgaggaggacgaagaggatggaaaggaaggagacccatgatgggcggaaacagtaggccacgtggataggttcggcttgacggttgagctgtgaatccctgacaacctcactggaggtagtttaaaatctgcaaacgaagaaggaaaccgaacgggtggaggtgacgatgtcgatgaggctggtgttggtatctgaaggggcgaggcatgggtcgtcaacgggctggactctatcgaactggattgagtgggaatgtcgtgcatggcataatcggagggacctagcggggtgtgggtcatccgtcagaacactcttctgctttcttcctatccgtttctgcagtatactttctcttctttattcgacagaggacagcaacgaagtgggctgagcgttcgagggtgctcttgaggaagaaacaagtgaggttgaacgaacgagagcagcttataaatcgatgcaaggtgggtggatgaacaatagaaagaaaaaagataaagggttttttgttgtgtcggcttcattatgaaggttgccagcattccatgacaagagcctcaaatgttctctccatactagcttctggccaacagacatcaagacagacatcgctctgctgcttatagataacagagaacggtatacagtgggaaagaatacatggatcgatatgggttatcaacattccttctttgttaaagcttgccctttgtttcttcgtccttccttagagtcgccagcaaatcatctccgtcgaccaagacacaccaccctccctctccgcgctttccttcaacgcctgggccggtccatctgcctgtccaccactcgtctgacttgaggaggttcatgacaggctcatcgtatgttcccggttgcaagaatactgaatgaatgccgaccgactgggcttccttcaagatggacagcgtcactgctggaggcgtgacaatcgagagagaggtttcttttgggaacgttagttgggagacagaggccaaagtcttgtgtggagaagtcggaaacgtggttttgatctcaggatggggtgagattggggtcaccggcagggatcggctgagataccacacaaatacttggaaccgacgaatgagacaaacagaatccagagatttgagattgtcagcgttggatattatagacatgtatcgggtgaacctttggatataaaagatgtgtgagtacttttgtgtccgaatcgctttggttcagagttagcctgtggcaacgaacgtcaacggaatgtcacagaggagagagaagagtaagcacgcgctctcctcgatggatgggcaacacacagctggtacaggacgtacgccagctacagcatagtattttgcggtgaagaatcttttagcagcaccagtttccatcttgccaagatgattagtttgttcgttctggcagaagtagggggatgacttcaacgatggtgatgatgagcaaaaggaaaggtgaaagtcgagtgaaggtgcgatgaaggtgaaggtgaaggtgataagagcaagatatctaacaagcaaacctacggcctcagatcagtcttttggactataatacatgatgagcctctagcattcgctcgctctcttgaatgccttgagagctgatggtgtatataacattcgatatgtgtacgtcaagaaagagaacgagcgatgtgattccttctttggacaagcaggcaggcaagaaagcatacaccaaagcagccagggaatcggatcaaacccaaccaaaccaaatccacaacaagaccaccgacgaaccaagaacaccacagtcagactaccatctcgttgtgaacccatttatacacacacagagtgcaacccagagctcacaatccaagagctcacaccccaagagtgagtgagaactctggaggaagctcacccgtcggtctagtccgagcgagagtggggagagggttagtaaccgcagtcacgacacgtgacagcatagcttcctgccccacccgtaaccaaaccaacaacggcaagtttcccaaatttacaatgctcttctccaaatccccttctccttcccaccctgaccactcccttccctccggcctctacaaacccctacagcctcaaccgcctaacgatgccagctccatcaaagagacctctctccggagcatcagcccaggcggccaaaaaatctaaaaatagcgccacaaagtcaacagcgtccaagaaggagagcgcggttgaatcaaagcgaaaggtgcctctgactgctccgacaggaaagtccacgctcgaggaggaggaggaagagtttgacgaggaggattgggaggatgatgctatcggtggtttcgaagtcgacggagaggatggagagggtgatgatgatgatgtagatatcgagggtgagaacgatcaggaaggagaaggagaaggagaagggtcagatcaaccgaagcagccaaaggatcttgatggttcgtttcgttctttctcgtgattctccatcgtcctcgctcatagcctttcttacttttctacgtatcaattagccatccgacaggctcgacaagctcagaaagttgatcgacaggctcgacgagctgccaagccgaacgctcaggtgctccaagagtcaaagtcgttgtgggcaaagttgaaccgaaaggaaggagtgtctaagaaggagagggaagagactctcaaggagctcatgactctccttgaaggtcgactcggcgcggtcgtcggaaagcacgatggagggcgagttgtccaaagtgtatgttttgtttctgtattctctttttccatcaattcttctgatctgatcttggaatcgagaatttctttcttggatcttttctgtctgacttgcgacacagattgtcaagcacggaggaaaggcagatagagaaaaggtggcgttggagcttaaaggaaagtttgtcgaactcgttcaggcaaagtattccaaagtgtgtatcgtctcaactctggctcgccatgaacggtttcttccgtgaaaacattgtctatcatagaatgactcactttggtccatgtttgcatacttcatttgaattcataaagtttcttgtcctcaagttgatccgactctgccctccggctcgaacgatcatcctttcggaacttactcctcatattccccgactgatcgctcatcgagaggcgtccggtttgatcgaagacgcttacgcgctctggtgtaccgcgaaggaacgaacggcaatgatgaaacagttctgggggaaagagaccttgttctcaaaagaggaggaaggcaaaggaatcgatagtttcatcgagaccgagcaggacgaggcgaggagagctagggtggccgatgggttcaagtcgcatctgaacaacgtgtttgataacccggagaagggagcaatccaacactcgattatccatcgattgatcagagactacatgacgttgtgcacttcgttgtcggacaacgagaagcgacgagccgatctattcgagtcgtgagttgagatgttttcctcttttcctttctctctctattcgttcagggagctcggttcactgacctatcaacactccatgatgataaatcaagcttccacgaactcatgccagagatcgtccacaccagggatggcgcgttcgtcgttcgagatttccttgctaccaccggaccgaaagaccgaaagactatcgtcagggtcttccgaccgcatgtccagaagatggctgaagatcctgatgctcagaccgtcttgttcacgatgtttgatgtgatcgagtgagtctcttcttttctgttttaattctccctctatctctctctctctctctcttgtttcttctgctcttgaaatcgaaggatactgatagattcatcactcttttgtgacatcgcagtgataccaagttggttggaaaatcgatcattggtgaatttgactttgccgaactcttcactgccaaactcggtcgtcgaatcccattatatctcttgaaccctcgatcgaaacgacatttcattcctgcaacgaaccaactattggcataccacgatgaagcccgatcaaagacatctaagaaggactcggaagtcagaatcgaagagttaaggaagacggtcagcccgagtttgatcaaggttttggaggatgacacagagggtgaactcttgagagatgcgggtgcttgtttgttgatcgcagaggtcatgctctacgcttccggtggttcgtatcactctgcttctcgttcctgccgttatcttgtaacacccgtgctgacgaatcttgcaccacacgttttgcacgaaaacaaaatcaattcacaaactctcgcgcgcgcacgcacgcacacacacacacacacaca

SEQ ID NO: 349 - DNA, 16731 bp, Xanthophyllomyces dendrorhous
cacacacacacacacacacacatatacacacacgtacagacaaattaagcgtgatcccctcattactcgctcctctccaaaccccgtacaagccgtctcactcgatggaccctgacccatcaaacccatctgttcacacgatcgacctatcccccgcttcccgtctgtacaaactcctcctccaagccggtcacttcaaccaaacgaccaagcaaatcgatctcgttccttccttcgtccctaccgccaatgagtttgctgtgtccttctggaagacttcggtcgaggccggaacgctggtcgacatcgcgtgtggaggaggcgcgttcgtcgttgcagagttgatcgagcgattgaaggtcaccggtggaaaggaagcaggcgaggtgaagaaggtgtttggaaaggaggtggtgagtaggttggacaagtcgggggcaaagggaagcaaggtcttgatggaaaagatcgccagtgcttaaaggaggagcagtattttcttgtttctaaaaatgacattatcgtcattcttttgcacgcgtgtgtgaatctatttctctctctgacatggaaaacgaagcacatggtagggatacctgatgctaagaaaaggaaaactagagggagaaaggaataaaaggaaaaccaaagaatacatgaatgagagaaagaggaaagaaaaaacaagcgattaaattccttttttttcctctttctactatccttgtgcaccatcagccaggtctgagaatctataaaggaaccattcgatcgtctactacaacaactttcatcaagccaccttgaaaacctgaaaagcaaagagaagagaagaaaccgtcatatagaaacattccaaactgtgaggaaaggaggagaggggcaagaatattccaatttggagacgatgtaatttttgtgggccagatacattaaagcgtgaaatcattaaagggttctagagctaaaggagataagattctcaagccatatcaaggacgactcgggcggcgagagtgaggttggacatcttgtcgaacgtctcggcaagcctgtcgatcggctcgacgacgaagtgagtcttgacagcacctctggcggccatgtcgagagcctcaacagagtcctgtcggtttccgacgtaagaaccaatgatcctgtgctcgttgacgaccgaattgaagatgttggcctggacacaggcgtccttgggaagaccgacggcgacgaggacacctcgtggtcggaggtactcgagagcttggttgtaagcagccgctccactggcgacgcagacggaagcgtgggcaccaccgttggtggtgtcgacaatagacttgacgacatcctccttcatgtagtcaacaaagacctcggcaccgaaagacttgacgagcttcctcttctcctctccagagtcgattccgatgactttgtagcccatggcgtgggcgaactggacggcgaggtgaccaagtcctccaccggcaccggggataaccacgttctctccggggctaccctcgatcatcttgagagccttgtacacggtcacaccggcacagcagatgggagcagccagctcgagagggaggttcctcgggatcggggtaacgtgggcagcgtaagagacggcccactgctggaaggaaccatcaacggtgaaaccgtgaacggcagcccgcttgcagacggactcgtagccctttcggcactcttcacagctcaagcaagagttggcgagccactgtgatagtaagatgagaggatatcagcttaggagatgggcgcaagatgatatggaaagaaaggagaaaaccagtaaaaccaaccttgattccgactgggtcaccgatcttgaggtcggtctgggtgttatcggcgatggcggcgacgtaaccggcaccttcgtgtccaccaacgagtggaagcttgttggcgctcggccagtcacccttccacacgtggagatcagtgtctgtgaaagaaaccgagaaagaagggtcaatcgaggcggatgagagtgagacaaataaggagaaaaggacgtacggcagacaccagagtaggcgattcggacgaggacctgtccaggctggaggtccttgggctgagtgacgggccagtcggttcggagctggagactggattggggttaggaatggattgaattagcttcagttgagagcgaacggaagagagtgaaggatgaacatacgggccgttgttctcctcaaagacccaagccttctgggtcactgtagagagggagagggagaagaagactgtgagcaaaacggacgaaaataggcgaaagcaaagacactaaaactcacaagggatctcgtaggaagattgggaagtaacagtggacattgtggggttcagatgatgtgttgttggttggttggttgaataggatctctgtgagagtaagctaggagtgatgctgaggcttgataggatgggatgtttgtatggtgagggaaagaaaggaaagtgagattgagatcgagacaccacctgctttatatggttcatttcagtctccgttctgtgatgacgatctgccccggacgatacggaagtggaggaagagaaagaacgttggatcctccgtgagcgagcagacggaaaagggaaacattaaataaaccagtcttctgcctatcgctcgaaagaaaggacattgtcaggaatcaatcggattccttcccggacaaatttcccacgggaaacccctggaagaacagaggccgtaaggatcagcacacaagcacctaccacagactggaacaaagattgacagaagatgtcggaaaccggacgtttctgaggagcccctcgatgggaagaaaaacgaggcaatgagagaaagacgaagaagaagatggaacagccggcgaagaaagagttccgtcatcttccacctcgttagtccggatagcagtttcagcggcaccggtaatctatcagcgtcagctcgttagcatcagtcttatcagtctcagctctgatctccagatattactatcactctagagtcaatctcaaaccccaatccccagcccttggtcctcagcctctgacgtgaacagcaagagttgtccatcccaagatgttttctctgccatcgtcgttgttcctctctcttccgaacggcccggaaaaaaacactcggcatccgtttgcgccgggccgaaatgacgtggctgctgcgcgtgaaggctactgcgcgttatcaagctgactaatcgagttcgttgaccctatcactctgtgaatccatagtcatctatctcctcgtctggttgcttcagaatgtcgccttctcttggatcctccgttcttatacggtcgactttcttttctttaccttttctgcgattgcactattgcgatggggtgtttgtgtgtatgatctacctgtaccatgtatctgcccttgtttcttcttcttttctctctctctctctcttttttccacatcggtgaccagtttaccctgttactggtcacatatggttacagaacacaacgcaaggcggatgaaaggatgtggtgagagagagaaaagagagagaagaggttgaatgtgtgctctataccggcctgaagtctgtggacgagcccacagcaccagcgcttgcaatcattctatcgtcttgatctggaaagatacacgactggctttgggacgttgcgctggaccagcatccaaaggattacgtaatgtctcaatcaccctggcaaccgcctcttgaaatttctgattccatccgagccaactctgcacacacacatcgttcaagagtccacaccttcttcctcttgacggattctcccttctagtactcaacacagaggttcccatacgtgtcgaaaagggtctccggtcatggcttcatcttctacgtaagtgttcttgatcgatactttcattctcctgctcagagctcacctcggtcaccatcgtttttcctattcacctgccgtgcccttgctctatatacatacgcacacacacacatgaatacatacagagcacagtactacgttgtcaacggagcaccaggccagtcatccattccggcttggctgacccaacggtcaaagaacaagaagggcgcaaaaaggacaaaagtccaaaggacactcggccatgttgaattgatccaacatttcgaattcccagaggcttccctcaagatcaggaccacaccagacggtcatcacgccatggccacaggggtgtacaaaccccaggtgagggtgtatgatctggaccagctgaccatgaagtttgagagacatacagatcaggagaacgtagactttcaggtcggtctctgttcttttctacgttgctttcatacggttcccagaatctgaacttgtctctatgccccctctctctccatatcttatttctcaatataaacctcttttatccactcgctcatactcggtctcttctccagatcctctctcaagattggacaaagtcaattcatcttcagagcgatcgacatatcgatcttcatacccaaggtggtcttcaccaccgaacgcgaattccccacttcggtcgagcgctcgcctaccacgcctcgacatgtgacgccttggtaggcgcaaccggtcggtcggtctaccgattgaacctcgaaaaaggttcgttcctcaacccactcgagatgcaacccggcacagatggtgtcaacgcggtcgacatcaaccctcggcatggtctctgggcgttcggaacagaacgaggagcagagggtggttgcgtcgagttctttgatccgagggcgagagagcgaatcgggatcctcagcttgccgtcccaacaactccgaccactttcttccatcggcggtcaaatagtctcagagtttgacttcactccactcgctgtcacctcgctcgcctcaaagtctgacggtttgaaccttgcagtcggcacgtctaccggtcacaccctactctacgatcttagatcacctactgcttatgccatcaaagatcaaggttacggcttgcctgtgaagaaggttcagtggttggaaggcggtaatcgagtcgtcaaggatggcctaatcgctagtgcagacgcaaagattctcaaaatctgggacagacaagatgtcggttatctttcttctttaccttccaagtggttgcgcctatcctggataaaaaaaaactcacctttgttgatctgtttcctctttccttttctctttctcttctctttcttcacctcttcctcctccctctcagccggcaacgaacttcgcatcgctccaaccaccgacgaatttgaacgatttccatcacctgcctggctcgggtatgatcatggtcgccaacgagggtgtccacatgacgacgtactatgtgcctcaactaggtcctgctccgaaatggtgcagcttcttggacaacgttacggaagaaatggaagaccaccaaggtggtggactgtcaaactatcaggatttcaagtttatcgaaagatcagagctggctacgttggtcctttttctcttcctcctcttccaccttaaccgacttttcgcttactcaaacttctttcctcttgggacagtctcggattggaccacctcgtcggcacaccaacactcaaaccatacatgcatggatactttgtctctctcaaattatacgacgccgcccgtcttatcgccaatccatttgcctatgccgaacaccgagagaaagtcatccgggagaagctcgaaaagaagtcggagtccaggatcagagcgcgaagggaggcggtcgatgtcaaagtcaacaaggaactggccgagaaaatcaagagggacgaagagactcgtcggtcaaaggcgaagaatggggaacagcaggacgaaggattggaaggaccaggagagagcgttctcacagatcctaggtttgccgccgtttggtcaaatccagagttccaggtcgatatgggtagtagagagtacatgcttaagaatccagtggccgctcctgtcgttcgtttcttgtcttttaccgatctgttttcaccctcaagcctttactaaaatccttccccccctccttcttgctttgtgatttttcaatttttcaatctcatctcaacagaaagcaaagacagctgtggaagaagaagaggatgaatcagatcgtcggtcatccgatcctgacgatgagtctgatgaggactcgagtgaagaagattctgacgctgaaggcggtaagtccctctgtccttccattcttctcttctcttttcctacatcagggacaatcctaaactcatcttgcaatgcctcctctacaaacttttctctcttccgaataaaatcaacctcatagccctctcgacgttcgatcctcgaacccaaccgaaacacgaaaaccccatgtacagaccatctcttaggacccaagccggtcccaaagcccgacttgttacactctcctcttccacctctgccgatccctccccgtcctcttcgagaaacaaatcgaccacgttcggccaacggatcaaagctcaagcccagtccggttcgacatccacgtcaaagggctcgacagagaaagctcttccggaaggagtactttcccatcgaacactcagcggtggaggcatggaaatgtccttcattccttcttcttcctcgtcctccggtcctagcaagaacggaaagaaggcggcagaggggatcatcgatgacgatttcgttgatcccggcaaggccgctcgagaggccgcccgtgagaagaagagaagagggatcgaagagtttggtgctggtatggagaaaggaggaaggtctgacgaagtcgcgctcaaggaagaagaaagacatggtagacagaagagaaggacgggtgggagaaacgctagtggaaatgttttccgtgggctgtggtaagactgtgcatgcatgctttgttcgagagttctttttcttctccttttcttttccctttgtcgtattagtctttcgccatagaaagacgaggcaaaacataaaaattgtattttaaaataagggggtaaaatatacccagagacacctaacaagattgtgctcggaacaatggccaagagaaacgaaaaggacgaagtagaagtagagaacaaggatcaaaagaaggcatcgagcctagtcaattgctggtatacctcctgactcatcctgtacctcaacattccagcaaacatcatcagcgatctcgctttcttcctgtattccgccattttctgtattttcccaagtacaagaataaaaaataagatacaccaacaccgtgcggcgaaaagattggtcgagtcagtaaagagggaccactcgcgggaacgaatccccaacaaccatcaaagagaaaaaataagatatgaactgacactttgtctggcttctcctccatacgaactctccttcaagagctggtgtaacttgaacagacagttcatcgtgaccaccagtacatctgagaagttgtgggcgatcgattcatcaagatccttgaactcgtctgcccgacggttgatcgctgtgatatcggatgtaagcgggaggagtcctatagattctatcgtctgtttttgtttgcagatttggtcgttcgaaaagcaaacaaaacacaagatagactttgacgtaagatgctattcttgatggtaatcaaggggaagtagaagaaggaaaaaggaactcgcctcgagggtcttgtctaggatattttgttcgtacagaccaaaagcgtccttcaacctcaagagaaccttgcaggtctctctgtttcgctcttcgacttttccccattttgtaagatcactctggtagtgatccaagattcctctcgccaagccaccgatgtcttccgctccagccccgaaaccgatacttctcgaaccagcttgaccacccaacgctggatttgtgctctttgaagacgaaggttgggacagcgaagaaccgagcgccttgttcaacacggcaatcaccgtgtcgtagtcctccgccaggttgtacaggatgatcgcgtcggataatcgttgttgagcagaagatctagcggcggcggcttggacgataccgagtaggtacgtccgttcgtctggaatatgcgcaagtttcatatctcgctcgatcactcccggctatcacaaccggatccacaagtggtgatgtttccatcggaatcttaagttcagaaggaatctcgggaaggaaaacagaaacaaaacacgaaggaaggaaaaaggaaaccatccgaaactcaccaccttggttccatcggttctgatgtcccccagaagttcggcgtatcttccactctccaaaacgagttctctgatcatctcatgcgcgagctgaacttgttcttgcccgatcgggctgggcgcatcggctgagagacaaacaaggtagatgtattgtaacgcgccaagagggtcgttctttgcgaaaggcttgatgtatcgttgaatgagcctagcaaagtttagagccgagggctcgtacgtggacgaatggccgttttgagtcttggtggacactgagagaaaagaatcaccgattcatgtcagcgaagggaatatctactctcgagagaagagaacagcgatagaggaggatgtaagagaaaactcacagagttgagcatcagatgactgcgactttgagggcactcgaaggagaccatagtaagccaggcagatcgcaaactggacggcgtcgacctgatgttgagctttcgagtagaggaacgcgatggcctggatggatgccatagagccggatgtcagtctttgatcctagctcgctcgctctatttgtttgaacgaactgattcatcaaagaaaagggacaaacgaaccttctcgaactctccggtgaacaacaagacctggaaccaaaacaccggtcggtcgcctctcggatcgaaatggccttctccaaactttccgaccaatctggccatctctctgagcccaaagttttccgatccagccatactctcctccgcgaggtcctccctgacaaacgacagttggaaccaaagccagtcctccgtcgtccttgccacagggatgtttttcttgacttcgacccgaccgatgagccggtagagcgcgtgtttgaacggatcggtaggtgaggcatgtctaattcgcacgttgtattctgtgatgaacctttcttgatggatttgtgacagtctatacgttctcgatcgtaaagtcagctcatgggcgggtcgcaaacgaaaaaaagccggcccctatccatcagagaaacgaaaaagagaacaaacacacaccttcgatcgggactatccaaccatcctttgaagaaccctacaaagtacttttcagtcctattgatcccctcttcgttctccaaagccaacctgtaggcttcttgtagatgaccggatcggatgaggtagtagagttgagcccagagcggttgagagtttacgatctgtaaccaagagaagccgaatgcaagaggggtcaaggaagacaagtcgcgagcgaatgtgatcagtcataaatccggacgagttccacaaaagatagacggattctcacctcgatgttatccttccatcgaccttctttgtaatgcatcactctgacgaaccctctgatcgtgtttgccacggaagggacaccgcccaatcctgcctggaccgggtttgatgctactcttttatcgacgtgagcttggaacctggatgcccatcaacaaggagaacaaggccgatcagcccttggaacgtttaccctcctggttctgctcagaacctagctagaggacagaaggaacaaaacgggagaaaaaaaagagaaaaaaaagagaatggagaaactaactgttcttccaagaaccgttttccaccctgaacgatatccttcctaacctgtcttcctaactctccgttctctcctgcgccaaggtaaccaggagcgtacctcctctcacccgcaccaggttcaccctccttaacaatcgatccgatgagtgagaaagcctgggcgagtaaggttgcagtctgatttgatccaccactggtagtaaggctggtgttgacggatgtggcggacgagagggaagaagcatagactttcgccagcgggaaacttgatggagatgttgctgatcgagcgacgtttagctgtctgacaatcgcatcatatttaagcgatcgatgatgggtagccaacgtttgaccgggtgggaggacgttgctgctgccgccgccgcctccggcttgactggcaccaagtaggttaccggaagaagctgacgcagcactactctcgcccagacgacctctcatactcctctcgaacgcgttcccaacaccagacgcattcaactgaccaccaccaaccccgccggcgggggtagaagcaaagagggaggaatcacctgcaccgacttcttcgagaactttttgctttgagaaagaccaagacgaataaagcctttcgtcggccgtccggtgacaggtcgattgaagttgcgcttgagattcagataatgcggttaagatgagttgttctcgagtgtggcggagatatccctgtagtttgtgttcgtgttgatatttccaatcgccaaaggcaaaaaatgaaacaggaagaagatcagccatttctgccccgagacagctttgtcgaccagtcgagcaaggatgaaagaaggagggtagagagagatatatacacgaaacaaacaaacatacatcaacatctccatcaccaagagggatcaatggttcgaacgtcctgcttagtgcagcactcgccgtcgctttctctaccctgtaggtcaggtctgccaggtttagacctgctgtagccagaacatgagctctaaagcacgagcatagaaagacaaagagatagagagagagagagagatgagttagctaaacgtaaagtttcatcttgacaaggggtcttctctccgagaacctcgcaagagacggaatgacctcggaggaaaaaaagaatgagatgattctatcccttgaccaacggaaaacgagaggacgatgaaggaggaagccctccctgagaaggagagaacgacctagatcaaacaagaggagattgagaactcacgccctgccttcttcccagtcatctcgatcagtcaaccgttcgcctctctttcccttcgagaccagccgtctgctttgttcttcgacttgatctagccccaggtacaactgtggtagttcttgattgtccagatgagacgttaatgctcgcgattgagccaacagagaagctaacgttgagctcgaactcattgttacttcttcttgttcttgctttgaagggtggtcgtccgagatgaaggatcagaggttgatgttgagagaaggtgaacggtgggctggaaagaatgagggcgagagattgaactgggttgaagggttgaaggttacgcatgtagatgtaaccagaatgtaaccggcttgctcgtagagacccatcgaaaagaagctctggatacaccatgtttccgcaacataaggaggagagaaagaaggaggaaagaagaagaaaagaggatgatcctacaaccgtttgaagaagggatacgatagagttgaaagaagaagggcagggtagagagggaagggagagaaaggaagagaagaaaagagggcaggaaggtataaactacatgggcagctaacgatgtatatccgtccgtccaaagctgaccggtttcaagatgaaacctagacaagacaaatgaaagaaaaccagagaaaaagattaaaagaacagatataagaaaggggagaagagacaacgacaacgacgtaaaatcacgaaaccaagaatcaaacgttcaacccctcccctgacccagttccttcggccgagcctgtgcctatacccgcccccactgccgctgtatcagtcggaccgattgcaccttgtccggatattgatttctttttgggagctggtgccggagctgtgcccgaagcttgttgtttctttgcgtaccgtagtccacaggcgttgcataacgttttcggaccgagtgggccctacgcacagtggtcatgataagaaaatgaacagggacacgatagaacagaggaaaagggaaagagatgagcaaacatcgagcaaggcaaagataaagttgcaaagagctaggccatacctttctccattcgggagaatccgttcgtccacaggtcacacacacataattatgttcttcctttgactttttgacttttttcggtttcttgagtgaatcttgctgtgccatcgacggttgctgctgttgttgctgttgttgaacagaggggtgttgtgaagaggtgggttgagttgaggtttgaagtgggtgcatcgacgacaggttggactgagattgagaaaccgcctgggatttgttatgagacccatattgttcttgtggctgctgctgctgctgctgggacaaaccggaaggaccgggcccggaagacaaagctgatgtgggtaaacctgagatggagagtcctaacccggcggcgttcttgatagacccgggaccagagctgactgttgatctggctgaatctccaacaggagccatgaacaaatttctaccgagtgcgcttccgccgggtcgttcgacatcagaatcgttatcgtcataggcaccaccgccaataccggaatcatcatagatggacgaatacgatgtcgtgtggttcaattggggttgtcgatggaaggcggcggcggcagcgacggctgcttgaccggggaaggatgttctgccgtatgatgaattgtcagaatctggcaccggaggtgcgctgaattggagaaggatattcggatttggcgaagcttgctggccggatagttcctacaggcaaggcgtggagaacgaggtatgaaggacaaggcgtaagaggaccttcgaggtagagaggactagacaacaaggaaattccacaagagagaaaggctggaggatgaagaaggacctaccaagacttctgctcgtaggcgttcgttgatcatcttctcttctagaaacgagtttaacatctctccgttcttgctcagccattttttgatcatgagaaagaagcacatgcaccggccgtctgtcccggtgctcgacgtgttggacgctgcctgacctggaggtagcgtctgagtgatggatagcggaagctgttggtagagcgacgaaaaggaagaggcgagtgtgagaggaagcgctaggcaacggagtgaatgcagacaaaacgtaccggctctctttcttcctcctctccccagtagccatgtcctctgacttcgagaaggacggtcttcttggtctttctccttctggacatcctcgaccgactgttcgttccgtcggcgctatccggggtgtcttgggcaaagccgagggaaagagagtctgaggaagactctgtagagctggatgactcggctgacgagtttgagccggtggaggacaggtggacgggtgggggtggccgtttgacgaggaatcggtggtagctcgcgaggtctgttctggtgaggattgattgatggagataattgagcagagcggcctggtcttcgtctggaaggggcatgggaatgggtgtatgtgtgaaaaggtcatgtcagtgcggtatccagaggttggctagatcaatcgagagagagagagaccaaccatagacaaagtctgttaacgaccgatccaggatttctgatgcgttgtagcccaagagatcttttacactaggcgaggcaaacaaaatctgttgggaaaaggcaatcgagtaggtaagtataacgatagggagaccaagacgtccggatgttcagctcaaagaaagaagagaaaaagaaagaggatgtggaacgtgcctttgccgatccgtttgagagaggcatgacgacgaggatggtggtatctgtcatttcgttgaccaacaaatttggccatcgtttcctctttgtgaactgggtaggcgagggaagtgaaaggagcacaaagaatagatagagcgagcgagaaggagcgggcaagacgaggtgagcgagagcgacgacaaggacactgggtaagagatgaaatgacttgcctcaaagatagcgttgtcggtggatgaagtacttgtgcttccgaacgaggtcggatgggaggacacagctgtctgaccgttttgaccgttcggaggtctagcgactgatggattcccgatggttgtcgagcttggttgtaattgtggttgatggtgttgttcctgttgttgaagagtgaactgttgttgctgcagactattggcactgcctgcctggacattatacgactgatcggactgatccattcccagtatacgattagaaggtgtgggtgaaggtatgagcaaaggtgtatgctcaacagagaacacagagaatccctagcagattacacggccgtttccgatgggcagggtgagttcgatgagttgccgcttgcttacgtcatgctcgtaaccacgaggctcggaggatatccacgtgtcgtccgcagttcgagcacgtgattttatctttgagaggggggatgcatgtgatgcgcatcatatcgccttcggtctgtactgcgctggaaggagagggtgtgggttggaagctgagcggtagtgttgctgaaggaaagcaggtgtttcattctcagagggagtatatgtttttccagaggagagaaggagagaaggagagaagaaagacagaggacagaagagagcctgtactggtcgaggcagaggaagaggcagagacaaagacaatacaaaacagcactagacaaattcacaggctgactacggaaaaagtctaatgatgacgatcgcacgtgatttggctatacacgtggttacgccatccccagttttctgtccccggcctgtttcttccaaagattcccctgcctcttactatcttccatcctttccatccctttgccagctctgctcgatctcctcagatcgacactcaagcacgaaagagagagagataggcacatacacatagagagagctctagtgagtgtgtgtgagtgtacagctagtgagcgtgtcagaggtgagtgtgtgttggcaatatagggtttggatggatggtccatccatcttgttgaggattcgctaatcggtgcttgcctctcgttctcttatcctcgttctcgctcgctctcgctttctctgcacgtcgtgtacagaaacgaacacagacagtcatcgagtagtcgatcttgtgttctatcctcccttgcgttctctctccttcccttttcggagattttcccacataacgaacaaaagacaagaaaaaaaaaggaatgccaaacacgctctcaccttcgtccaggcaacaaggccaagggattcatacatcccatccctcatccatctcttcatcctctgcatcttcggccaatagcaatcaggcgttcaacattcttgcacccatcgcaagcagacattcagtctatcctaaccagaacgagaccctgctgcctctgccgccgataagtgagaaacagagagcgtcttcggcctcacctccgcctcatcttccatcgcttatccttcagagaccgggaaataatcagtcaacggatctgcctcctatcgcaccactcagatcgctagagttcggacctttcggaaatggcggtggtggcggtggtggcagcagcagcagcaatatcaacaatggaataggcagcaatcacaacggaaactaccctcggcatacctatgctcctagcagcagagattctaccgatggtggctctcagaacggttgttctccgagatcagaatgtaagcttcttatcctctcggaacgcaatcctctttatgcgtgtcttcctttctctccctctctcttttcctttcctttccttgtccatctctcttcctgcctcccttcatctcttccgcttcgtccgttgcccttcccgacgtatcgcgacggccgttcaagctaacggacctatcgctttcctttccctttcctctccttcttttcctttcgctttccttctcttctttcgccaatgccagcccggaagatatacggaccgaacgatcgacagtttccttcccacctcacccattttgatttttcgcaaagacgtcactcgattgccaacggaaaccttcccagacacggccaacttcgcacccagggcggagagtacaacacccagccctccgttccgtctcacccagtccctcactcgcatacaggctcccccttccctccaccctcgccggtcagttggtcccagaaacggaaaatgtcgtacgaccgttcggtcgccgataattcccttccctttggatcccagtccccacacagctttggtggtcatcacgcccatggctatccccaaggccatcatcaggatccggccgaaggtggtcccagcaaacggagaggttccgcgttcgacacaaagatgaacattctctccctgaccgacagaccggaccaacagggcgcgtacgaccaaagcagatcgtatatgcccccaccgtcgaccatcgggactggtggctatcgtcgagactcggccgtctcccagtggtcgctcgccagtcaggtcgagatcgcaggaggagtagacggtgacagtccaaacagacaagctggctatcaga

SEQ ID NO: 350 - DNA, 12443 bp, Xanthophyllomyces dendrorhous
gtctatgcctggactggatttccaccgggattcacgccgacatacgaaaaccagtcgtacggtcccccaactggcactcactcatatgctcctccgactggcaaccaccctttctattcccataccacccctggcaactacccagccaggtccactccagccggcacactgtccagaccaggctcgcctctcgactcggtcggcccgctcggaaagcaggaatcacctagcgaatcctcctccagaatgtctatctcgcctagagggagagatcggtcgacgccgacgccgcctaggacaagagacggacagacgccgacgccttcgtcctcatcgtccgccgtgccgaaatcgtcgatcccacctggtcatccttctttttctcgctcttcttccgtcaaggcctcccggtcgagacagtcatccagatcgacagtcaaggagacagtctctgaccaggcacatccgtcgtcactcgccccgcctgatggaaacagaggtagcgggaacgaaggagatgcaccgtattcgagatctccagaactccgggtgagccacaagcttgccgagagaaaacgtcggaaggagatgaaagagtacgtgtttcttttcttgttcttctgtcctggcgccgtctttgttgttctcgaactatctctctgcatgatgccaccgatctctcacgcacacgtgtgcttctcctctgcacaacaggctaatggaagaactgagggaccagttaccggccgacaagagcgcaaagtcgagcaagtgggaaatcctgagcaaggccgtcgagtatatctctctactcgagcacaccaatgccgacaaagaccaagagatccagacactcagaagagaactggatggctatcggcccgccaactagactttgctcttcaggatccttttctcatctttctttctttcctagtgtaaattatccctttttgggggagagggagggagagacgcagcgtatgatgctccctgcggttttccatactttccttactctcactccaaagtatggtccctctcggatttgattttgtttttgtttttttcttttgggattttcaaggagaagaagaagaataaaaagagaagaacaatgatcctctgcctggctcacttgagtctgcatccatctggccgaaaccctcaggtgtgattctttcattcggttttgctctttctatataatctctctcttttcctctgttcttttctgttctgccatctgttcaaagtctcttgatcctgtttatccagggacatgttctttagtccattttccttccgttctcgttgcctctcttcgccggttccgttcgtttttttcctagctccattgttttcgtttcctcatctctttttgagatccttctagctgctcttgttgtttctacctctcccttaattaatatcattcagaatgtacacattgtattccgcatcttcagaccgaaacatgatctcgagagagacagagagagatgagaacaaagcaagcgcgcgcgcacgccagccaatccctcctgggggttttataagccggagtctccggatcgatccgtcgtcaccgtcacctcccaccttgatctatacctccatccatcccgtcccatcccacaaacattctatcggaattcaagactaggccttgaaagagaataatatgatccgatctatcctccgaccatcgttccttccacccctccggcccgtcctctccgtccgacacatccgctcgacccctccatccggggcagcccccggccatattccctttgacaacatgaccatcccttcatcgtcccagggagtgagcgtcgcggggctcgtccgctctgggatcgaactctcggacggcatggtcgtcggagggagcatgatccttctcggtggcaagacatttctgtggggtgtcgaccggttgagacattcgccctctcagtcgacaacagccgccatcggcgggttggatgggcaaacacagggagagtgggattggaggtgggttggatggaacgaggagatgttcaaggtgctggaagtatgtggccctcgacctggtcagtctctttctttccttctccttgcccgcttgcttgacgttgcgtgatggctcaagtcggactgatttgtttctctcttcctttctcttcttcccctcggctcacccagagatgctgatatttggtacaggaaagacagtccttccggctcctcctttccttcgaaactatctgaacggattaggaattcaacttgacatcatgaacactgttcgtccatctctctttctctattcctctcctatcttccatcttctatctttctttggtcaacctcaggtcgagtgcgctgacagatcgagtttgcccccttcttctttccgtcttgtcacacatcaacaatctttgcacgccaaacagagggacgcatgctcgacatacaacatgttggccgaagagggcagattggtagcagccgctcttctctctgttaaccctcccccggcctcgaccaggtcggctgccgatgagttctccgttctcgccggcgctttccggtccggtagtggcgaaggtggaagacgaccggtggacgtctgatcgagttgagatctgaatccaaaaccaagactgtgactaaagcacaggataggcccaacgagggaggtttccttatagttgtacgaacggaccggaagtttcttttcttttcttgttttgtttactgtaaatcgtctttgttatatgtatatatgcccatccttgtatagatcatatcgtgttggatcgtagaagaatgtacataaggaagaaccaaccttggaggtgtttcctcgtaaaggtgagctacaggataaaggaggcatgttcttccttgatgcaaactttgtctcccccagtcgacaggtggcccgacgtgatccgagattcagaagacaagagagtctgggaaggaagagagacgagaatgtatcaagatcttgaggcccaaagatcatacaactcgggatgttcgattgggtcaaacgtcgtggtcaacgaaggatccgttcggaggacctgcatcaacacaatatccagacatggacgagtttccgtcagccatgtgtcagaccggtcaaaggtctgggaaatcgcgcagacaaagaagaaaagacacggacaggagacggggaagatgcattgaatgatctgtacaactgagagctagccgatagatctgtgagggcccaaagggtgcagaatcgtaagtcagcatctcgagttccctcagagaaggagcagcagcaagaaacatgggcaaacggggaacagactcgtctgaggaggaagaggaaacttccgaatctctttgttcgatccagattgagatgagctcgatggcgtaggagatcctggaggttgcgaggaccgaagttctcgagtaggcagtctaggagtggaggacatcttgatggtcgatggtcgttggtggaggaaggcaagagtgacgttatgggtttacaggattcctccttgtgtgggcttaccgggtcggaaagttcccctctcacgaagaagcctcaactgtgtcttttccatgtattcttgtccctatgggtagcgcgcacaagctggttctcaacagacgaagcaagaacatcgaaagctgaacgagagcgagagaacaagccggccggacggattcttcatcggctcttcgcccacacgacaagtgggtttcgtttcgttcgctcacttccatcaatcctcaagcagaatcctcgtagtttgcacctttccagatgccgatccgtcagagaacatcgggttccacaccaaagaagtcgacagggaatgacaagccaaatggggatggcaagaaaaagacacaggctcccttgtcggtcaagctgttccctcaagatgatcattcattcaaagtagccggtgtcggtcctagcactccatgggaacaagccgttcgtccactgtttctcttcttgtctttatatggtctggcagctagcttaatcctcgtttgagactttatatgtgcccgtcattcgtttgattagaacatcccagaatccctgtttcaatcgttggatgtccccaaaaagaaacccctgtcgttcattcgttcgacaaagacgttgttcccactaggacttgtcctaggagccctgctcgcctactttctcatctcaccactcgataccgatagctttgaagcatactcccataggttaagcacgtttctggatgagtttccggtaccagatcttcccaacttcagtggtttcccgggagagatgtctagcttctttaaagactttggaggtgagaacggagcgatgggttggatgaagaacagggacttccaggtaggatcgaaactggcagacgaagggttgcaggccaaacactctgtcatcctgatccctgtgagttcgtttatccctgaccttccctgtccggccggatgaatggtcgacgttctgacgcgttctttctctgatacggcctgggtcatgatctgaaacccggtagggaatcatctcgacgtaagaccggattgtcgtatattgttcttcatccattgatcgctcactcatctctgtcgatctaattctttggcgtacacagaaacctggaatcgtaggtcgtctgctcgccgactgcttcctgaactcgttccatcactgaccgctcgctcgtcgtacctgctcatatacgcgtctgcagatggtcgaccgctcctgctgctcgctcattcttccggaaacgactctggggatcggccagtatgatccgagccgtgtacgcgtctttctctctatctttatctcgtccttggctgacatggatatcactaacggacgaactcgatgtctctcgctcgacgcgtcttcgatccagactgtccgataaggaaacttggatgcaggctctagctttggatcccgtcacaggtttggacccggtcggacacaaagtcagagcttcccaaggattcgacgctgcttctcaattcatccaggtatcattcccttttcttaccaaagcatcgagacccagtcaagcctgaggataaggactaagtgaatctcttccgtctgccgaacgctgtagggctactggatttggtacgcgtcttgttccgctacttttggatgtatgttttcatctagaaaatgatcaatactgactgaatagggtccgtcttggaaccttgtagggcaaagatcatcgaagtaggttccttctgtgcgcttgtctgtttgaaatgatgatagcgctatagctaatatccttcaaatcttccttcctctccttctccttctctgtctctctctctctctctaaagaatttggcccctctgaactatgattctaataacttggagctagccgcctacgactggtacgctcttctaataccctttcgtcagataatcaacagttgagacaccctttctcacatgctattctttcggactcctttggcaggcggctgagttatcacaatctcgaactccgagacgcgtacttttcccagctgaaatctagagtagagttcttcaaacacacatcgggtcagaaagtcgtactcgtaggacacaggttggtctctttccatgatcttaagaaacaatctgattgcgtaaagggaaagtctaaacgcgtgcgcgcatcggtttgggttcctcgtgtgaagtatgggaggaactatcattcttgtgagtgtctacttatcctttcatggggtgaaatcgaatcctgtctgattatgttattccgacaaactctttgtatgtattttgtgattctcatccatccgatcatagtacttgtcagtttcctcccattatttcctatctctatttctacttttccggcacttatcaaagttcctccattcttcctttgctgtggtgtctgcgatctgtgatgtcaaccagcttgaaatgggtggaagctgaaggtccatcgttcggaaacggagggccagattgggtcgagaaccatatcgagtcattcgtcaacatcgccggaccgatgctaggtccgttcttctcttatattcttttacgaagatagtaaagcaagatcatctggatactcatttctcttctgacctatggtctctttctactcacaggagtcgccaagtgagtctctgatcgaattcttgtttgattcttctgcaaccgctaattcatgctcaacctcacaccgaaatctgaacagagcaatggcagctttgctctctggtgagatgaaagatacggtagaagttaaccctgcggccgctttcttgcttgagaaaatgttttcaagaaaagaacgagcagacttattcagaagctgggcagggtccgcttcaatgtggctcaaggtttgtcttgtgctattctcaagttgtaaaggaagaagcaaaattgagaccgattatcattcttcattctcccggtgcctgctgtagggaggaaacacgatttggggcaatgaggattcagcccctgacgatcctctggatgccactcattctcgttggtcacctttctcttcattcgtatctatctgagattcgatcaagatctgattttatggtactcaattcattttgactcgggattttacacggcctcaacagatgggacgttcctctcattcagacattcagacgcaccgaccgcggaaaaggaattgacggcagaacacgtgtcgcctaatctaacggtgactgaatcgaatgcgttcatgcttcaacacacgcctatgcccttccaggtgatctattccctctcctcaagtccctgtgactttgtctgcttctgcgatgccatctcttgctcgactcactgacttgtcgctcggaatcgattgcattcgtttgggttttggtcggcgtgcatcagaaaatgtacggtacaaactattcatcgggaatcgaggctgatatcgatcaactcaggaagaacaatcaagaccatacaaaatggacgaacccactagagatccgttagtttctcttgttctgtccgttccgatttcagaagagcgcgtaaaagactgggttgtctcaaatgctttaaatctcaaccgggttctctatgagcaattagaactgccaaatgcgccctctttgaagatattctgcatgtatggacacggaaaagaaacagaggttagcctatactgtatagtccattgaaagcgtttcttctcatccgattgattgcccttctgtttgttccgttttgcggttcacagagatcgtattggtaagtttgaacatgttatcaaagcactaagcatgctctcatgattgcgcctgttcgaccaatcgatctgttctgattctgcttcaacgatcatctctatcaggtatatgaaaggtaaatatgaacaagatgaaggaaatggtgaaggaaacgctatgcctgtacgtagcctcgttttctttcacttatcgcacgagttttcttctctctcctgtaccacgctggctcattctttatcccaaaaaaaaaagtgtgtcgacgggtgtaattcgaacggaacgagcgatccgaaccctttgaatttccctctaggaagagatatgtggatcgattcggacgtgtctacgccaaattcggtgcctaccgttcgaaacggagtcaagttcggcgaaggtctgttctctccacttcaccttttttttttaattgaagtttttcttttcttttaatatataattaagtgtggctatttattgtgatgttttcttatatcttcaactacaggcgacggaacggttcctctgctctctttgggtgctatgtgtgtcgaaggttggaaacgaaaggaatggaatccaggttcgtgtcattcgtcttctcacgcgtcacgatcagaaactgaatatcgtttcatgtacacgacattgctcttgttctcgaatttctcttttactgaaaacttgattctgtcttccagctggaatcaaagtcgtcaccagagaacaggctcatttacccgaagcattagatcttagaggaggagcaacgaccggtaggctcaaggacctttcttttctgcccatatccctaggcattcacgacgggctgaccttgtaattgcggtcttgtctggctttgatctaaaaggtgaacatgtagatattttgggctcagagatggtcaatgaagctgttggtcgaatcggtaagtatcctatcgcttttttttgccggggatcaattctgactgctcgatcaacttatttggtaccaaattaagccgccggaagaggacacgaattagaagatctctttgtttcgaacatcagagaatacgcagcgaagatcaattggccttcggattcttcagaggattcaaagaaaaacaaaggattttggggttgaaactccctttcgaatacaacagatacatgatgctctacttgctctaggttttcctccaacattgataatcgggcaaggcggtcatttaattgatagaggaagcacatgatacccttataaaacataaatacgatacaacactttcttatcaattctcctcgaaccacctaatcgagaggtagaggggaagcttcctggcagctcgctgtcgttataaaaacttgaaatgtaaagacctcctaattatcctgttgtgctaaacgttgttgaagtagccggaattgtctaatttgatcctccgagtccgagatcatctgttcattcaacgaagatgtctctcttgcattcagcatagccttcgttgaacgaaagtagatggaggcaaatagaaataaaatcttacagcttgagcctgttcgtagacatctgaccctggctcgttaaacaacgtagcattggcaaacatcagaaatacgtctctctcaaattcatcgaggctcatgattatgccatctctaactctattcttgattgtcttgaggtccatcggtctataaacaatctcatgatagtctggtacatcgactgatcggatgggggactgaaagatcgatgaggaccgatgttgagcgatctgttggtacagtaagtcgatcgtcttcttgaatgaccgagggttggacatcgcggtagggacagaggtcgacgtcagagtaggggtttgtgaagattgtcgggtagaaggttgttgagctgatgaaggtggtacagctgttcgtcgcaggcaatagaacgaaaaagagcataagcaactgtttagcaggcatcaaagatttggatgagatgaatgtacaatcttcaggagtggcagatatatctcctctccgccgtttgacgataggctccccgtcattgctagtcgaatccgcttgggcagcaggtaagtctcgcttccgtttcctttctcttgctgttatcggccacacagtattcacccaacagatcaagatcagtattcagccagagaggaagtgacagaacaatcgaggagggaatacatactggctgcctgctcggcttgtttggttaccttcgctgctctttctcgttctcttctagcccgatctctcacccttctctctgccttcttctgctcatgagcctccatcgcctgctcagctgtcaactctgcttgctccgccttggtcaacttcttattcgagcctgcgccacctgtagtgttagcagcggatcctgtgctgctaatggattttcgtttggatcgcttgagggccaaagttccttcctctccttcgtcttcctcctcattatcatcatcatcgtcgtcattctcatcgtcatcctcgaggtcgtcatcgtcgtcctcatcaatgtcgtcgacatcgtcttcatcgtcgttctcgtccccgttggtagcattgtccttgacatctttctcggcctcggcctcgtctttatcgaccaatcccttaatctcctccttgacctcttgcctctcacccatatccccctgacccagagacttcttcaagtcgtcatctgtttctgttctttcctccttgacgacgacttttccccttttggatcttctctctcttggctctccttcctcctcatccgccgtttgctcttcctggacaccctccatttcctcgccttctccctccttctcttgatcatcaccaccatcatcatcatcggtctcatcaggttcactctcgctttcccgttttccctcgccttttaactcccgaacgcgttttgttcgggccacatctgccttggcctttctgtctttgaccgctctacgcggtctcgatagttcatctacctgttgagagttcgcgcctaaattcagagctgtttgccgagtgatcgttgatgagcctttgagagattctctgtccagtgtggaagaagtgagtactgttgagtcgtcggtggtgttgctggcaggatcagagggtggacgtgagacctttgaggaagacttggaaagggataggtcggatcgaagtcgagtcaaaggagctcgaataggcgaactgattggctctcgttttgatcgtgcctttgatctggatgactccttctcctttccttttcctttctctctctcgtcctcgtttccatcccctccgtcctcctcttctgtatgtcttgactttcggtcagagctgggtgcgtcaggctttcctctcttgatccgtcgtctttccagatccgatctatccctctcttcatcctcttctccatctcccaaatcggaggaaaactcgctactagccgaagggcttgccagtcgcttcttgaagaccgcgctcggctttggtccgggtctttcggccgacggagggtccggtaagatggatgaggacgaagctagagaagatcgagtcgaggcgcgtttaggtttcgaaccatcgttactcgtcgttaccgtcgtttttgatggtgtggtcaacttcttctcggcttcgtctttgtcttcctcaatagttttttcggctgaatcttcttggttttcctgctcgagaacttttttctcctttgtttgttcagcaccagcggcttctgtaagggtgctaagtctcgtctttataggcgagggagttgccggaacgatagattcctgggaagggactggttcccctgtcgtcgataacacacccaatgaatctgagtctttctctgatgagtccgtcttcttgatgtttctgaccgaccttcctgtggccggtagagaggaatcttttttggcagaaacagatgactgaacatcgacttcagagttattcgtctcgccatcaagaacgatgatcgatgagttggcagatatcggggcggattcgatttcttcatcattagcaacaagttttgaacggcgatcagatggtgagggtatcaaagatggtgactttttcggtttgtcttcctcgacctcggtctcagccttgactcgggatggagagactgatggaggtgggcttgattgtagggatttcgttgcaggagagtttcgagtcggttcttgttcggggtctgaatgagttttattacggagaaagaagcaagtcaagtaagagtccaagatttctgatctcgaaaaacacaatcaagtatgacaaaacgcgtctagacacgtcgggtcaagtaaggaaaaagggaaggacacaccgagttcggtgctctctacagtctcgatctcctttatcgaactcgtcgacagacgatctgcttctccatgctgtccatcgtgttcatcttcagaatctgttttgtgttcctcatcaggaaattctctcgaaatctcttccacctcgcccatcatttctgctacctcggcctcctcctgctgttgaacctcgactcctcccgtcactgcatcttctgtatcgtcagtcgtcttctctggttctgtctctggctcagatgatccactcgccagaaatgagttggcagctatctctgctcgctgactagcgagtcgttcgagaagtttagactgaagatctgggttttgaagtagataaagtgagaattgggatcggagagtttgaggtgaaggcgggtttgtcttgagagtagcgagttcgttgttgatcgagctaagggaccacatcaatatgcagcataaagaaagatctcatgagcaaacggcagctccctagaaggagaaagaggaaggtatgagaaccgacttgaaagtttcctcctgtttggtcagaatctgtttgatttgagtaatcctatccctcacttcttcttgggaaggttggactgaaaagggcacgtgtcagtgaaagttgctctctacatatacagactcaaacagctattatggtctcacctgcatctggccctctcaggatagatgatatcgtcggtcctagtgccatgggtgtatgtatactcgatggatggacggatggatggatggagagagaagggcagagaacgaaaagacgtgaatcctttggattagaaatttcgtgaaattcttc

SEQ ID NO: 351 - DNA, 24788 bp, Xanthophyllomyces dendrorhous
tttcctaatcataatttatctaatctctaaggcaactccatcccatcgagccttcccatcaagcgttctcgttcaaccatcgaccatcgcattcaccctcgactctattctcctgctgttggtataagaagcctaagatggtcattgaagaggacagtcagacagatggacatatagaccgatcagaaaactcgaggccatcttcggccctcgttgattcacatcctctcgccccttcctcttcctcgcctgaagcttcttccgaatctctatctgacttggattcctcgctcgtcggaaaccaacaagtcaaccaactctccggtggatcgtctaaagctttcaatggactttcaagctttgaacttgatggtgtcgtccttgcagtcctgctagtcaactttcatcatctggtagcgtctctgtcttcttggctttctccttcattcaacaaataaacaagcaagcaagcaatcaatcacgctgactctcgtcactttctcggctatactctattcattcttctgttctgagaacttaccactagcttggaccagttgtcgagttctcgtacccgtcgaatatcctctcatctccctccttggacccagaaatcccaaagattttgcctttcttggcgcttccggatggagcccatttgtcagacgaagactactcgtactttcatcttgtctcacccacacaaccagatcatcctccaggctctgaggaagacgaaccgtttcctatcgataagacggtctttggaatatcgtcagtcatcttttctctatagcccattcggtgctatcgccgagttcagacagtgcacgcagatgctcaaaacgttcttcgtaattcggccgatgatgagaatagatgcaaccgacaactcgcagcgtcagatttaatcaaacggcctgacgatgttactcgaagtacggttcagatggctgttgttgtcctcgcgagagcacctctcttcgtatgtctccgtccactctcggcggtctgattgatgaggtccagataggttgtggctgactatttcttccggtgtgcactcctttcaatagggtcctataaggtgggcatccgctgtaatagttcattctgaacccgctcaatgatgtctgactcgtcatactcatttgaatgctcggacatgtagggacaaactaggagttgtcacgcgcgcgttcttcgcccagagagactttacctcaacagacattctagtggactttcatcattctttacaaggcagtttgcgtggtactgtctcagagacaacgatgcacatgggtaggtgcatagctgtcttctgtacaaattactcgaggcttatccgtatatttatcactttgctcttcctaggtacgagtctgagagagctcatccacaaatttcggcataagacactggtcttgcttaaactcatgctacttcagaagaaggtaagcttttccataagctaaatcgctttcttcttgaaaaagatgggacaaacggaagattgctcctttcgtgtatgctgtaattgaaaggaagactgccttggttgtagatcatgttctttgggtatcctgtcgaacgtttgggaacttttcaatatactctcgtgagtcgtttctctccatttctgtgtttttactctatatgatattgactgttctctatcttttgtcgtcatcatcataggtttctctcataccaggtatgactgttcatcgaattttatgtatagagtggacctccgatcttgacttacatcttttttttttcaaccacaggcctgttgatgaacttggccgactgtggatcgcccgcacttgacacctgcgcatcgaaggcaaagcgagcgagctcgttgaggacgagtgaccgagcaagtatgcttcggttctttggtttcccactcgacttgtttggaaaggtaggcctttcctgtcttgacactctgtctccgactaggatgaaatctaatctgaagactttctgggtataatcttgacatgtgttcctatcaacaggatgcgttcttccagccatatctccctcttcagcagatcgatatgtgtaaagcctcaagctggctagtaggaacgacaaatagcatcatgatccagcagcgagatgcctcgtttgattgtttggtcaatgtacgttcttcttttctcttgccgatgtttcctatagtcgtgctgaaaagatcttatttttgggttttgaaacacaactagatcgagcacactacctttgaatttcctgattccaagttagaaaggctcgttgcgctgactcccgctgtaagcggtcctttcattcgtcgcgtgacactactcgactctgtttccagtgacttgccctcggtctgatagctatgcttcttcctttttctgatcctgtgttcaaactacaggaccggagatggatggatgatatcaaccggacggtcgaagagacatggaatccggaagacccgactcgacccgtaggtatggtatttaaaggaagtgatgactttttgagagcgaagtttgaagagtatctgtgttctgttctgggtgaggatccttctttattctttttttccttgctgatgacgctaaatattttgcttgattggctgttgacgatctgaacgatgatcagcttccatgaagcacgcagactatctggccaaatcaaacaagtccgataacttgatcacctctggaaatggtttgttcaagatgtcattctattatcatctgtgcatcgtcaactatgtctgctcgttctcgacaagacacggacttatcaaccccaccaaattggattgcaaaatttagcaaactcgcaatcgaatttttctctaccgtggataagagagcttcggttgacccctgcttttcacctatgggataggtctactgatccggtacttttcgatatctgggatcccaaacatccttgtacgttcttgtctttcttcaggtagttgcatgccctataaaaacgactgatcgagtttctttgcatatgactattctttaaaccccttgaaaaggcgaaggcagagtcaaccctgtgtctgatattggtcttcgactagccgaagggatccatgatctcaatattgagcaaaacctggctcctacaagagaggctctttcctccgctctttctgccggctcaacgacattctttcgagccttcgagggtgtcaaggccgggctatcaaatcagctagcagcgcttcctctgggctccccatcaggaggagaatcaatatctggatctgcttcaacctcgacgtcagggttgggttctggtccgaagagatcttcggggttgtcaagcgctactgcatcttcgtttttgagtttcatccgtcctaccgaatcatccccttcttcctccccggcaacagggcctgccgtcccatcctcaacgtcttcgccttcgacgtctgctttctctctgtcttcgcctttgtcgccatcagtttcaggctctgcttctgctacctcgtcttcttctttctcgttgccatcaacagctataccaggaagcttcgtagagcatggtagcagccaaaacgcaggaacgtcagtctcagagggaaaccctctgaaagctgccgtagcaggatttggaagtttctggggatcgaccttctcttccaactctaactccagctccctagggtcagggtcagggtcagggtcaggatcaggatcagggttgagatcgatggcggatgtagggttggagacgggaatgacgacaggaaagttaggattgggaaggttcggaattatgccgaggcgaaagtcagtgcagaccgatgtcgctgaggtgggaaccggcgctggtgggctgagtggagtattgagagggaaacagagagagtcagaaaccgccgacggcagtgggttcgaggattgggctcctgttgatttagatgcgaagcgaaagatgtgatcctttttcttctctcgactctcctttcgcttgcttcttcgaaagtctttccgtctcttttcctttttcttttttcttttcttttccttgatctcagattggttttatgtccacattgatctgaataatttgtttcgtcctccgagatcatcagttcgccttgtacatatagaagtctccgcttttttgtccatcatttcttgatctctatacatcttcttcagccctttgtgccacgcgctcgatctcgaagagaaggatgaagagatatacacatgcatatttgaaaaagaatcaaacgagaagcaagaagaaacaatcgagaaccatggattataactatagatagaggattgtgcgcataacgcgaaagaacaaagttgagcgaagactaaacatgtatactatatatgaatgagaaaaacgaagaagggaaaaaagtatttgattgttgatgtgcatgggcaacgtaaacatggacatgggcatggacagcaatgtatattatacgttagcaggtgagtagaagaagagggtgattaatctccgaggtcgaaaacaatgaactctctttggttgcccaatcgacggcaaacgaatgtcagatcatcgatgttcttgggagaatatataggggaaagagaattaaaacctacgcgtccttctctccgatattctcgaaatccatagtctgaccaggtaagcccccaaccacgaacgctccgtcgccctctccaagctcaagatcatcgttcactctaatccgtgttcctgcactgaatgatgagcccgtattgaaacctgatgtctggacctgattcgttatgataaggatccgaaggagaagaagattacgaggttgattagttcagaacgacggggcacggaaggaggttatttatttatttatttatttattcatctttcttgataaaaatgatagaaaggacatacgacgtgtacgtaggcctttcgagcgctagacactttctgatctggatctcgttgaagagagggctggaacttgtgggttacgacgtgtctaggcggaaggacggtggcgtataagtgaaggtcggcgtgtaccttcaagggagaggagatcaatccacgaaagttatgataagcgacacagttcaagtgaaaaggaagaaattaagatgaacgaacaggagcaggtccagaagcttctcgctgagaagatacttcggtggatccaaatggggcgaccaccttgacgaggccttgcttcttttcctcatccgtgacgtttctagtataatacgccggcttgagtctgcgctcatttggaagtgcccagatctgaaggaaatggacctgtttgtaagtgttcttgttgtattccgaatgtcggacacccgtgcctgcggaagtcatttgaagatcaccccgtttcataatttcgacgtttccgatactgtcccggtgctcgagctctcctttgacaatctacaagatcaagattgtttgatgttaggagtatgaacagagttggacttgcgctcatgcagtagaaaaagacatcatcggaacgaacatatgaaaaaatctcgaattcctgatgcggatgagtgccaaatccctgattggcttcaactctgtcctcattgatcactcggagaggcccaaatgatccgaaatcttatggttcattccataattatcgccatggtgcagaacccgagtaaacatggtcggttactcagatgcacatagcccatcgtcagatgatacagttagaaggtactaaccaggatcatagtagctagcaaaattaaatgtatggaatgtcttcaaccagccgtgattggctatgcctcgctgctcagaaggcctcattgtgagtcggagagcggctaccaaaggttaaaccgggcgataacaagatcaggaatcgtgtaagaacactaaaggagagaacaacaaaaagacaggatcatgctcacgattcttgtttacagcagtagaagctataggagctgatttacagagtacggtagccatattcattgagttgtctgaggagtgccgatgagttgtctggaaggttagtaaaaaatagtaggccccggcgacaacgattggtatgacagaaaacagcatggttagtttgctcacggtgaacagcgattactattcctagaagatctgatgaatacgtgtgcgcgaaacagatgaatattcgtgttagtgatagaaagaaaagagacaagactgatccagcacctcaactctcatcatcctttataccactcttggccgccggtcaagagaatcattatacaatcagtgatgcaggtgtaatgggaagaatgagctaatagtgttaggaaagtcacgtgtcccatgttgacgtcaacacgtgacttgcttatgtaatgataatcatcattgtagccaccttcgtagccaagtatgtaaccctcaggtcacaccgctgtcatcactcaccttccttcttccttttgctttcagccaaacctccagcatacacccacatcttcagccttctctccgtcgcctctcgatctccagctctctgtgatctctcgatgctcccatctatccgtaggggaactcgaacagctttgtgcctaccaaagagatctcttctagcgtcctctgccgtcagactactcctgatccagagaacgatggcatctattcctacctccaccacctccacgcccacttctgctactactcttcttcctcgatcgacgcctttgatttctcagtcaaacaataagatcgtatcgccatgctccagtagatcgtacgccactccgtcgtcgcctatactcactccatcacttacgttcaactcgtcgtgggaaccgacgacgcttccggaactgggcgagagcctaccgtttgatacgttcactggtaaactcgaacagtccccggcggacgacaggcagtatcgatacatcagactacccaacggacttgaggccatgctcatcagggatgaaaagactgacaagagctccgccgcgatggacgtgaaagttggccacctgatggatccgcccgatcttaaagggtttgtcgtttcactctatcttgtgtttccttctccttccatttcttcacgatctatcttgattggcatcgtaactgatcgctttttatgtgcgccttcgattggtaaccaaacgtgtcttcttttctggtagatgcgctcatttctgtgaacacctgctattcttgggaaccgaaaagtttcctaaagagaacgagtatgccgagtatctggctcaggctggaggatacagtaacgctgtgagatattttcctcgtgttccttctctccttcaaatagctatcttagttcttacattttctccttcctcctctctcatcgttcatcctacagtacactggaatggatcaaacgaactactacttttccgtctcgccgtcttctctctctggggcactcgagcggttcgctcagttcttcacctctccattgttcgacgcgtcatgcaccgagagagagcttcgtgctgtcgactctgagcactccaagaaccttcaatcagatatgtggaggctgttccaactggagaagtctctttcccgaccggaccacccttactccaagttcggaaccggcaattggcagacgctctgggaggatgtcaaggctcgtggtggagaacccagagaggaactccttcgatggtggaaatccatgtattcggcaaatcgaatgaagcttgtcgtgcttggaaaggaaccgcttgacgagctgacaaagtgggcggtggaattgttttcggccgtgcccgacaaaggtctagatccggtcgttacgtttgaagcgaatccgttcggaccggagatcgaaggatcgacaaccttcatgaagaccgttaaggaccttcattccctagagctttgctgggttgttcccgatcagtctgcgctcttcaagaccaaggtccgtaaacatcttcctctctctttcgctttctttgccttttccttgctgatttccttgtatgtggatcttctcagccggctagtttcatcgcccactacttgggtcacgaaggacctggatctgtgctcagttacctcaaaaagaagggttgggtcaatggacttggcgctggaaactctgacgctgctaccggattttctttcttccgtgtcaactgcgatctgacgcctgaaggatatggtacgttcgaatacgactttttctcgcggttcgagacattatcatgcttacgtattttggtcttactttctgtgtctctacagagaactacgaccaggttgctctcgccatcttcacctatctggatcttctctacagatctggtcctcagcccggagcttataccgaagtatcctctctcgccgcgctttccttccagttcgtcgaaaagtcctcttcaccctctgatgacgcttcagagctcgccgtccagctttcggcgccttatccgaaggaatgggtactctctcaaccctacttgatgagagcgttcgacgagactttggttcgagagaccttagatgtcctggtggacgttggaaagtgcaagatggtgttggccggaaagaagctgccggctgaagtcgagaagaaggtaggcacttgggatcgaaaagaagctatctacggcacagagtttagagtcgataagtttggagaggagtttgttcgcgcggtgagtttctcttcctggcaacatttctgtctcgatgtgcacaagagacacttactcccgatacatcttctctctttcttcaatgtcctggtggattattgaaccggactaggcatctcggcctgctccgatctctgacttacacctcccggtgcctaatgagtttattcctgaagatctgaacgttgataagatcgagaacatcactgtttgtccccaagaattttggactctttttcctagatgtttcagtcaacctgatatatctgttttgatgtttactacaaaccgtagccgaaagacgttcctgctcttttgaaagagactgagctttctcagctttggtacaagaaggacgatcgattctgggttcccagagctaatgtatgtgcctgacgttcatgcatctcgtgcgttgtggactatcctgatctatcgatactcatctggttgtctacatattataatttgatagttctgggttggacttcagaggtcagtaattttctccttctccactgtgtagatcacagtgttgattgattctttattacatccgtttgaatcattcaaaataaaacaatattagtcctaaactggatgcttctcccatagcggctgcctccgctcggtcagttcacactctacctctcttcttgtgatgtataactcattctcaaccattttattaattcgatcagactcttcaccgagctcttccgggatcatatgaccgaggctctctatcctgtacgtcccctccccctctccacgacgctagtatatacttttctgactcgaattaaacttcctcgatcttccttgcctctcgtatcttatatggtatctaccaggccgacctcgctggattgaaagcatcgtgcatgtactctggaggaactattgttctgtcctgtatgggatataacgaccgattacctgttctcatgaagactgttttggaagagcttaaggcgttcaaggtggaccccaagcgatttgagcttctcaaagacgatgtgagttctataatctataaggcgtgaaatgaagaatctcgaaatgctgaaataggtccttgtttttattcaatctttttagctcaaacgagattggagcaaccatgaattaggtgaaccgtatgggctctcccactactttggatactatctgattgaagacaagatgtactcgcccaaggagaagattgccatctttgatcgtgcgtttcatttttttttttaaattgcctgttcttcatggatacatgattatctaactttcattgctctttcacttttttgtagagatcacggtggagtcagtggagaagttcatcgccgaggccttgagtcgtgtacatgtccagacccttgtccatggtaacttatctaaggaggtacgcgctttctcagctctgtcttgctcgaagcctccaccgtttgcgacatgatagactgatctattttggtcttttggttgtgaatagtctgctatcgaacttcaagaagtgcttgagaccatcttgaagcctactccgttaacggctgaagagaagattaacgacgctgccttcatcctgcctgagtcgtcctcccacgtttggcagctcgatcttcctaacaaggagaacccaaactctggtgtagattactaccttcagattggctcaacaagagagacgagactccgagcgattgcttctctcttttctcagattgctagagagccgtgcttcgatacactccgaacgaaggagcagctgggatatttggtctcttctggtggtcgaaaccagtctggcacgatcgggtggcacattttggttcaatctcagaacgatagcgtttatctagagaatcggatcgaagccttcctttcttccttggcatcccatctggagagccttccagcggaagatttcgaacgacagaaaaagtctttaattgaagacaagctgcagagtctgaagaacctgtacgaggagtctgcaaggctttgggggtccattcaagatggattcttcgatttcaaaaagcgttcgtttttccatctctccctgttttgttctgttttctttgttggctctagctgatgagtttcatctctgtgttggttttcttcaaacaggcgagaaggatgtggccgagttgaagacggttactcaggcagagttgctcgatttctaccagacatacatcaaccctgcctcacaaacccgacgaaaggcatctgttcatttaagaacccaaattcctgcttctgaagtgatcaccgcgcctgccgaggccgaaacaccatttgtcgctgagaaggaggccgtagagaagaaggagatcggcgtgttagatgaaaggaacgtattgatcgaggacgttcatgtgtggaagaagtctttgaagaagagcgagccggctagacctgtccaacctctggagacgtttaaagatcagttgtagtttgtatgtctatctttctatctcctccttttagatactcctatctcgttttagttcccttttgtgatgtagcatccgctgggaccatctagaagctctctttaactatgtagcaactctctgttccctccctcgcctttctcttctctcattttccctccactgatacagttagaccaaaaagaagatcagtgataagccactgtgtataatcaatgaattctctgatctcagacgggcttgcgatagaaaggttactaaccatacatcgtcatacatcgagatgatgctttgatcaaacgctcggaaagacgaagttctttctctctatcagttatggtgaatctgtctccctatcagcagcagcaccagtcaacagatcaagcgtcaagccgtggtcagtcgaacgcggagtttctcagagtcgagattgatcggtggtctgctcgacttcgagagatcagtctctctatacacggtccgttgaatgttatatgtcaaaatgagaaccgaaggtcaaccccgattcaatccgctcatactctactgtctcttctttgagaacgaatttggtttcagatcaccctgagctggcttatcacgagacacacgctcatgatgtattaactacgttccttatagaagaaggatttaacgttacaacctcctattttcttcacaccgcgtttcgagcagagtggtccctgtcatcggccgaacgtttggttgaagaggaagaggagaaggtggtgatgtttcaatcagagtatgatgctctgccaaagatcggacatgcatgcggtgtacgcgtatcttttataactctgtttgtattcaacgtctaggctgaagaacattctttgtgttacaagcataatttgatagccatctctggcgtcgctgccttactgtttctgcgatcactcatgatccgatcaaaccacccaggaaagattgtgctgttaggtacaccggctgaagaaggtggcggtggtaaaatccagctgatagagaaaggggcttatgaaggggttgatgtctgtgttatgtgtcaccctgggcctggaaaactggggatgggaacatttattggaagtttggccatacaggtacaagtgtctcgatggtattgttcctatttcttccaagagagaaagaagtactgacttgacttatgtcatccgggaggaagaccatcaatgccagttatcacacagaatcgtaagtatgcatggctgtgtgtggctctgtaatatgaatttacctggctgaaaagttgtatatcacgtcactgaacttctatatagatccgacggaaacgcactagatgctgctgttctagcttactcaaacatctctgattctagacagtaagctctgatagttctcttctatccctcgatatagaatcgattgttgcgctgatcgtgatcaccgtgcgctatgactttctctcctctcttccacagacagatgagaccagacgatagggttcatggaattattatcaatgggtacgtataatcactttcttcttcttcttccttccgccttgtgtattctatcaagacgtgtatggtttatcttttaaactttatcttcctcgccgtgttactacaactaccagcggtcaagacctcaacagtcagcatcatccctctttcctccgaagacttctctccatccttcttcccgttcaccggtcatgaaatgttgacacttggcgaatataccccttctgaatttgaaggtcctgtttcgcttgcctctctcaagtacttcatcagatcacccacatctgatcatctttccgctctcagggatcgagtttctggttgtttccagttacgttccgtttctgttcatctttcttagcctgaggagaagacttattaacatatatttccggcgtatgaaattctgacaacgaaatagaggagccgctctatccacagccactcgtctagaaatcaacttttcaaccccccacttggatcaaaggaataaccctgtgctctgttcagtttatggagagatcgcaagagaaggttggggctacgaagcaatcgtcgaagatggtgtaggtgctttcagtacagattttggaaacgtcacccacggtccgttttctttcttttctttttacctctcctccccataagatctacaggatccaagatttgttcattgttcttatgatatcttgatgctttgcgcgcgcatgtacacagtggttccgtcggttgcaataagttatgccatcccaactttgcctaatggaggaaaccacacgcccttgttcactcgctcagctcgatcgatcagagcacacgaagagactttgaagacagctgcttgtttggcagaattagggttcaaggtgttggttaattccgatgggttgaggagtaagatcagaaaagcgttcgagagtgggaggggatagtgagagtatatgtgtctgatggaacacacgtggacaagaattggtggattagatatatatatgtgtacacgaacttccctttcaaggaccagaccccttcactcgtcattccctcttccgttcctttcgctttggaaaacagatgattcgatccatgttgtctaattcccacgtcaggcacagtttctcaccaacattctaacggttcctataagatgggcgaccaactggtcgtaacagttgttctcttctctagcgtgagcagctgcttcttctagtaattgaggagcgtctaggatctcgacttctagttcgtgatgacgcttttcctcattctttcgtagagttaggtcgggttagatcgaggtgaggtagccacaggaagaacggagcacatgatcagttggatttatctataacggaagcaaagactagaatgttaaaagtagatggaagaagagagtgaagcgaaacagacctgagtggtcacttgggtaagatcaacccggacggcctgatgagaatatgacagtctatccttctttctgatgaagacgtcttgaccttctgtcggcacggtcggaactattgtttttttccaaagtggaagatcgagcaaaggaaaaggcaaccgagtgggtttagatgacacgatcaggatcaggaatgaagaaaagatcaagacgtacttggtttttccgtactgatgctcaatcgccaatcaaattttctcaacggactatacacattcaagtctcctagcctgaccttctctaccacctcgaccacgccacccgtttttttatccgtcctgatccggacctgccgaccatctggtaactttcgggtcgtatcagtttccagcagatgagcgtatgaaatcggaacaggagcgtgtctcgtggttgaagtctgatggtttaataattggttgtagtgcttgtgatgtgactatttaaatccaaattgttatgtgcgttatcatgaagaggaagagggagaaaaaagagaaagagaagagagaacgggtatatgcgttagtttttctttttttttgggaggtatgggacgcgtatattatatgaacatgagaaataatcacggacggaagacatgttgctgtcgaagaagtagctcaagccggttgggttcgaacgcacatctgccgaaggaaggaggactagatggagggatgacgcgcataaagtcgatccaaaggtatcagccctaacaggtctcaattacaatgagaaagagagacgcgatctatctatctttcctcctttcttaagcgaagaaggacgcgttaaatcgtgagaaaagagagaaggttcactgactagtctcggtctcaatgggtagagagatccgttgcctggtctgatgagatctgatggttccaatctttgcttcaatcttatttatacagaacacatggggaggggccaaaaggaaagatgatagtcaaaaatcagaaatcaagagacatcgatgttttgatcaaaatttcgttcggcttctgcagcatttactaccacaccatcccactttcacacacacacacacacacacacacatacgtgaaagagcaaagcttacttcgacatgttgcgccgtcctggctagagcccaaatccagtcgccgatccgcctgacgaactcatcttccggttcgagctcgaagaatgttggtgtgagcccatttggaacggaaatgtccatcatctgcggcccttgggcatgggatggatgtgagcttgatggcgtatatgcttgcgagattggatatgatgatccagcagaaggaggattgttggatgatctacgttctgtatggccttgagaggcctgaggggtggatgatgagcttgacggtgcggctgaagaacgttcctcctggtcggatggcctggctctttttcgaggagagccttctccatgtccatttggatttggtaattttgatgacatcctttgactggttagagatggcgtggtgcaatggggtgtagtggaaataaaatattgagaaagggtgttgtaggacggttgatgtggatgaaggtatgtggttagggttgtatgattttgagctgttttcatcagatttcgccatattccatgaattttgcaagatttcaaccttcaaaagatgttgaaaatcaaaatgaatatttatcaagaacaggcttgtcccactgttagtaaaacgattagatcacaaagattggccgagcagactctgctgagatcacagaccaagaggagagtcaggaatcaaggacaactcgaaaagaatctctttgtccgtgtactctcttctgtgcttcttcttctccaattgttgctctcttctgtagactccaactgtgctacacctatggtccgttttgagacctcaaagtctttcggtgttgtcttttttcttgtctttctttcctcctttttttccctctgttgctacagattctagttcatcacgatcataaatctcatttttcccgtcgacgtcgttctcctttactcatgatcgagattacgtcaaagagccatctttatacggcgtttatggttgtttgtctacctcgtcgaccagggaaaagggatgtctctgttctagaaacttgttgtttgttccatcattcgtcatgcctcttgccttacgtttcgcatgttcatcagcaaactacgttgctgcccttgagagtaaagggagaaagcttggctgacgttgatggacgtcatggttgccttttgcttccggtcgtttaaaaagcgggcagatcttatacgttcattctcatgaacgagagagcgtggagggaggcgcatgctgaagatgtagatgtcgttcaaagtccgtgtggcatatattaacagcgtcggcgtttgaaatcgaaatgcagaaggaatcaaacaaaagagagcacagctagcttctcggaccagaattggactgcaccaaagttcaagcccaacagcgttcaccccagattgtcagccgcgcagcagattatcgttcccgaagcttgatcggactaaacgtaatagataccgaaaggttcatgggtgatgtcagccacactaccgcggattgctgcgtgacgatttcattaacaaatgaacgctagtctcacgtcggtcactccacaagtccaccatagggggttcgggtgcagagcacaaaggttcaactatcaggcggcagatggcgagcgaataagactgtttcctttccgagaagttttctcttctcattcactttctctcttcagtcgcctggccatgccctgaggagagtgaaaaagagtaacgatcaacacgggcatgaaaaattccttcgctctctctcacactgctttgcagtcgccgtagagaatcgttaggaatatctaatcatatgttctatagttttttcattcggatgatcttgtaatacttacagtttttctctcttttttccctttctgccctttgtggtggtttgtgcggaagctgatctcattttcgtgaataccttaatcctccactaacatccatcccacccacatcgatccgatccttctcttttttctccccacttcttcaataccatccagcgaagaaagacaaaaagacacaatcgacaagttgatacatagagaactactgttatagccttctccccctccccttcccttcttcccgcctccaaacatggccaacgcccaaagcaaccgttcccttgactttggtgcctatttggttcaaactccttccgccgccgctccccattccatttcttctgtcagtcagacccaccactcggatcgatccactggccctcccacaggtcaccaaaattccgatcccgccgcacactacaactacactcatcaaactactcaacctggtcatcggtcgtccgccgatcttactctcgtgccgaccatgtccgactcaagttctccttcatcagaccaacaaccgttagccaactcgccgcctagaggcctacccaatcaaccgatcggcccacaatcctccaactcaaattccaacgacgttaacggagccctaggatgggatcccaacttgttttctactagtgacctttccttccagctcccttcgttccttggcccttcatcccttgccgctccaggtggtggcgttgaagcatttcccacccgatcggtcgatgactggaattcttcctcctttacacccaatggagagatgcagttcaccgaagatggcactattctttctggaacgggttctctcgcttctggtatgggcaatcacgactggggagacagttcaatgtggaggttggttgaatccgccatctgctgtctttttttttgtcttattccttctttccgtccaacccgtccattattttcagctttagattctaacaatacttttttttctcatttcttcgctagtcaaacacccgatacctctcgtccggtaaaccagaagtcaacgcctccggccgtccaaacgtccgattccgagtttcagtctgcattccataaccatttggataatggacaaccatctagtacattatcctcttcggctcgtccgaccactgtaaacaatagcagcagtgcctatcccagcaactctgcacacatgttcccgctctcaccacaaaaatcagccgtcctacctagtcagccggaggatcgtcctgcctatccgaatcctacttctcatcttttgccatcaggtccgacggacacatccattcctcagatcgggaagaacatgcctgggctatactctagctctggatttgacgtccttggtgttttgtctaaggtggtgagccgaccaaatcccagaaccgttctggggccggtcgactttagctgtagtttcttggttgtcgtaagtgttcctatcaggcaccgagatacgaagtgtcatcttgagtggtatctctgaccgtccatctgctggttccacggcacttcttttctctatcaggacgtactaaagtacgattgcccgatcgtgtactcgtcgcccacgtttgctgccttgacaggatacgagaacaaggaaattgttggacggaactgtcgtttcttgcagggtttgttcccttctgtcgctaaatatcttgttggggtttgactgatagagttgagcttcttttcgtttaaccatccttattagctccggatggagctgtcgagagaggctctcgtcgaaaatacaccgacaacgttgcggtttctcacctaaagagaaatctggcgtccggcaaggaatgccaagctagcttgatcaactatcgaaggggtggtgttccattcatcaatctggtcacggtagttcccatcccatgggacacgaacgagattcgattccatgtcggcttccaagtcagttttatttatttatttagaatcgagagcttctttccaattaccatgtttattgatatcctacctttttatttttctgatctcgtaggtcgatttggtagagtcgccaaatgcaattttgcgaaacttgagagacggcacttatcaagtcaactatgccgtcctcaacaaccctcagctaccacttgcacctgctggtcagttagagtatcaaccccgacggatccacggcctttcgccagagcttcttgacgttatcagggtcagccgacctaaagcgttggaggaagctcaggcccaaggcagcgaggaggcgacgatggctgagtggtacaagacactgtttgatcactctgatggttagtgatcagtctttgctacacgctctcctcactgcacatactgatgatgcgtgtctcgccctctttccagactttattcacgtcctgtcgctcaaggggcagttccagtactgttctccgtcggtgaccaggatactggagtacgatccatcggagctcgtcaacaagtttatcggcgatatctgtcatccatccgatctcgtgccggtgatgagagagctcaaggactcgacccacacaccgtcttccggtcagaccgctcgactcgttaacttttcgtttagagtgcagaggaagacgagtggtatggtttggatggagtgtaccggtcagctgcacgtcgagcctggtaagggtcgtaaggccgtcatcctttgcggtcgtgagcgggttgttcccacgcttcagtgggcttccgttcgtctggctggtggagttggcgcagaagattcttggtgcatgctcagttttgagggcttgatcctctatgcctctaacaagatgaaggaaacctttagctccaccgacgacgaactgataggatccagtttgctcgactatattccgaaccgggcgtcgtcttcaccaaaaggcgtcagtgaacctccccaccaacggattcgagccgctctcaagctttcttctcgaagtttaccagagactggaaagtcgacgacgatccggcatgcgttggcacttccgtccggaacgtccgataaggatggcatagtcatcgctgacactgtattttatgcggtcgacaagcccgagtcccagtacgactggtcgcccatgcaaggcgttcacaacggtccactcggcggggcggccagccctgcagagtccgatcagacggactcattccctgtagatcccagaacgggtccttcccaacgaaagatgcgggcaaccgtgatcgtgtgtcagatcaagattgtcgattcgtcaggttcttcctcggcccgacatgccgttcgggcctcgtcagtcgacgtatttgaggagctcaacccgactaggagtaccggttggcactatgagcttcatcagctgaagaacgacaacaggcgattgagggatcaggttgagtcgatgagagtcgctcggtcaagagctacacagatgtcaaatcagcccggcagctcaaacttggctagtaccagcaaacctggtggtatcaatggtggacagacgaaaaagtcgagtatagtatcagcgagtggaacatcggcaggcgcgtctgcgggactttcaaagaggaaacgaatgccgcctgccacgacggcttcgtcctctggtagctcgccggttggcgacaagggtcattcgtcttcttccgctaacacgtcttcggctccaactcctgtgccaacaacggcgtctgtacaggctcctcatcctcaggtgttgcctgctcagcaggcttcgatgggctggacgagttccaacctgaacgaatcgttctacgatgggtattctgcctcgacggcctcttcgaattattcgacctcaccttcagactactcgacttcgtattctgccaaaaaccagcaacaacaacagcagcaggctcaggactcatcgtcgtcgacatcaaacatacagccgactactttcaatccccgagcgcactatgctcagcagcagcaacaccaccatctaagtaattacccggccgggacatctcagatacctcagcttcaaaggccctatggttcaccatcatattcgtccactcagcagccgacctatggtcaatttcagaagtagttttctttttttaggagtattttcgggcccctttcttttcttttctcttacttcacatcatagttcctcaatctctctgccactggtccttttataaacaactcagattccgggtttcttattcttttcatctcttttcgttctttccagttgtagcatacctgcccctctcctccctcattcttcgggtcgcctgactatgtttttgctctttttcttacctctcttccctatagttccgcgattcttatcctcgccttctggtcttttcctcgccttctatctttgtagcatatcacagtgcttcgttctctatcattctattttacccgtatagcttccctcttctttcactctaattttgacaatgatgtatcgctctaaaaaccgatgatgtctcgatctcaactatgactgttattcatctcttcttcgtttgcaaccgttcctttgttacttatatatccttttgtctcgttttcttttgtccttgtcctcgttccttttttttctcttctttttcgcctgtcgaatatatgctgttgatctcgcgaccattgtcatcgaacgtaagaaaggatggaaagaggcaacaggccatgcgaatgaaagaagatgtttctgacggatacagccaagtttgatgattgtttgagtgagtggggtgtcgactcgacttgttcgatcatctctttttcccattgttccattgttcctttgtttctttatcttcctctcatacaatgttactatgtttgttcataccaagctgacactcctctacaaaaactttcaggggctctcccagcagagcaatcggtttgatagattaggcctgtcgacaatctgaggagaactaaccttgactccgacctgacagttaaaccacatcgggacactgacaagctttcctccgcctttgcttgatcgctctcgtttgctccgctccagcgctctctcaggaacacataagggagatggttcctggagacgcacaggccttctcatttgcgtgttccctctttgtcccttcgacctctccttcctggcattgtccatcttctgtcgttctctctctcctctctatcgtctatacatttttaatactggatccgtcacctgaaatggaactcaatgatgtgagtctatttgctcctcttcctctggtaggatagcttttggctgatgtctgtctccgcaaaaatccgtttttttcctggccgttcccaaaacagctcgtatcgtctcttgacaaatcttctccgtttaggaagactttcttttgtgaacacgcaggatgctccaaggcattcgctcgaagaagtgatctcatagtaggctaacgttctatctatttgctcctgaaataatctcgtgtcaatgacgattgagggttggctgaaactgcgggttggatcggacctttctagcgccatgagaagatccatacgaactgtagaccgtttagttgtgaattcgaagggtgcgacaaaacgttcatccaacggtctgcgctgacggttcatgtcagagtccagtttgtccccttcctcttgtttgttgaggattcgttttcggctgcgccaggcagaatgtcctctctttctctttcttgcaaactggtacctgacttgatgccattgcaattgccattgtcttgcaaattgacgatactagtacgggagagaagccgcatgcatgccctcagttcgtctttagtcttcttctctgcgtattaacgaaaatatcttgaccacgtgcatattctatgttgggtctatcttaaacagatgccataaagcattctcggactcttcgtctctagctcggcaccgtaagtcgtggcttttgtttagatgcagaatattttcaatccggtaaaggcgcttgatacctgatttgtgacgatcttatgccaggtcgggtccactctgggaagcgaccatatgagtgcttggttgtacgtaccgctctagatcctgacacgtgtttaggtagtgtcatgactctgatgttcttctcgctctttgtagcctggttgttttaaaacgtaaggaatttctgtgatcgtctcctggcgtgcgccgtgtccctgtctctctgatacgacgatgctggattacatatgtagattctgtcggaaaacgacgcttgtcaaacacgtcgatcgagttcatacgggctccctcgacttgagcacgacgaccgagagatgccccaaaaagatcaagatccgcgctgttggccaaacccaacggaaagcgcctgttgcccacttgattgaaccaatggaaccattatcgtcgtcatcacccaatcgagctgttgcttctcacaacagtctctgtcacccttaccctccagccagttcgttgctcagcgttccatctgatatgcgtgttactcaaaatctgatcttactatttctggtctgttcttagttcacagctctttccgaggtttaattcgaaccgtcaaaggtaccgaaggtgctatgagtcccgtgcctgaatcagaggctgatgaggaaaccttgttaaaagttgaaagccaagatgaaagcttcgatctctcagtgcatcgaagtggagggggtcacacatttcaaggatcttttgagcagtccactgtggatgaagcttccatgaaagaacaatggttagcaaacatcgcctccaagtctcccaacggcttcgagcactgcagagctggtcgaagcgtgcattcagagccggcgtctccgatccatcctcactctcatgagctggcatgtgtgggcactcctcctcagcaatctggatctaccggtcttgatccgatttactcgttcgcacagccaccgtcgcatcccatctatctgattcaccatagtgaagcatatacatatacccgtcttgttcggtcagactcttccaatcatacggactctcgaactgccgcgcaacattcatatgtcctttcatccaactaccctcagcgaatcctacgcctcgagcatagatcccaaaccagaactatacccaatcgagagcggtcaaacagctctcatacgtgctcttctggctcattgtctccaccatctattcggtcactcgaagatggagaagaagcctattcagggctcacggactctgtaagatctcacgagagtgacggatctgtgttcctggcgaattcatatcgatcgaagacggatcatgcagggaaactcaatatttccgagcctcataccgtcctctctccggaaagtcgtgccccattccaacgatctcacgacctcaccagtccgactttcaccaacagccagtcgactacgtctttacagacacctgcaccgaaaaatctttttgatattgagctaactagtggagagaatcaaccgcagaccgtttcgtcccttcacagcaactctcttgcacgcaagtcgactgctccctcccatcatgcatctatagctcccttgatggctccggtcaacgaatctcaaacgaggttgattcattcgtctgataggtcggcgactgggcgggatcatgcttactccgactaagagacttcgcccgagtcagttgtaacaggttggcatgtgaagctcgatgaacagtcccgaaacctgtattgtataatgcgagtacacatcttgcgtctgtactctctttgcgctgtgtgtgtgtgtgtgtgtg

SEQ ID NO: 352 - DNA, 28351 bp, Xanthophyllomyces dendrorhous
  misc_feature (25869)..(25878): n is a, c, g, or t
tgtgtgtgtgtgtgtgtagcgtcctttctctctttctgtctggtcggcagcgtccatttgtagttgtatgtttcccctcttcacgtatctcgttatgaccaaccgtaacacacctttcggttctttctgctgtcttggaccaagctacctttgttccatctagagacccttttcttcttctgattaatgcgaaacgttctcctcataaactactcttaacgatctgtactctcaatctcgtcatacctgtatccttcttcttaaccttcccgcctgtctcaacgttcgctggagtgtatgtgcgcgttctctgttgtctatcttgtgtatatatcaccgtttattttggaaaagaaagaaaatgatatcaattctgcaagagtttgttcttttcttgtcctgtctcgtccatgtcattattacttgagatgtggtagagacggctgaactcgaggttatcaaattattgtggaaacaaacataatttcttcttaacagaatacatgcctctcagaccaggaagaagacgaagaaaggggaaggggaattgatgaatcagagttgagcggtagaaaatcaggtggtttactctgattgaggattctcgaatgctttgaaaatctttacttcttgaagaggtctaccaggtttccagaaacaaatcacgccagcacagagtgatataaaggatcgaaaggattagtggagctcaataggaacgaaccgagtagaagaaaacaaagaggatagctgatagaaactataagactgacttatcatgcgcgtctgtacgtacaactcctagcctatgctccatgaacgcaccaccataggacataagttgagacaagatgagacaaagtaaagattagccggccaaaacacaggttagcgaacgaggcgggcgcttcggaagaggattttgcaaaacgatagagaggagggtccagaacagaggacgaacctttgaacgactttcataccggagctgactcggccaaagatagtatgcttcccgtccaaaaatggtgtcggcgcgagtgtcaagaagaactgagaacctagattggataaagcagtgaaaggacgatgacaacaagagaaggggtacccattgagcggatcattcgcctgagaagacagtgagcagagaaagacgtaacataccgttagaattgggaccagaattagccattgcgagaatacccgcaccgacgaatctcaaatgagggtggatctcgtctgcaaacttttcgccataaatcgatgttcctcctcttcctgtgccagttggatctcctccttgaatcataaagtcctgaacaagacacgcatagtcggagagaacgattcagtttacgtttttttcttcaattaatcgactgactattgcgtcgatgtcgaaatgaggtatggaaaccaacgaaagagacaacaaaagaatccataccgatattattcgatggaagatctggttgttataatatcctcgtttggagagttccagaaagtttttacacgtctgtttgtatgttttgttggatcggaggcagggaagaagttgtcagttaagtgagcaaggattcattcacctctcgatcctctctcggccagagaacccaaacaagaacagaactatctgactcaccttgggagcatgttctgtgtagagctctaggacaatgtcccccatagaggtttgtagagtgacgtactgagcagccattccaaaagacgaaaaggagagagagatggttagcaacgaaagtagaacaggcaagttttgagattatctaatattcactctgtttctattgaccgttatatcatcatctacctactccctcgtctttcatctcatcgcacccgatctctcttcgttcggcttacagacagtgtgtccttcttgatattgtcaggtggagtgtactaagctgaagaaagttttgtcctttgtgtgctcgtcgaccctcgttctctgatggtatcagcctacaccgtccagtccgtttcaacccagttctagcgtgttgagtcccagcctatgggttccattcagcagctcatggatatggtgcgcacatcccttctctatctccgcacaaagtctattgatctgacagtctcgatttctctctgacacttccaaactctatttccatcggatggcctttgaatcagggtgcttcccgagcagcagcggccgccgcgttgactagagccaaaggagacgtcatggaggccgcggtatgctctcaccatcgcaccttctgtgatagccaatagagaacatcgcactaacaagaaaatcgggatactttgactttgtcttcctcctttgtctctcaggagctagtcttctcgggagaattcgatcatctttcagaaggacgaaacgaggatgtacatgtgaggacggttggcttcaaaggatatgatcaaactctagctaggttggctatacttatcctagtcttccggctcgttttccgaaataggatccggctaaagctgaaccgaccgccgagatgtcaggcagtgatatggaagagagcgaggatgatggcgatgaggaactgagcggtattgaagatgtcgattcatacgacgacgataactctatagacgagctcggcacagaggacgactatgacggttcgtcccctttgattgtattcttctcctgcgcgcacaaaagttagccgactcatcgaattcatatgccctatgtttcttatcacgacagaggaaacgtttgacgacactgccgagccgaaaacgagtaaagacccctacgccggtatatttttctcaaaagatcggcaggaaaaggtgattgaggtagatgaggaaccggaagaatttatcttagatgttggtggtactagattcaagggagagttgtgtacatttggagaatggatgagtggctgcccggaaagaggggaacaggagtatctgtttaacctctggagagacgtagccgaacatcctttggtctgtcggtgtggtcgctcatggaagcggacgaagaaagactttgtaagttcttttccttttaaatatatatatatatcaaagaatcgtccataatgtatcaacgtcgttgatcagtgtgtctttgcctttcggtttgtttatgatcattctggaagtagcttcccattcttgtgagtatctttgtctcattcgtcattgatcattgtctttaatagcgttcaccaaacagttcctcttttcgaacacatttgaagccaacgtatcctatctacctgcagcatatctcttctcttataaacaaatcatgtccaaactgttcctcagtcttgtgcatggcctgtggggagctggtagaaggccatctcgggaaggatgtttcccagccatcagaatcaaaggcaaaggtaacagaatctgaaccaaaggatctgttccattgcgcgaatctgcagggagtcttgatgcagataggttcgtccatcatctctaccttttctatccttccttataggcacatcaaaccagctaaaaccaaacgactgatctcacgcgctcaaaacattcgttctctgttcaatcacttaggcttgatcatgctcactcgcctgttctcccaaacttacaacaccttagagtattccaattcccgtcaaatacctgctacatcaccttcttgttcttccccagtgaacaaaaagtcgagacttatgagcgacatgggtccgagaaacacttacgcagggggaaccggctattcagggagcagttctgaagacgtatgtgctaggcttctcttatctcatccgcaatactttcatgatatagtcaacgaaccgaactcatagaagaacttgcttttgtaattatgtttgggatcggatacgaatgagcatacagcgatccggtctgaaggctgcacatgctgagcaaaaacgacaagataagctgctatctacattattatctcaagtccgagtgtatttacccaacctaagacgagacggtggttcgacaacttcggattacttggttcatcctactacgttgacggggatccgaaggaggttcaacatgattctaagtcgactgctgaggaatgactgtatgttctcttagtgttttttatggttcaaatgggagcattgcgcatctgataatattttgtgttacaacagctttaacagatatggctgctagatcgtctttgtattctgaactctttaaatggcttgaagtatgcgcttccttccctcaaaccgaatgcgttgtgatcatattatattttgctaaccgatccttcttcgcatgttattctttcattctgtgtgtctattaattctatcagatagtttccaaccatgaggcactctcggctgcactatccatgccacaaatgattcgagtcggctctaacgttcacaagacgacatcctcggactccagtaagattgtagaaagggaagtcacatatgaaggctcttccggtgagtctgttcgtgccatctcacatacatcaacacattggctgaatggaaagaaagctatactctaaaaggacctcgagagcttttggaaaacatagttatacaagctttagcagctatgaaaggatttcagatggtctgtcgttctactttcatgatcttatcgctatgagacctgatcgaaatctaaccgactgttgcgttctttcacgtgccatcaaacaagactgaagctcgagatttcgatgtaggtttgaccgaaccaagtagttctatcgttgttgcacaacaggatgacgggtcgcttggtttgaatgaaaaactgaaactacaagaattttggtgcgttagattctctaatccgagttctgcataacactttaatcagaaatgaataactaacgttttatcaattcttagccaacgaattatctctacggctaactctattgatcgagccttacttgatcaaaagggttctcagttcatggcccgtctacaatcttctttatcacgccgacacggattatcaatacctacctcagttgatacgaccaccgatgtggactacgaagatatgagaaagatcagagcgaactacgaggcgtgggcgaaggaagtccggtttgaatattgtgatttgtcgatcgagtcgaaagagggtgggtatgatgtagttacttatcgacagtaggttatattcgtttcagttatgaaaataacaacgacaggctcctcactaatgttgatatcgtattctcttctcctctacaaaacatgaccctgtacagcgcatactcaaaagaagcagcgctactccgaggagcgaatagtaggttcttatgtatttgacccatttgatacacacattctgatcacagcgtcggttggtagttcctaagcgatcgctcgcaattgcaaaaggtaagaaatctctcaatcacttcaaggcgtcttgtttttttcctgatagattcgactggctgaccgactgtgaacgtgcgcatctccatgaggcagagctggccgtcttatcaactaacctaccagtagccttcgatggcagtatctttcttcgggttgatgaggtaggtaaaaaattacctacgatacatagatcacgtctcgtgctgattggatcaatctttgatatttgaagactcgagtggacttggtaaaggcactcatcatcgtaagtaatgtcaattctgaaacatcctacgtctcgtaaatctccatcactgaaatgtcatgcggattatagggtcctgcagatactccgtatgcgaatggttgttttctatttgacatctttctacctatgaggtttgtcgctaatttcctccggttgtgttcatcggaatctccttcttcgtttgtctcgtgttctacaatgcatctgcttattgtttcatcttgaatagctacaaccaatcaccaccaatcgtccggacaatgacgactaatggaggacgttatcgtttaggacccaacttgtatggctcaaaacgcttgtttgaattctctcaaggatataatcgctaacaggcatctaatcacgaatgtagatacgcagaaggaaaggtctgcttgagcttactcggcacatattcggggccagtaagatctttctccgtcttcatctctcacgctcgggatggttttgaattctgaatattccatatctcgtcttgtttgatcgcaacagggatgggttccaggcctgagcactctacgtccgtcgatatattcacgaccttgtacatatgagagctcagactgactcttattcgctttcgactttgttcagttcaagtacttatttctatacaggcaatgatcttgaatgacgaaccatacttgaatgaacctggatggcaaaactctggaggttcaaccgcttcgaagcagtacagcgccaatatccgtaggatggtgtatgtatctctacttatattcctctcgagaagatgagtgctgtggtcgttctaacttcagatgattgttttgctgatggttaatgacgtcttgtagagctcatgattctatgcttcataacatcataaatccaccctatccctgtagctccagtttcgatttatctgtaatctaaggaaaacactcgtgctgatctatatgttgtctcggctcttccacttggtttagtcgctgatgtgattcgcactcactttcgcctgaaatcgcgggagatctctgcccaactggatcgatggttcgaggaggatgatggccgtatgtaattgaacaacgttttactttactgtacatgtgctgacaacatgccacttgggaattggttgactcattgtccgttcaagataaaacgaacggcgaaaacacagggaccactgtaccgggaggaaacctcatgagtaagtcacactcgtgctttctcttgtggttctgcccactcgtggcttgtctcttgttgttctgaatgaggtgcttaccattgtacaattatggcgactctttattttatagaagaacatgttcaagagatcaagagacttttcggcaagttggagcgtaacgaacccatcaaggaaagcggccttgcatgaaatcgaacctgctttcatgctctatcggttcgacaatggacttgtattattctaaccactcatgatgtacttttatacaactacgcagtgatctgttgatctgctctacggatgaaagaatgaaggcaatagagagcaaagaagagagacacagagagaggttgagataagagaagatactgagcaagacttctcccaatgttcggatttggccgggaaggccagggtcaatgtcatccatatgatctctcctcgtccttcatttcaccatctccttccacctatatacataaacaaatttggttgaagctatctcgaatggaaaaacaacatctcacaaatcaacctcttcgctcaagtttcagtgagggatcatctcatcgagcacccacaagtttcaattatcccatcaaacgaacgtcatccactccatcagcacctctggtggttggttcagatgtacatactcaaccaaccgtccttcatcaagctacacaaggcaatctaaaatctgttcagacaactggttcgattctaacccggtttgtttcggcgagaacatcttccgatggcgatgatcctcagcatcaacatcactctcaacgaatgtcatttcatataccctcagcttcgatattagaagcgataccagcttccaggtgagtcaaatccctctgcttttgatctttctctctcgcgttgacagcatctccttatctcgaaacgtttctacgccaaagatctggcgggactttgggtagtgtagtgtcggcagacgagcgaaaactagcaaagatccatcgatttcccatgaatgcggatgatgaaacgcataacggtgcacccttgattgactctctttcaccaagcagacggagaactctagatgattgtctggacgtaaggacgaccaactcatcttttgcgatcccatgattcttcacaagggcgtttcgctgacgttggtttctgtgtatactcgaaattgccggatggacacgaacaagctcttctctgggagagcgtccaaaacgatcttggaacggtcatggacatcagatgcaatatttgaagatccttccatcgagtaagattttgttctgcctgatggtcaggagtggacttcttctttctcatcggtttactgaatcagtatactattcatcgggatggcagatgccatggctatcacgagtactcggcgcattggtcctcggtcgtacgttctatcgcatatctacctgatatcaacctgcttgtcaccagccgatcgaatattcaaagctgataggaggaattgcatcggaacatcatgtttgagaaaatcatcagccggaatcgaggataattcgcttatggatacttccctcgcgaacaccctcagaactccgatgggagcagattcaagaacgtcattcacggattctcaagaccgagaaagtaagtgaactctctcttgaacgatcctgccgtttctctttgttctattttctttgggatttacagacgggttcatatccttgtacgggctcggcagatcgttcattcgatcgtggtcgtcgaattggacggtgaagatcgaattatcaaaatgcaagacttgtgggatgggaaagagctatcgtctgggctacgagcagtgagtttctgggtatctttttcatgtcaatagatgtagactaacagatgggcttctgaacggatctcgtttcggtctctttttcccttctcttgcctctaacaaaagattccccggaaggtgaacgccaaaataacgtctgaattctcgggcaaaccgtccaacgattgatctaatccaacacgatgtaacataaaccaagtaatgtgcaaatcaaacgaaagtagtcagcttgatcaatctgtatgcgaaacaatatgttgtcttagggttctgcgtgtatccatgtcatgttttgttcagtatcgctttgaagacaggagtgataaacccagtcttggctgataatacatactcgtacgctcacactcccacttctctctttgttcgttttgcacgagagaaagatggatgtagatacaaaagttcaaagaaagagagagagaggaatgcggatccaggtccgcaatcatatgcgtcggctgttggacgacggtttggaggggtaggccagaacgcctggctgagggttattccaacggtctgtatcgtcgtctttgtcgttctacctggaagaaggtgatggtttctacgaatcagctcgatatactgtttcactggttggtcgtgaagacgaggacaagaatgtttcgaggcatgtatggcgacgggcctgtcgcgctcgcccgttctcatagttaatcgacattctctcaaaggtttgtcagtcttggtttccttctttccgttctcagaatttgcacatatatataatacggttaagcagacgacgctttggtagtcggatccctcaccatacagggccacttgacagctcctacctcggtcccgtccttcccggggagagaagaccatgttacgactctaaagcctgtggttgtgaggagcaatcaagcgtcaggaagacgagcctttcatggtatatatgatctggaagtgagtcacataccgttcttttcataaacaggtcggccctgtcattgaatatcgcgatcaaaattaaaaaacattcgatgaagaacttcatcagacaggtggaacgaagaatcgagtctgactacagccctcaagtctgaaagaatcgatacgtactggctcagtagcttcgagatatatgggaactccttgagattctgcttggtcgattccccactgaaggagcgcttttccaacaccttggccttgatggtcactgtgaacgtagatgagttcctgttcagtcaaagagtgggaaaaacatgaaagtaaaaagatgtaatgaaagaaggggtcagaacatcggagatacaatggcccatagaggaaggaaagctacttaccagaaaccagtgaggtttgcctaggaagtaatcccttcgtttctcaaagatatcttttttgaaagcatcgatgaacgacatgtcgaacccatctccatcctcgaaatcaagtttactcgatttagacctttccagcttttctgctctctccagtttcgcagctttctcttcgggaagaagctctccgccagtcgatgttctgtcgacaggagaccagtagaaggcggaaccgacaattttggatggatcggaggacagggtggctttaacaaatcggtagtacggaggatcgaacggcgcttctctcgttcgaaggttgactcctcttgctatgtgtatgagagcatatccgttgatgtctcagttaaaatttccttttctttctacccggagagtaagacacacaaagaatcacgaagaatatgatgactgaccgatccgaatatctagcgcaggttgcttctctactggttccattcttcgaacgataggttcatgtttgaaagcattgatcctagttgcctctatctgaggccagtctgccaatgtagcaggctcaatgatcacttggggtttgtgcatcttgatgttcaaccaagtgtcgcaacggtcgagattcttttttcttcttttggtcgagaaaaaaaaacggcttcgcttcgcacgcgcgcgggggatcacccgcatattaagcggtatgacgctcatcaaccggccaagtgttcttcatcataggtgaaggttaaaacggaatggataggaggagctaaccacgtttttattttaattcgacttgggcagcctcgtccatagtgtctgatggttatatcgtcatagaaaggcagcgcctggcgggttcgtcatggccgtgatcatctgctttgttagacattgtccatcagtcacctcaatgacagtttcccgacgccatcactaagacacaaacgtatccagcacgccatgtccatcactgaagaaggtagggtctcgtcgagccagtgcaaccagagttacagatgaacatcaggccttgatcagacccgacttatgaatatggccgttattgtacacttcttggtgctcctcgagctgctctttcgtgtttttcactttctttccggatcaaacgagactgctcgtgtatctatctgtgcttgccatatgagcatcccatgcctctgctcaaatgatgctggagctacgatccatcagagacgacacaaaacggggttgtatgaactctacatttcctaatgttattggaattttctgtaatgcgttcttcatctttctctaatgcttttttgtagtccgtcttttcaaccttgccagcgtttcgcgtgtcttctttctcctttgacggtcatcactttcttctctcttctcgttctttcttccgtccttccttctctctcttcgtctgaacatcagcatcatcatgggcatatcagattacctcgttctgggtcagttctgtcttttgtttgattcttatcttcttgccggcggtcgcctgtcttgggtatatcatcagcaatgagaaacatgatgttccccccgcgtcaatcactgaccttttggtcctctacttctttcctgtcgaattgatcctgattgatacgtgtgccggctgcttaacagctttcacgcatcctgtaggtgttttatcgtatgcttcatgttgatgtttagtcacgcggactgacctggccggttgattttctgtatgatcgcttgtgctaccgtctttcttggaaatccttcccatcaggccgatctgcgagctttaatgcagtacgcgatctggcatgagcctcgaaggaatatcactgcacaggaggaacatgcaacatccggttgggaccgagaaactatgaaggaatgttggaagtatttggatctgacttcaagaagtttcgcagctgtcatcaaagagttggacggagatcttacccgagtcgtacgtgttttcatcttctctctcctttgagatctggtcgcctccgcattttcttgttgcagaagggtcagaagctgacaacaccatctctactgttcgggacacggctagatctgtttattctatctcgctcttcgaggactggataccattgaggatgacatgagtctatctaatgatgtgaagcttcccctgcttcggacattctgggaaaagcttgactcccctgggtggacctttactggatccggtccaaatgagaaggatagagagcttcttgttcacttcgatgtggccatcgccgagtttgccaacttggacgtcaagtgagtttccctttatggttggatcatccgctcgacagactcgaaacgctcatcactttggtctgcttgatgaacagctctcggaacgtcattcgagacatcactcgcaagatgggtaacggtatggccgactttgcttctctctctacgccctccaagcctgtggccgaggtccagtcgaccgaagatttcaacctatactgtcattacgtcgctggactcgtcggcgagggactctcccgactctttgtcgcgaccgagaaggaacgaccattcttggccaaccagatggtactttcaaactcgttcggactccttctccaaaagacaaacatccttcgagatattcgggaggacgccgacgaaggtcgtggcttctggccaagagagatctgggccaacccgatctatactgcgcatgcaccgggcacaaggtttaactcgttgactgacctggtcaagaaagaaaacatcgacaaaggatcaatgtgggtgttgagtgcgatgacactcgacgcgatcacccatactaccgacgcactggactacctctcacttctaaagaaccagagtgttttcaacttttgtgctatcccggctgtcatgtcgattgcaacgttggagctatgcttcatgaacccagcggtgttccaacgaaacataaaaatcagaaagggagaagccgtcgaggtgcgttcgcgcgttctgtttctacctttcataacattggaggttcttgactcttaagcgtcttccaatctgatgcctccaattatcatcatttttgtcttttttgctttcctcttgtttcttttcggcgtgattcaatccagctcattatgaagtgcaacaaccctcgggaggtggcatacatgtttagagattatgctcgaaagattcatgccaaggctattcctacagatcctaacttcatcaagttgagcgttgcgtgtggtcgagtgagttgatcgatcgatccatcttttgttttgatcatcgcgagacttgactgatcgattactcaaaacatcatcgcttctccttcttgctctctagatcgaacaatgggctgagcactgtatgttcctccgcccctccttcaagtttcctctcgcttcatctttgttgagaagagggatctgatgtatctttctttgttcggatcagactacccctcatttatgatgattcggccttcgaatgaccctcaaaaccccgcaccctcaacggcgcttgaccctttctcaggagacgctcgtttaaggatagcctctaagaaggctgagatcaccgccgctgctcttgtcaggaagaaagcccgggatcacgctaagtggagagagtccaagggattgcctccgagcgatccgaacaagccggacaactcggaggatgttaattgggtattgatcggcggtatgatcgttggattgttgctcgtgatgggcgtgctcggtttggctatcgcttgggttgttcttcaggtgcgttcttccaaagagcctttctctcatgaacacgcacataggttgatctaattctatcttactctgtcatacagtttgagcaataatctcaagattctagtccatcctttcgctcaacgatctgcttcttctccttctccttctccgtcttctctggtttcttttcttactttctgggatcttccttcttgaatcctccgatccaatgtaatctgcataccctcgctttagtagaaaccgatccttcattcgatcttggcgaaaatctaagcaaagagaatcacttttgtctaataaaatttcctttaaagagtcggctttttcttgtggcgaagcttcatcccgtcttcctctggaccatctcttctcaatattctttgtgctactatatgatcaagttctttgaaatcaaagaagaacatgtatttgattttgaggttccaagaatacaaccggcccaagtcgttcttcgcagttttcatcagacagcacatatctctcctcctctctatagaagccgtatggggccaatcgactctcatgggtagaccgtgcccttttgacacggggagaaagagaacgaaaggacacttgaccgattcgttaataaagccgtccccaccttttctttaatggcaattcaagaagagaaaaacaacccctgcgcgcactcgagtagtcgatcagaccttccgaacgacagatatcatttgctgaaatcgaccggattttaaagctgctgccaggtcggtgaatccccctaggtgatctccttgtacaaagatgttgggcacggacttttcgacccggatgagaacgtcgtgaagagtttgaaaaagattatcaacataatgtgtctttttttcttttttctttcgtaactctctagagaacgaggagacgtacggtctgatttgttatcgaacgcaaataatccaggatttcttccccatcatctagttcgtctagtctggtacggcatatacacacaccccatggagaaagacgaacggcattaagagctgacttcccaccgatttatgattctatgcgtagaggaaaggctgactcgtagactttgacggattgaccgacgggaagatcaacgttctccaacactctgtgtgcttgcttacagtatctgttgtatacaatatcaatcgatcgtcgtccgttcagaaggtgtggacgaacagagtggagtagagaagagagaaacgaagaagtcgatatctggacgaacgggcaccatgtctttgagaacacggcaataaagtcttctttgagtgctttatcaactaaagcttttggagagagttttgatgagggataggagccctgtgaagcattcaagaggatagactacaagtcagaatagacagcatcggaaagagagaaatcagcggaccgaaaatgcgaacccagagagagaactgcctggctgaagagatcggacgagcaggaatccttcttgagccggatagaaacaaggtctttgctagtgcacgggtcgacatatgagagcgagaatgatgagagacgagaacgagaacgatggtgacgatgatgataggatgtgagtgagagagacgacggaaggtagaacagggaggtgaaggtgtttttcgattgcacggccgacaaccatcatccatcccatccgacatccatcagtcattcatccatgccgtcgataacaaagacaaacaaaccaacgagctctgctgtgaagaagccattcgttcaacgaggtcctcatccagctgacgtcaagttgccgtaccttcacaagcgattgcacactcagatccaggacggccatctcttcaacgcggtcaagacgtgtgacaacagttcgtccttcctttctctccttttctttgtgtccacatcgttctgctccctctcctttggtcgtgtgaggctaagatgatcgtcttatgaacacaaatatagtcctcgctctttcgcctggttcctcactcgctctgctcacaaagctctccctcctccttcatatcgaccaatacacctctgcgcttactctgctcgactccatcgccaaggatggaacggtagccccttcaacaggcttcgagcgagcttactgcctctatcgactaggaagagaaaaagaggcaagcgaggtcctaggatctttagagggtgatcaatttgaaggagatgggaaagagtttttggaggcccagctggttcgtttaactttttccatcctagtacgagaagccctttctcctccgctcggagtttgcttcccttgttctcaggatttttcaatcctattcggctttatcaagaaaagctttttctgacgtgaaaagcatgtttgtctccttggaacaggcctaccgagcaaacgattatgctaccgcgtccgacatctacaactctcttctgactcgatactctgatgtgagtatcaccaccgtctgcctctcgttctagaagttgattactctggcaaattggctgatacatcttatcaaaaacgttcatccggttgatcgtaggatcacccggctcacgcagatatcctagcaaaccaaacgctcgctagttcccttgctgatttcctcacaaccggctacctcaatcctctacgtgaagctgaggatgaactcgacggcgatcttgacacgctagaagaatctatccctactttacctcccaagtccggccaaaacgtgaatgtcggagatatcgaggaaacgtttgatagtcagcaggtgaagaaaaagaaaaggagacatcgattaccaaaaggtgtgatcgaaagctcgaatcaacctttcgaggaagacgtaagttcgggatcctattttctttctcttcctcacattaccttacacgtctgatcttctgacattttgtgaacctctttcttctggatttgttttccgttattgattcgttttcgtcttgtcagcccgaacgatggattccacttcgatctagggtgaaccaaccgtcagccttgactcagatgagcaatcgacgttcagctccttctaaaggagctgttggcaagaagaaagaaggaatgggaactggaatgacacagggatcgtacggacctgcacctgggacaccctcggcggctagtggcggaggagggaagaaaaagaagggccgaaagtaaaggatgagaaatggaagcaggggcgttttgaactaaaacagggaagtacggagcgaggtgttttgatgtaagttccgtaggatcataaataacgattaattaaatagaagaagtgaagaagggaagcagagcccctaatctagtgggatcagccatcatctatgggccaaagaagaaattcttgctagtttcttcttttctaaaggatcagatagagagaagagttatctagattgtctacaagatggcggaaagttttatggaaatgggaactaagttgggatacagacaaagagatacgaaagaaaaatgaaagaacaaagcaagaaacaataataggtgatgaactgtggggaagagtggcaggaaagaagcggtttgctttattaccacgagttaacagtgttgaggggagtgccttcgttgatccagactcttgcgttattgatttgttcaatctcaacgacctgatgtttacacaaaatcaataacatggaaaattcagtctttgtatcgtctgatcaaaatgtagagaaagatgtacctcaagcattccgttaacgttgcaagcgaaatgaggagtgagctgacgcagtacacaagacggatgttaggtaagcatttgacatttagaccaagacagaagaagaaaggaagtgaaggaggcaaaacacgaactgtgacatcgtcagagttcatcaagtaaggatcgatctctgagctacattcgttgtcgaatacatccagacctgcacctgcgatatgacctgacttcaaagcttcgaccagtgcagacgtgtcgatgactgtttgaaccgttccaattgattccacgacgtgtcgaatctctcaataagcgatgatcatacagaggaagaggaagcgaaggaaagagatatagacaaaccttgtccacgagcagtgttgatgatgtaacttcctctgggcatggaagagatctccttctcacccaccatcccttccgtcgatgggttcaacggcacatggatcgagagcacgtcgatgttttcgaagaacttatgagcaagcacagaaacacgctcggaagagttagcagttgaggtacatgatagttgattttcattcgacaaagaaaccgaaccaacctcttctttggaagcgatataagttgcaccagcggcctggctatctggaagctgtcgtctgttgtggtagcagatggtcattcccatagaagttaaatatcgagcgacgtgctattaattaaaataaatgacgagtgaggaaggaagaaatgcagtcaggatagatatcttgtccaacgagagatgaagccaaaggggaataacttacacgcccgatgctgcccatacctaagagttgagagccaaagaaggacatcagaagagattatcatccagttcgcgaacgagatgtccaaagaaagaatacgcacccaagatcccgactcgaagaccaagctgagatcgacccattgccttgttggcaatagatgttcctccgacctcccattcacctctacggaccgaccgctcggcagccgtcgtctttcggagggtcgtcaacgtcaagataacctataaccaagaaaagagacaccggtagtgtgagtgatgttagatttgttgttgtgtgtttttaacctcgatgactacttacggcatgcagcgctgtaggctcagcgaccgcctcaggagtattgctataccaaactttgtgttcgctcaaaaatttgactggcaccttgtcgaatccctacggttggcaagcgtaggagcaagagaaatgcaaagacaaacgaagttgagctcgaaaatagttcactggagtatttccaaaagacaaaagataacagaatcggaaaacataccgctccaggaccacagataagcttgagagttccctccgggacaaaaggcggcaagaacgggatccagagcgtctcgtctgtgggaagaagctgatagactcgattgatccagaagacttcagaggagaaaggtatagaacaaacaaaagaagattaggttttgaaggacagaaagctgtgctgcctctaaggaaagagaataccaaaagactatgaatcatacgcacgaacacaatggaatcctccattctgaatggccgaagactttacccagtccaaaatggcagaccttccgatgacttcatctgggatgtaccagacctctgtttgaagatggagaagtaggaaaagcaagaaaaaggggaccagcaggagatatgaaggccatcacgataacgatagaaaaaacaaacaagcaaacaaaagaaaagttgttctagagtgtgagattctgcgatctctctgcatcacgaatcagaaaaaacaggtacggaccaactttgccagatttctggagctcattcagctctttctgggctttttcagattcggggcgtcctgtcggagagaaggaggcaaagatacggaagaggaagataacgagtaagaaagatgttgacggctatcgtgagatcaagagaaatacatgaagccttgactgaccgacagagaagatgttgatcatgttccgagaagggattggtataggaatgagtgcaattgagtgactagataagaaagactgaaagaaagatgtatcacttcatgaaccaaaaaaaaaagtcgtaggagtaaaaagaacgcccactggtaaattcttggggatttaggcgttcgccgaggggagatcactcggcactcggcgttgggctcggcccggtctctgacgccgacgactgcggttggccggcacaggcagctttgcacagccttgaggtcacctgatcatgcgtaaccatccgtgccactttgccttcaactggtccgtcttccggtctctgtgtcgattctctttttttgaccagactcgctcagacaaagtacaacaagagttgtggtacgcctcgctatgtgtacctagattctctttgaatagtactgactatctttgtgctgccacgtcatctatctagccaagcatcttcacgttacatatatactctcattagctatggctagaggaaaccagcgagataaagctcgtgaaaagaacgagaaggcaaagtgagctagcttccttgcgttgtgtgtctattcacacacatacagagatcattattcgcggtcttccccaattcggtctctttgggaggacagggaaaacacgactaacaagtgtcttcgaacattttctatcctggtttgatctgacaatagggcggccgagaagggaaagttgaccggtaaccctcaggctcgaagggaagcgtgagttcaaaccgtctgcaacctctcactatcttgatcggcatagacatcacttgcttggttccgagctgacataccgcttgtggctttgtttcgatctggtttcattcaatcaaatttcattcctcgggctttcacttgatggacgcgaatctcgatcatagggacgcggccgctcttcaagccaagattgctgtacgtatcctttttcgccttccactccaacgtcctagctgaccatagactcatgcgctcactccccctcccttcgtttgaaactcggaaaatctcacaggctaagcaaaaggctgctgctgggatagtagacgataagccggcgggacctaaatcgttcattaaaccgaaataaattctgcccctcccccttcccatataatcatttcattctgaggagaatcaatccacaagtcgaccacgcgtcgagctatctttttgttcttttcttttttgatctggagataattcagacctaaacactgaaccaacaagtattgaacataacgaagaaaagacaaggagagaagctgaagaatcggagagaagatcagagaaggatataaaagatctaattggggttgaaattctaagagtcttggagagctgaaacccaagcctgatctactcatctaaagataaagggagaaagagaagcttacaccaaaaaagacttaggaaaaaattacggagacatgggcgaaggagaggtggttgtatgcgtgcgagtttttgagggtgtacaaatgtgattcgacctagagggatggacgatcaaaggaaagaaaggaagagaaaagaaagaggttgagtggcacaagaatctccttgttgttccctctaagcggaagtaacagaagcactctgtgtggacccatgaggagccctctggacgtccttcagagagtccacatgcgacgggatcacaaccggatcatcctttttatcgtcttctggattagatgtttggccttcagactcattctcggatggatcgacgagcagttgggccgacatgagctggtagaattttgaacttgaatcgacagactgcatatcccacattgaaacaacggtcagcccatgattcacatcgaaccgcgcccaaagagaacccaaggaggacaaaccaattcatcaaacttgccgtcctccacaacctctccgccttcaatgacaaccactctgtcagcttgtgcgatactcgataatctgtgggccaccaggatgactgttgacgttctgttttcaaggatttttgatatcgctttgttgacctgtatgtgtccaagacaaaaggttaccccgtcagtgaatccaggaaacttgaatgagatgagggaagctttgactaacaagttgctcagatgctgtgtccagagccgacgtctaagacacatcaagaaaacgggccatcagctttcttttctcttgtaactatgatatcacgtaccagaagacagatcagtttaagagttcaacttacggcttcatctaagagtaagattctaggttttctgatcaacgccctcgcgatcgacaatctttgtttctggccctataaatttgcagacatacatgccagttcagcaaaatatgaatgttctagcagtaaatgagatcccaagccaaaaagaacatagagggagaagaacaaaccccggagagagaactcttggaaacaagagtatcgaatccgttatccaactgggagataaaatcctcgcagcctgcttcccttgcggcttcttcgacctctgctcttgtcgcgattccccctggctttccataagcgatgctaaagatttgaagagtacgaacagagcgtggccatcaggatttgtaggaaacaaaaagagaaagaaagagacaacgagagtagtgcacagagggacaaacttatcaaagatcgtgccggtaaagacaatgctctcctgtgatacaagtcccatagcatttctccaagaagacatggtgaagtttgtgatgtctagttgatatccaattttagttccaaaagcgcgcaggtgaaaaaaaagggtagatgagtgtatgttttaccgagccaagctcggaagatagacaggattaccttcgccgtcataagagatggttccggaggtaggttcatagaaccctgttttcagaatcccaacaaacaccacaatttgattaataacgatacctgaatctgaacatatagaaaaaaaagtgatagaagaaaagtggaagaaaccccggcaacttactcaagatcaagttttgaatcgagctctttccacttccactcccaccgacgatagccacgctttctcccttcttgacttccaggttgatctttttcaggatcgtcgcttcaggtctcgatgggtaagaaaacgcgatatccttcaagacgatcgatcctgtccgagtgggtgagagcttggttccctgagtaggtgagacttgaggttttcgatcaatcagttcaaacactcgttctcctgctccgagtcctttgtttaggccagcccagaaaccgatcagaccacccatagcggcatcaaccatgtactgttgttgttgttgttggtttcatccgttttccattcatccgtcagttctcacatagaaacacagaacaaggagagaaatacgaaagaacaaacctggtagatcaacaaagacgtgagactgcccaattcgaggttaccctggtgaaccatatatccacctatcccggttgtaaagagcgcaaatgcgatcaaaagataattagaatttggatacatgaaaatggttaaatgaaccaaagggaagagggagagagcttaccgaacaaaacgatagccatctcactggcgtgatctgagattcgaccgtataagttttcgaacaacccatagatccaaatctctctaatgaacgattagacatcgaaagaaaatcacatgtcagcaatcaaagctagctaaaactccagtacgcgtacaagacggcatcgagaactagacgaaccgacgagcgatctggaagatggtgtctactttcttccctaacatatttgtctctaattcttgtgccgagtaagcggcgattattctagccgcgcccaacttttcttctgcgacctgtcagagatgttccaagggaagaaaaggcggaaagccatcagaaaccagagttgtttcaaagatgaataaaaaaaggacaggagtaaccttcgtcatctctcccacagcctcttgagtcatttttccaacatttcgctggtactctccgtatttcttcgaaagaacgaatgtggcaggcgccgcgatcatcgctacaaatgttaccggtacgctgatgtaaagctgttcagaaaagtcaaaggtaagtaaacatcaagaagacaggtcttggggaatctatagaagataccgctgttgaagaagaaagaacggaacggaccatgactccaaaacctatacttcccatcaaaaggttctgtgcgcctagaggcaccggagtaaatatacagaccgattgtcagtttttggtctataaacaatgatagaaagagtatcagacaagaaaagggaatggcgaattattaccctgagaaaggttcgaactgatactctcgcctaggatggccgagtcattggataatctagaaacaatgtttcctgctctagaatctgtgaactcaatctcttgatgcaacacggacgcgtaggcctgtttacgaagtctagcaacgatccgttcaccgccttgaggcagaagagaagataaaaggaaaatgaaagcttagttgttggtggtgatggtcaaaaagaagagctgtagagagcgcactcattccaatgagagtcgatcgaccgagagcagccagagcgccaacgacgatgattccacccagagtggttcctgtccagaacaagctgagccccatgaaggtcgtctgtcgagatacagttttgatagtgagctgtctggtcagcagagaaagaacagaagaatagaacgaacctcgggtggaatctcttgaccgaaatagttcattaactcgcccacacaataaggcagtatgtttccgcacacactcgcaatcaccaaacactatcatcggaagaaagtagcgagtagtgataagaattaaatcgacgagagctcagtcagttcttccgtcgcgtttatagagagaaagaggaaaggacgtacgatcaaacccaaagtcaaaggtttcttctccgtctttgcgagctcaaagagtttcttgagactggtcttttgctcttctcccaagattggtgctccgcctttaccgccatagttgaggtcctttttgaactgtgcgagttggaagaactgtctgattcgagagtaggaagacgatatagccggtgccgctgctgttgttgttgccgttgtcggcatggacgagacagtagacgacgcagcatctttggacgtaggaggaagggaggcaaaatatttttggtttatgatggggaacggaagccaggtagattgaggatttgtccagatgaacgactgggtcggcaatggaagtttcggcctgcgttggggttgaacatttgagaacatccggacgaagcagccgggaggaaacatttttgctctcaacgccatctgaggaagatggccgacatggctgaccgatcgtccggccaacatgatggctttgaagagaaaaaagagagagaaaggaaagggagaaacgtatccgaagaaaagaatagctggacttgatcgaggtcggatgtggacgagtcaagcggtgagcagagtgtttccgacgtgtgtagtctgattgtaacgacctgtattctttttttgtagtcttgctgtagtctggctgtagttcagctctagtcatgctgcagtctcatagtcctcttttagcctccatctctctagtcagccttgacatcgaatgtcctgctctctctccagagtcccttcatgtttcctctcgtcctcgcagctgactgtctgtacagctacgtattctgatccgacatctagtggatgtttgctggtgtgtcttgcctcgttcccatctgtctatactagcatccctccggccgccacggacgccgtaaccatgacggtatcgtaaccgagatgtaaccatgagtggtgccgatggccgatcgtcatcaatcttcccctccgtcaaggcaacatactttgttctttatagtcatcgaccatttccttcattcttttcgtacatctatctcttttagaattctcatctgtctcaccatgtttgctcgtaaagctctgagttccgcccggcctgtagccaccaggttgttttcgtctaaagcgtccgcacctttgtcgtccggacgagcgttcggatacgctgccgcatccgctcttggtcttaccgtcggttacaactacgtcaactctggatcgaccagtcctgcgttgggtaggttgggtaacgtcgtccacctcgatgggccgacctcgaatacccctccaaagtctggtaagtcatcttcgggttttgtttctactttatatttgtgatccgagcagaggtcgcgtgtgtgtgtgtgtgtgnnnnnnnnnntgtgtgtgtgcaaacgggaaggaaaagtcaacgtatagctgacaaatcgattcgatccgatccaatccgctccgctccgatcgcacctttcaactcaatcagctcacccggatagtaaggcaaacccaaacgtttctcgagatacgaaaccgtccaccgggattgagcccgcagaggcttcgtctttggcctcgacgaaatctcgagctggaggtggggaagagccaacggctgatataaccgaaatccctcagcacaagaagaaagtttcagaaaagacccggtcggcaaaaccatcgaccgggatcgagcctgtcgaagtttcctcgaaagcttcgacgatgtctagggttggaggtggagaggaggacgggccggtccggaaggagaagaagccagagggaaagaagagcgaaaagattgatgggaaggacgagcccggggtatcccccgaggaaaagacgagcggggcaaccgagaagggtgctgatgaagaggacaagtctcagcaggccgcctacaatgaagagactggcgagatcaactgggattgtcctgtgcgtagaagttttcgtttcttctccttctccttctcgtctttcatttcttttctcttttcttgcgcatctagctgagacaatccacattcaatgctctctatagtgcctaggaggaatggcccacggaccttgcggtccggaattcaaagaggctttctcgtgctttgttcactctgaccaagaacccaagggagtggaatgtgtagagaagttcaaggacatgcaaaactgtttccgagctcatcctgacgtctatggtgaaggttcgtttgaaattcttctttttgatctttttttttgtttacttttacctccattctcttttgaagatgagaaacgtttctggcttgtttttgacaatgcaaacacatgctttctctttctgttgccactcttgtagagatcacggacgatgaggagagctcggacgttaaagaccaacaggccgaccagatgggacacttggaggaggaggctaaatcccaagacgcactttcctccgccgacaagaaggaggatgctgctgctaccgaaaagactgagaagaaggagaagaaggagaagaaggagaagaaggagaagaaggagaagaaggaacaaaagtagatggaagaagtccaagaggaacggtttcactgtattcaaaccaaaacccaaagtccaagacttaaaagacggaagacaagagatgaaagatggcaaaaattaacatgtcagacacgtgcaaggcgacgaaggagtacaggacacatgcaataacggaagagaagagactgaaaaacgaattgagattaatagactcttgaacttgctaaaaacattcaacatcgctctgtccaaaacttttctgggggaagaccagtcaagtcacaccatgatcgacgtcttccgtccgaccgtcccttcatttatctgcctctgaaattcatcgatgtgttgtcacccggtgttgatatcatcgttctttcaaaataagctcgttctgattcgtcgtctggaccttggaaaacatttcctctttaaagttccagtgcttctgtgctcaagcttagagatccgtgttcgagatgaagacagaataacgatgtagacgaacgttgggtacccttctctctctatttttgcttgattacttacttttttgatggatcaggggcggtgctcatctcatccctcatcgtgctcagttcggtttcatcggaacaacattctgttccgcttttttctttccttttcgttttccttttctctttttgagttcagatctgatcaggaaaacaataacgagaacatgaacgttggatgataaggaataagagtgagaagggtatactgaagcatgatacacaacttggaattcggatatagcaatcgacggggaaagagaaagagagcgcgcgcgaggtagagatggatgtaagggagatgaattgggcataagacagtgaaagagataacgaacggggattggccgatggtcatttatgtgtatatgtacagatagatgtgtttccatctacgtctagacatgaagatacacagacacgggattagaacaaaatacaattaacgagcccagaccgcggcgtacgcacgagtcaaggagaaaagaaagatgggataccggcggttgtagcgtcaatgtagagaggaatcaatgtcggtgcgagcaggggttaaacaataataaaaaaagggctatttagccgagagtctcgacacgggcgagcgtaggaggcgtgttttgatgtgagcaaggtttttgagtgatgactcgtttgtatgactacactttctgctccgtccttcttcttcttcttcttcttcctccaaactacctttcccttccggacttgccatccatatcctcatctgtctcttttccacacacacacacacacacacacacacac

SEQ ID NO: 353 - DNA, 1978 bp, Xanthophyllomyces dendrorhous
acacacacacacgctcacacgcatacgcatacgcacacagacgtatatacctgggaataggttttttcaccggctcctctctctatcttctctagttcttgctggatccatttagcgaatcacactatttttctctcctcaaccctcagccaaccctcgggagaagtctcgagtcaatgtctttctttgtgaagctctttgggagctgctgtggagctcgttcaaaatcctcttctgtaagcctctttctctcgtctctgtgcctttagggctctatgctgaactgaagaaaattgatgatctgggctttgatgggcgtggctgatgggatttatattatcaattctccgatagaaggatccatcagagagaacacctctcgtggaacctacatctgaagtgaactctttgtgagtctcaagacgattgtattctgttcttcacgaacaccagccctttcaaattcttactctccttcatactgttcttaattttttctttctctttctcctttccttttctcgtttgtttggcaaactagatcgcccaacttatcggtcacgcattcacaagacctcgcattagaaagagaaagaaggaaggccaacctgttgaaacttcaacacgccgtggagacgttcgtccttatcgttctctttcatttcttctgaggctttcttgtcagcgtatactgaggtgtatatgtgcatttggatcggaaactacaaacatcaaacaaacaaacaaaatcactattaaaagtgatctagcgtcgatgccgggaaacatcgcaccacctggctcttcgattgttagctcgccaagcttccgatcgagatccttaagcgggagtgtctctggccggttaagtccgtccgggtcggatgaagtaggtgaacaggagacgttgccgaaaaagtctgcattgagagaggtcagtttggtggatttcttttttggggggtgcatacttgatcattatgtgtggatgttgttgctgaccgagaagttgaaaacttttcgtttcgggcgcggacggggtgcatacagtcgttttcgtcatcacaagtcggtcacgtgaaaacactgttgcctccttcatcgccttctgctagtacgtcggggttggggacgggcatcagcagtggtacgggtcgatcgagtaagaagaaaaaaggactaaagacgtacaagcccggagctgggtggtgatcaaagtgtcggagaggacttgataactccctgatctaatttttccttattctctgtgtaaatagttttctttcgtttttgtgctctgttcattgcctctcttcgtaacgtctctttgtagagtacaactctttctatcctgccttccattcttgtgtgtgtgaatatttcttacagcaacgaaaaaaaaagaaagaaaagaagaagccttttcttttgcattcccctactcttcttccatatctgtcccgctttagctctccctcatatgttgttctctgtctacctacgatttaccgtttgctgttttctggatctattatacctatctagactctgaatgtgatgtcctctcctctctcccctcatttcttctcgattcaatttaaatgatatccggatctgtattgactgatcatgaagagaagaggcaagaggaacggtggaagaaagaaaagaaaaaaaaaaaggtgaaaagacaaagatgacattgtgtcgtgatgatttgcatttcttgtatatatacatagatatgtattatttttattattcttgttagtgatacaatgaaattacaaacaaattgtttaacgaggagaagaaacagacaacggagacccaaaggaaaccgaatagagaaggcaaggaagccacgatgggtatgcacgtgatacttaacccgtatccctgacactgtcagggatgtgacctgagtgttacacctcagtaaccttcttttggttctgttgtttctcctgcctcggta

SEQ ID NO: 354 - DNA, 349 bp, Xanthophyllomyces dendrorhous
ctgaacccggaccctgacagttagggttagttgaacgctatggaagcatgtgcgtgaggaaaccaaagaggagagaaagaaataaccgacgataaaaagcgataacctggcgcgaatggcgtgagaacagaggtgaatgatttgcaacgaccgaagaacgccaccatgagctcgatcagggcgatcgtgaggggcacacgggcgccacttgctcagagagctcattaccaatgtcgtcataagatccatagtagctcggacatctgggctttggccgagtgcagtgggacgcagcggatacaaatgaccgatgcgcagtcaggtatactttacaacttcctgttccgcc

SEQ ID NO: 355 - DNA, 4804 bp, Xanthophyllomyces dendrorhous
gttcctgaccgccccctgagccgcccgccctgatgggtgccctccgagctcccaatgctctgtccctctgaggatttcgaatgtttcctcattccccccggctttttctttctatttcaacccataatctttcccttttgtgccgaccttgtcgccttccagttctagcgacactcaaagcttaaagacaaagagaaagacgacatcaacaacaactttagcgaccaggacagtgtcgacaaagaggaagaagggaaaagttaaaacggagagtacatccatccgatatcgatatcgatagagtagacgacttctcttcttcccacagccttctctcctttttcgtattccttccgatcaggatcttttcttatctttcccgcacacagtatcttccaacccttcacgtccattctttcttctccgtccatcccttcgttctctttgtgtgtgaataaaatttcatctctctctactcctttatcccctttgctgcctagtcctctatgtcggcccgccctgctgcctcatcgacggcggaccaacatccaggcgcaggttacgcccgtctggccttatctagcccaccagatgtcaccgatgcggtaccgaccccaccgttgaccccaccgggccatcggccgatgggttcctctacctgggcaggactcgactggaagtcgatatgcgaccagctctgtcaggaaccttatcaccatgtcgtctcgccagatagactcttgccggacggtttgggagactataccgtcgtgcctggagggctccttgggaagggaaagtttagcgtcgtctatcgggccgagaaagcaggaaagcaggtgagcaagctctctctttctctctcttcttcttcttcttcttcttcttcttcttcttgcttcttcaatccttcttggtcgtcccgttctgaccgttgagatttcttccgtatagtacgccatcaagcacactccgctccatccgcatcatccgttgatcgcgaccaggttactccgggaaccgacgttgctcgcccagctgccgccccatccgaatctcatcagagtgttcgaaacgatcaagaccgatggtcacttctatctcgtcggttcgtctcgctctccttcgtcgtaacccccggtcgcttcgagcttccctctcttcttgctttctctatcgttcgcaagagctttcgaagaattcatccgaacctcgggacccatcttcgtcctttctcaacaatgtgtctaacctcgtttgcttccctccttgaactacctcagaggaatacttgccgtcccatgtctctctagacgcactatgcgcaacatacccttccgatagattacctaccgagctttgctggaagatcttcgagcagctcatcagcgtcgtcagagagggtatgcatgctcatcatgtctgccaccgagatatcaagccaggtgcgctccgttcatgttccttaagcctcgttcacatcgatctgcctgctgattcgttctcttctccttgtcgtctttgcctcttctgaagaaaacgtcctgatcgatccgagtaccggtctgatcaccctgattgacctcggtctagccacccacttttcaacatcgtctcctaagttgaccacctgttgtggatcccccgcttttcactccccagagatcgtcctcgccctctcccgtccaccgggcgaagtcacctactggggtccagaactcgacatatggtgtgtcgctctgacggtcctcagatgttggacaggtaggcgttatccactcggaaccggtcacaagaacctaacgaccatgcacggcagagcacaagatctctttggatggatcagatcagcgctcatgacacccgcccagccagatggcacgctgggcaaaaggtcggaagagagaaaattgagagactggctctcttccttcttggacattgattctcatcgcagacaggccgcctttaatgggttcgaattcggctcagagatgaaagctcgtctggatgggttccaacgagagagaggctgtgagtctcttgtttctttagtctttctgacctgatgtctttttctgtctcttcatcatttctcgttcaaacatgatgtctgatatcatcctccctgcctttatagtcaaacaatgcatctttcatcattgccctgtcaaacacactcttcctctcacgctcatcccggacggaccgagccattctgaacacagcccgatcccaccaaaatccaatagacctcctagaagctcaacgctcgttatcagacatcctcccgatcaatcatccgccaagacgatctcttacttcaaggtatgtggttccttcactctcatcttctttccgttttcttcgtacacagggatattccaagctgatcatccatcacctctcttgctattccatcgctcttcactagtacgctttgagatgctctagtatcttgtaccatagtcggtcggtttcttcccgaacacttctctcatcccctcttcctcctacccagacttcctcttctccttcctcactaaacccggtctcatcgattgagaacctcgccggatcgactgaaccagacctcgacatacttcagtgtgtggctgtcttgccggcagaagctggttccgaaccccagcagagacccgagccggagattaccaagtttggagtcaaacgtccatttctcccttcactctttagatcaaactcatccagacagcccagcacggctcttgccagatcatcatccacccctgtcacctctcgagagccaatccgggatccaaagaaggacgcctcaaagacgacgaactcaccacagtacctcgtgtttctcatggcgttcagtttctcggatccagaactgacagacatctcgagctcgtccggagtggcgaggaagagaagaaagcagagccggagcagaacgacgggcggaggaagtaaaactcggagtgagagtcgaggtacgaccggtgaatggccgagtcgacaaaacagcgtcacgcctgatggatcgagaacgaggacaagaacaagaacgagaacaaggtcggggagcgaagacaagaacctttcgacgtcagcctcggcagaactagagttcggattacccagacaggaccatccttcctggtggagacgtcattcagccatcactcatacttcccctggttcaggatcgatgccttcaactcctgatccgacccctccgctctcacccgcagtagaaggtacatccacatccttctttcctgtcgtcaacgctaaaggccaaagctcacagaggaaacttgccaatgcccactcccgagcgtcttcgagagtaaggtctaccagacagagcacgctgtcaagccgggaatcatccgttagcagatctcgacaacgggcgcctccggatttcatcccctctgccgttcatacccaagctcagatccgagctcattcccgttctccattcaaacttcagatcccacctgttagacccccgtcacctccgttaaggtcatcaaccggatcatacgtgacgatctacgtctctgatccccgagcgattccgttgatcaaatcggcgatcaaattcgagatagcccctcccggtagtccagatagagcgcctctggggtcagccgatcattctactcaggcgactctctctacatcatccagttcatcaacttcgtcctcgttggataactttgctaggaagagataccaaccaagatcccgttccaatggtacactcggcaagacccgacctaccgtcgatctcgaccgccaccgtcacaacggcgacgataatgagaccgatagcggcgacgacgaaagagagctagatgatgagggggatgatgactatccacgcggtcggtcggaagcgagaaattatgattcttatccatctaccgatgagcaacccgtcgatatatctcctcgaacaaagacagggacgaggacaaggacgaagacgaagaagtatgcgtcgacagagacgacacctcgtggggaccgaacacccgtcaatggttcaaccgaggccaccaccgacaatgatttggtccccaagatcgaccgaagggtttcctcagccccgtcgaccgcgacgatggccactaccactactgctacgacttcatcggacgattacgatgacctgctgccttcgcccgatattcctgctcaaggccaacctctgtttcccttcaacttcagagtcggagcaactatcggtgggagacacaggggaaacgcacgacgagaagcaagcagttcaacctcgtcctctggtccggattcaacttctgtttcggccagtggggacacgcaatctggacaaggaagtagtggtttcggcggtttgttcgagaccatgagtctcgggttgaaaggcttgggagaggccgctgccgctgctgccgtcgtttctgtccgagccgtcggcggcggaggtggtcgagacgttgagggaggaggaggaggaggaaaaggcgggaagaagactgaagagagtaagctgacgaggggcaacccgttcgaacggtccagaagtctaggaccttactatgaccgttaagaggccatttctaccatttttcctcatacacattattttcgccatctctttcttatcttcaacatctccaacacgctttgttcaaccaaaaccgaaaaaaatcatttatttagatctctactcaacactctttcaacttcttttcaaatttcctctcgcttttcgcatctcacccaattcatctgcctattcatccacgccactgtatataat

SEQ ID NO: 356 - DNA, 401 bp, Xanthophyllomyces dendrorhous
gtatataataatcttgatgcttgttttccttgtttctgtctctgctctgttcttttttgattttttttgattttttttttttttttaccgtatctcttgccggtttcgtttctctgtaaaagctgatcttggatgtaatcctcgttgtataccttgcttctcttttcttcaggttgcttctattttcctatcaatcacgtgcttggtcagtgtagagattcatggctgttcctttttcttctcgttctcccatgtgcaagctcaggactcagaacttgaaaggatggggcaagtatacgttcacatatttgtcagcccgtccccgtccctatcttcttaacttgactcaatgtttctcgaccctcacctgatcaaacaacggtatatacagatatatatat

SEQ ID NO: 357 - DNA, 8960 bp, Xanthophyllomyces dendrorhous
tatatatatttatatgggacatgagccgtaaagaaagagaagtggcaaagtggaaaatcacatatccatattagccaaccgagcttcctcttcgtcttcccgaccatcgtaaaactcgccgggaccgggactgggaccgggatcatctcggcctgcattctcgtattctatatccatatccatgtctatctctccttctccgtttgggtttgggtttggatacgtgcttgtgggatggggccgagaattcatcgttggtggttcgattactgcctgttcagcctccctctgataaggttttccccccccaccgaaaaaaagacaagtgacgaaataaggaatagctcgataagttagtccataaatggacagagatatgggaagagccactgatcggtctgatagaggagtaggaaaatagccaagaagagagaggagagtgagcaagacaaaccttttcagccgcctgtttcgccaagacctgttcatacgtccagaccgagatccccgtttgtgagtgatcgaacggctgagaaatatttcttatgaattgtctggagagcgcgatggccatgtctgttgatagcttagagtgggattcggtgatatattgattgatccatttaggaagtcttgctcgcttgtccgcccgggcgaatcgctttgatagagccagaattcatcccgcgagagaagccgatcagaaaagtcagcgagaacagaacagaacagagacaaacaagaacagaacagaagaaaaaaaaggtctacctgatccgcaaacaccatcaaaccccaatcagtctttccacgtaacactcgacctacacactgagcagcatgacgcattgcgtcgaacgtcaggtagtctgattccttgattcgatgggcatcccgcaagaactcgagtcgagcctggttaacaagacagtcggatttagctcgtataaccctccaattaaaggatcttattagcaaagcataaaatacgaaacatacttttaatattcgactctctgtgtattgatatgggatcccgaacatgatcacagctcggccataattgctagtttagtattttaaattaaaggcgaaaatacgtaaatgagtagataaaagacaaacgtgatttcgtcagtaggaggtcatcgcggggtcagacacacacactatgaaacggcactcactgatcaaaatcaataccctccgaaacctttcctctggctacagacagcaagacggctcccctaccattatcgcaggccttattcacaaggggaatgcatgatcagacattgaacagactatgagacaagttcaagtctcaatcatgacttacctttcgatagttctccaatgctatacttgtctcggcagcatcaggggtttccacaaagattaatttattcttccatacttcattcaggataccctatttcaaaccgtatgaaagaaaacccaagctgagtcgactcgttcaacgagtctattgagatgaaatcatgaagaactgaccatatcgttccaggcggccacgatcgactccatgtaaagataacttgggaagaaagcaacgatcccatccggcacacatttgctgtactcgatcaagattgatccaaagttccgaaccacggaaggatcgtttcggacctcgaatctggaagagatagctacttgatcagagcctcgagtgatcacctaagccgtcaaaacaactctaaatcaggatcacatcgcaaaaagagacgttggaattgagaatcagcccagcccgacataccagaggcaagaaagagtttcggccgagtgtcataggataactctcgatcactaccggttggaaatctaacattttgggatctagaacaaagtaaaataacaccttggtcaacaggcaatctcagaggaaataggtccaacaacataggtctatcaacatacacatatccaacggagaaatcgttcccgaggtgatgaccacactgctaaacttttcgaatacgggtgccatggctaaagcgggatccatacaactgccagttcacgtctcaaatctgtcaatccatgtacgacgtaatgaaacaagacagaagcgcaaacacagtatgctcacgtgaaatggaagacagggttggcgacagttgcatgatccgtttcgtaaggctctagaattagaaggaagcctgttacagatgagggtgaaatagatgtgtgttttgattgataagaggactttctcctcaaggagatggatgcacaagaagaccacccatacctttttcatatgtagccaccagtgttgcaaacccggctacagtctgcaacccagagtattcgtccaaattcgtcaagcccaatgtcttcaccaaggacgatagacgctctgcacatgctctacaagtagaaatcccaaaggtatgcacagtcaatattcaagtaatatatgaagtgtaatggaggacaaaaagaatgtctagttcatacttgagtggtcgtttctcgatgaacgtgatatcttttagatgctgtaagaacgatactggagtttctgcaacgacatggagcactctcatccttgtctgaagtcaaattgcaagattgcagaattgtaagattacagaataacaacatcagtacatacgacaaggggccgagccatagacgacctaagaacgaaccttgagatattcaataaaccgcttcatgaaagccacgaagtgttcggcctttctgatattgcctgggatggcttcttggatcatatcgtctggcaaaactgcatgaaaattaagagaggaggacgtaagcggtcaagagataaagctcggcaacaacgcaaaaggaaagtcagatgaaatgaaggagtgagcgtactagggtttgataacatatcgtcttcctctcccccatcaggagcgccaagaccttgaaccaatcgggtatattcatcctgaagtttttgaatgtcattctctttcattctgattgaacaaaatagaacgtctaactgatgagtcgattttcaacagaagatagcttttgaaacaggaggagatgcacatactctgcgatcttttcttctaatcgatttgcgcttctggacgcgccctctaagattggccttgtcaagtccacagatagggattctatacacacgttatctactcagccgaagtcaagagatcagattactacttcgtctgagattgtggaagaggttgagtacgtgaatagttgagataaatgaataactaaccgatgttatgcgcttcatcgaacactacgatggcttcgccatctagttcagcggagacttgctccgcgatcttagggtccagcaagtagtggaatgaataaatgatgacatctacaaaaggcatctgtgttcaaatatgtgtgagtaaaaacagagagaagttcaagacaaagcgatgcgctgaaacagagcagagagatcaacgacgaaccatcctacggagagcaaaatacggacatatgccctgctctctagagtactccttcatatcgtccaaagtgaaaaccccctcaggaaataggtccccaggctctcgttttcctaactcctgttcgtcacgaagacagaaaggtggtatcagtttattattgcagtcaaaagctaatcgcctagtaagttagatcaaacagaacacatacttcatgaaaatcacataacggaacactccccggatccgctcttccctgttcgcaagcagcagctgacgtcaagtctctacaacgagcgtctacggttttgcccttcttttctctcgccacctgaggaagaaaaattgagcgcgcacatattagagctcagatcacaagcttcctcaacatcactcttgatggaagaagctcttcaaaatgactgaactaacctccggatggatacacaagttctttcgactactcaacccaatgccccggaaacccgtatcatcacatcccatctgcttcctatactccatcagtcgtttgagctccgccaaagccttctcgatctcgggtaccgttctcgagcaatatatgagctttcgatgggaaggatagaactgtgagcgacaaccgttgtgaggaatgagcctgtcagaatagctttagcgagtaaacaaacccaggaagactcaaacctgttgataggatataatcagagataagagcgagaccgttttacccgtcccggaaggcatttctgagtgaatccaacagtcaagatcagcccgacagttcgtttccaccgtcgtatcactcagtccagaagtaccagcgacactcttacctaggatacaatgaccctgatcgagagaacatatcaaggataacaacagaaagacagtcagtattccgtactgaatgagaatctaggcttgatcggttggttggatatcgatcccacaaacttacattggcatccaaggctctcttcaagtcacacatataattatactgttccggatatactagatcgtacgggaatctggatcgcgtgcaaaggaaataggccatgtctatgagcatctatatcgacaaagatctagcctgtcctctctatatatcatcagatagaaacgcctgcgaaacataagcaagctccgcttttcctcagactgaaaggatcgaggtggccagagaaggtatgaagatacgagcaacatacatcaccggaagatctccaatataaaacttcatcttggaatcaatttgcgaggtctggattttttttagatctcaatcaagcttcccaacgtataccacgactgttgcagagagcgtccgaccaatgtggtgggagactcgatgtgacgagcgtgggtgttgagcgtggacgagtagttgtcctaagagacgatgctgattgactggttgggatgagcggcagacatgcacgtgtcccgatagctgtacagcaatgacgaaaccttcctttccagagcacatctgacgttggaacatatgtataaacctgactctaacacacatacttctgaagctatagatgagaggaagaagagaaggagatggggtagcagatctagaggagtagatattttggagcactcgtatgaaacggagatggtcaacacgcggtactcttcttagactctttccgcgatccacgcataccaagactcgagtgttttttgacggggctgatcatcttctcgatcataaccaacctgaaagagatacaagaaaggtcaaagaattagcgcaggaagcttatgaaaaaggtcttttacatcagtgagagaatctttttttcctggtgcccacttactttcatcatcacatgctgtttgttgtcaaattggatgcggacagagagtcagagctgctaaacgattgaagtcgtgagaatcgaccaacctcatatcctggccatatctcaaattctaggtcttgacttgaaaccctctcaaagaaatcttttgaaccctccgggctagtgatccgatcggccgatccgtgaatgactttgatcggcagtcgaatctctttcgctcgaggagccaggtcatcgatcccctgcgcaatcgcgaggccagtaccaatccttagaggaccatggtatggctgagggttgagcaagaacgagatttccgcccgtgctgagtgtagacaacaaaggagcgagatcacacgaaatcatcagctctgaggtctccaatggccgtctataagacaggtaaagacgagatgaactaacggtcccagtgaccttttccacgctgagcggaagcgaagggaactcttcctgcgaacgtacgcagagctcgagcaatgagctccagtagatatgacggccgagatgctgcggccacctgaatgagtgggcacattaagaatgcccccgagatagaagtaaacacagcgtcggcaggaggataagcgaggagatattctaatctacaagcgtccatgtatgtcaagagatttaagtgtcttgccgagggaacatcaagatcagggcagtaacgaggccacctacataacaaatgcacccaaagaagcaccagcgataaatcttttcgtgaaagaaaccctctgacgggcctgatcttgttcgtccacgtcttcgagaacaagtttgacagaagaaacgaggaggtcgtttgtagggacgtagcaatgaatccctgtcgagcggccatgctatcagaacagcgaagcgcaaacagacagacacagaatatcagtcggagcatatcgaggtgtcgatagagtcgacacttacagcggggagatcaggagcgatgattctgaagccgttctgaatgaattttgccacgtgaacactacagcagaaggcgtgagttgcaacgcaaacgttgaggccgcgcaaatgagtataaatgactcaccaccaccgagccccgtactctccaatgcctgttcacaagaatagacagaagacaagatcagctgcatcttaaagcgattcatggtcccagtgtggtagcatatgatccgtaccatggacacaaacgatatctatcccatctccgatctttcctcttctttccggagcttcccacgtctgatagtatatccagtctctacctttagctctatccaactcggcctgcacaaccttgacgttttctgcccctccggtggcatctgtgaaaatcctcctccgggttgtgacgacatacggcgattctagaaaggtgttttcttcgggcagcgcaggaattaaatatctcgaatatgtcgggtcgggtggtgtatatagctagtatcgttaccaacgaggagtgtgtcagtatatgcctttactggggatctttccacgacaccaagcgttcttttggtgagaaatgcacatacgcctagcgagatcaacactggttctgcaatcagccacaggttactgggtacaggaggttcatagggagagaggccacgaaatgatgaactaaggctcgagtcttgagggggaactcgataatagatcgtctctactaatgaaggggtatgatttaggagcaatgatctatatcaatacaaatctctaccgttttggattcgaaaaaaactcttacagacaatggcctcttgagatgctgttgcagtatctccttccatcctgaatctttcctcgagagtgatagacttgtgggcgagtgtgatgattgatgatgggtagaacgctgacgagcgagatgcgatgggtttatatcgaatttgaaaatattcaaaaaacgtataagcgagaatagcaaaaagttcaaaataaagtgaacttctactttccacccatccattcgacccacactcttgctcgcttccaattcgatttccaacaccaattgttctcagaatgtccgctgagcttactcctggtccctccaagacgaccgcgtccttctttccgtcctacgcaccggtggtctcgtcttccgaggaccgggcatcagagttgacgtccaccttgaactcacccaacaatgcgactttgacggtacgaatcatcaagagtttcccctataggagtatgaaagcgttggtcctcaagggagtcgacttggagaagccaaatggagtagacgagctgatgaacaggtgcaagaagggttcgtcttgtgtatcaaacatccatattctctcttgttgttcttcataggcgcgcttgggttggaaatatcaatactctgtttctatactgatatccctttgaggttttcaaaacagagatcccgataaccttgggtttcaagccgttcaagacttctattgacagtaagtctttatctatcagaagatattgactacattctgtctctgtggtattggtctcatcgtattatttctgcgttgaatttgactatgtagaactcgacaccataaagctgtacacgaaggcccacggacacaagactatgaacttgatcatcaatttcgaggatgatgagactgacatcctttcacctggaactgaggctacattggcctcgtacggaattggtttgtcctgttttgtgttgtggacgtctgaacgatcactgcttctgtagtcatccgatatttacgtattctttctttctggaaacttgcagagaacgagacggaactttcattcttcaaccgagaagaatacgaggcattcaagctcaatcctgaagtacgtttcatgttctgcattatccctctagttttcgtcctgttaacgtttatccttattaccttcttcgacgtcttatcagctcaaatgggcttgagcaatcatctcttctttcaggacacacaggcatagaaagggaacggaacaatacaacagtcatagaaagacttactcaaggatcttctctgggcatgtcttctgaaaggcggcctaaaaaaaagataccctcctcacaaattggtatgtcatttttgtttctcctctacaagttcgtgatatcctttgttctttccctctcttttccctccccctcttccccgtggtctgagtagaacggtaaaacgacaaggggtgagtgatcccccctttctcgttaatcctgatgatctctttcctgtgtggtttcctcttctttccattgttcttctctttacgtgttacactcacttcatccttatgtcccagagtagtgtacccaatgctgatatttctacgcaaacattcttactcttattgccgttctattcccctctcggcatgttcctgtccactcatatcagatatagacagcttctgggttagcactttcaagaacgatttgactagacatatatcagataaatggcataagggtcaaaacacatgggcgtatttgaatgaatacaccgacggatagctcttaacgcaaccatcaagtcgatagcgcacattcacatatctctctcttctctaaaggtccattgtttttgagtttgaaggctgcaagtgccggtgtgaggtgagcagtacaaagtgaaagggggggggggggcgt

SEQ ID NO: 358 - DNA, 41338 bp, Xanthophyllomyces dendrorhous
gggcgtcgaaagcttcacaaaagaccctctatgtacagaccaagtgtgagattaagtacctgagactgaaatcacacccaaacccgcattgttcactccgtccctctttcgcttggtcatcgcccaaccgaaattctctatgaggtcctgttctgacctaccccatttgaagtcaaagatgagaccgatgtcgttgaatctggcgtccaaccgttttcgctccggatcccacctcggattggcgagatctcgtttgaatggatctgtgacgaccgagcgagagtcaggatttgaatcggtcgatgtcgatgtgttgtccgtcgaccgggacactgatgttggaggcgagaaccatgaccgaggtaggggtgctcgggcgatgttggcaatgagccgttcgacaatgactgacgtccatctagcgatgatagtctgagaagcaatgagctctgctctggcagcttcctctttctcggccctctctttctgagcgacttccaactctgtctgtcgcttcttggccagtctttgttccactgcttgggtagagtcgagtagtctcgattgatatttgtaccctaggaggaccggactggcgagatgacctccgttgaggtcggcccatgatctgtatggatctggctgattggttgaataagtaggctcgacaagacgagatatgttcgcgtcgaatgacattggatatacgaggagcgtgagagtggatgtctcgttcgtttcctggagtgcctgcagaccggtgctcgtgatggtgacggctgcgttcgatgaatgggtataacatgtcgatgtgaacaggacagagaccaggatagtgcagtacacgctggatttaagggccaaacggttgagatcatcagcttacagtcggtgttcagaagggcaggcatatatgcatagtgactcaccatggttgtaccgagagaaagaacgacaccaggtagacgactgtgaatagaggggcggctatcgtcgataggaatgcaggtttagccctttgtttctggtacgatggcaagaagaaagaaatctgaaacaagcttgagagacacatacctgaagggtaggggagcaagatcaatggcagaaagtgtttgacgcctgggatgaaatgaaggaaacatcaagaacaagatgagcacgtcagattcagggctttttgtttttgtttttctgtatccctttcctcccgaccgaaccgaacgagagatgcagatacttacaaaacaccatggctgaacaaaccctggatataagggtgtgagaggatgggatggttgacgaaatcaggagcgtcgatgattgaaggctgattcattttggcttgcgatgacacttgttgtaaccaggtgtgtaaccacatgtgcaaccatcttcctgaactgaacgcgactctcaattagaaggaggatgatgatggtgatggtgatggtgatggtgatgatgaggagaaggaggaggagatagaaggatcgatcaagtcaagctgctgctgctgctatagttgaaccaccagtgagaactgctccagtgcaattcgagacagatgtctactgatgggtctcaccgaactaagactgccacaagcgacagaagtgaactgcaaccgcccaaatgaccattgtggactatatgaatgccatacgattgaggcttggctgagcagaagtgttcatcagggagagcgatacatgctgagtaggaaaaggaatgatgtctcgacgagggaacatcacagtcgttttgactacaagatgctaagaagaagactatacagggatagtgagatagatatatacacaaggtgattagaagtacacgagatgatatggaaacatgactacaactacaactacaaatacaactgtaactacaactataactacaaggaaaaagaaaaaaaaagaaaaaaagaaaaagaaatcaaccttttggtaacgccgcgcgtaggcaagaaaagatcaactttcgcccaatcttgtttggatcctcaccactcccacccccccaaaaaaaagcactactacttcttctctctcctttcttctccttccctccctccgctttctcaaagagcttagaatgtacgtgcttatgtgctccgtcagggagtgtttgtatttttgcagaaagaaggaatcaaaagagtgatcaccagtggctcacatctcgatttttttttcctctctgccctttttgttttctttcacaacactcggacccttcaccaaactcgtccaacctatcctctcaacatctcccatctcttgtcgtctcatcggtttacctgcgtggtcttgtttggttcgatagaaatatgcgtgaagtcatttccatccacgtgtacgtccctcgtctacatcagcccagtctttggaaaagctgtctttgtttcgcctctcccccatcttctcttgcattcgatctcaccgttcctgtctccttctccttccctatcacccacatgcttccatcttgaatcaacagtggacaggctggtgtccagatcggtaacgcctgctgggagctttacaccctcgagcacggattgagcgtaagttgtcgtgatgctttcttcttcttgatgttctctgtctctactcagccctgggtatatgcgcctttgagaaggatacatctcttctgcatggattgccacgaatgcatcaccagagctcttttttatttatttaaaaaaaccttgtcctacgtgctgatcatctcgtaacccttacctcttcgtgcataaccgctaactagcctgatggtcgaatcatggagggatctccttcggccaacgacgacggattctccactttcttctccgagaccggatccggaaagcacgttcctcgatccctctacgtacgttcagcccttttgtcttgttctactcctcgaaacggtccttgtgacatgcgagggatgttcgagcaatccttactaactaagtacttgcgatttccatctccatcaacaggttgatctcgagcccaatgtcatcgacgaggtccgaaccggagcctacaagaatctcttccacccccagactcttatctctggaaaggaggatgccgccaacaactgttcgtatccaactcacatttatgtccctggttgtcctgctatagggttctcattgtctctctttattacccatttgtgcgtcgattctgtccagacgcccgaggacactacactatcggtaaagatcttatcgacactgtccttgaccgagtcagaaacttggccgacaactgttccggtctccagggattctttgtcttccactcgttcggtggaggaaccggttccggtttcggagctcttcttctcgagcgactctctgccgattacggtaagaagtccaagctcgagttctcggtctaccctgcccccaaggtgtccaactctgttgtcgagccttacaactcggtgttgaccacccacaccaccttggagcactccgactgttctttcatggtcgacaacgaggccatctacgagatctgccgacgaaacctcggtatccagtctcctacctacaacaacctcaacaggttgatcgcccaggtcgtctcttctatcaccgcctccttgcgattcgatggatcccttaacgtcgacttgaatgagttccagaccaacttggtgcccttcccccgaatccatttccctcttgccacctacgctcccatcctttctgccgacaaggccttccacgagcagaactctgtctctgagatgacctactcgtgcttcgagacctcgaaccagatggtcatgtgcgatccccgacagggcaagtacattgcctgctgcttgcttttccgaggtgatgtcgtccccaaggattgcaacgccgccatcgcttccatcaagaccaagcgaaccatccagttcgtcgattggtgcccgaccggtttcaagctcggtatctgcaacgagccccccgcggtcgttcccggaggagatactgtcaaggtgtcccgatccctctgcatgctttccaacacaaccgccatcgcgtctgcctgggcccgattggaccagaagttcgatttgctctactccaagcgagctttcgtccactggtacgtcggagagggtatggaggagggtgaattctccgaggcccgagaggacttggccgctttgggttcgtttctagttttatcaaacgcaaatgttgatatttggtccaaatccgttcactgactgttttcctcctctgtctttttttttcttttcttttctttttatgaatcctacagagaaggactacgaagaggtcggagtcgactcggccgatgccgaggaggaggagggagagttctaatcgagcgatcgttatttcatccatcgcgtttgatgcctcaccacttcacattttctaagtttaaacctgatctttccctctactttcatccaatctctttcgctcccgctttctctgttttctttacgtcttcttttcgtttcctttatattccccctctttgggaccaatatctattccccttgcttcatctggtcatgattaccctttcttgtacatggtcatatgcggctcttcttggttctcttcactctcgttcccatgtctgccactgaccgcgcgatccgtcttggagacaaactgttgacacttcagaagcaaatgatcctgataagaacggatctcttccaacaaggaagacaacatgggatgtgtgacaggctgtagcagcaggtagcttgaacgggccgccgattagacccccgattagaccccaaaagagaagcccaacttgggcaaatctggccttttcgcccatccagccttggctttctagcctctctgagcggcttcctccaagtctaacggccaacacatcaccatctacttctccctgacatcgagcagaagatcctacaacacctacctggcttgcccgtgtttttctttggctggcccagcagcttcttctaaataaactcagcgaaattactcgtcgaaagacagagaatcacatccgaaaaaaagtatcatcatggtcctctcgatacgcgtctcgattctcttgctgtccttcctcgcgtttgcctctttcgcaagagcaatcaagttcgatctcaaggcagagctgtaccctagctccagtacgtctctttatgtgctttcccgtgctgcttgttccgccatcagttcttacgatgtttgcgaaacaaggggcagagtacagagagattgagggcagatggcgagagtctcatgacgatggctgtctgtcttgctcatgaaagtgaatgaaagctgacctctgatctcatcctcttttacgcttctttcaacctcaacttgcttcatgtctctttccgaacggatcagaatgcatctggaactatgcaaatgcccgtgcgtctggttttcgttcttcttttcttgtctattctctgacaagagacgtcagggttgacccgagctggacaaggcgagctgaccatctcctgaatgatttgcttctcttcgcaccatcttcattctgttcattcgaaaacgattaccgttgtttccttgtccttcttctcgcctcccccatccttttctcgggtgtgaatatcagattcattggtgattgttaccaccaacgtcggacccgggttcgtcctttgttcaaccgtatttttctttactgaaatccgctgtcagtcacctgtgtgacaaagctggaatctgaccgcgcctggtttcgttctctcggaaacgttgaccaacagacctcagcagagggtggatatcgagattcgagatggatctcataatgggaatatctatctggcaaagaaaaacattcagggggagactagactggcgatcactacccatgagaacgcagaggttggggtctgcttcaaaaactatctcgatcaaagtaagtgttcttttcttccatccttcgctccgttttgttcttctctgtctactgttcttgcggatcttgaaggtttaaaagtatgaggggagagggaggaagggaacggcagatgtaaccttccggggagaagacattcagcagatttcagaggtcgtgtgagggaacagaataccttgggcgggttcagcagacgagaaggtatagggtcatgaacgcaattaagattttggttgccttgtcgcgctcatcaagtggagatatcgttgttcaagccttctgggcgccccttctgagcctcatttaattgccttcatgatgtttgatggatttcatcagctcgtatattgataccttatcgttgctctcctctttctttttcttttcataacattcagaggcacccccgcaattcaactatatcaagaccatcgatctcgagacagacattggagcggaagctactgatttcaagtgagtccctttcaccttctgtatgatattagtcttccatctaagagcgaattcgctcaataacgttgcccttctcggctcttttcccctctcgcgttttaaagtgcgatcgccaaccaggaatctctctcaacgctggaagttgagatgaggaaactcgaaggtgttgtaaaggagatcgtcgatgaacttgcctaccgtatgtttggtctcttccgaagtagaatttagaaggaagatgatacgacagctgattaatctttgatttgtgttcttctggtcggtatcaaatagtccagcgaagagaggctataatgagaaacaccaatggttcgtccttcaaatctgctgatggataaaaaattgacagcagtactcaagatttaccttttcttgaaacgaaaattgttcttcaaataattcgatagaatcgtcgaaccagaggatacaatatttcagcctcttaacactctgcactcttctaggactcggcgtttggcaggtttgtctcttctttttttttctctctagttttcggtcaagagatactcaagcatttgatgatttcttttgtgtatatgcgtgtattgttgttatcggatacacttagattctgcacctccggtccttcttcaagcgaaagtacctgatcgattaaatgctctgtctttctctctcgatcttcttctcaatctctcctgggtatagcccagtttggccatatctattcgtcaatgtggtagtcgattggagacattctctcattggaaaaacaaataaaataaaatattgatacaaagatgcgcatacagggaaaccaatggacgtgtgtgtatgtgtgtatgagagaaaatgagtacagggtagaggagaagagatcgtcgaaaaggatcaacagaaatgcacaagccagcgaaacggagggaaggaaactccgaagattagcaacggcggcggacagggtgcggtgatgaacatagatgaactaggtagcaggatatgcgagagaacgagcccgggcgtgctctaagtgaagtccatgggaagcaaaggggaaaaaaagaaggaaagacagagaggcagacattccagacaaaacaaaagagaaaagattgaaggaaacgaaaaaaaagaagatttgagaattaaaataaaaaccgatattgctgatcgatcgtctcaatgccgaacaccatacggttgtcgtgagtcaccactgccaccatatgcattcggcccattgtacatttcaggatcaacccatcgaggtgggggagcttgttgagcgctaggtgggaatcctatattacctgaggcagcgtaaggccgtgtttgagggtacctatcgaatacgataatcagtgcttagcagatcggtctcaagatgaaactcgtgttcaaacgaaacagaacaagaaagaggttcttgtctgtgggcttacatagggggatgtgtatctgtcactaggaccgctcttctaccctttttcttgcgcgacccacatccacatatacacctggcgacactgaagattattgcaaggacgatgagaccaacgacaacagtgacagctggggatcacgtccgagataacaaaccacaagaaaacgtttggtcagacatccttaagcagaagtggagcaaacacaatcttttcctctgtcaagactcacgaattgctatattcagatggtctcgatctaagacgaaacaaaaacaaagaaggagctttagacacagcagacccatcattgtaaaaacgaaattgggacagtgtaatgacaatacttacaccagccctttgcggattccagcccactctggccggcgcatgatccgttctggcatgttccgctatatccacaggcggttccatccaagaagtgtgagtttaaagactggaaggtagaacgcatgtgagataaatcagtacaacatcttggaggaacttcagatggtaagacgcgacagagtcagggaaacagaatgatgatagagagacacgcacaacgcaagtgttgatactaccaggcgcttggcatgtcagcgaacaagaactcgttcctacaggcaagctcgaacacgccctatctagcttgtaatccatcccggccagtttacattgtactgtattttgaagaagaaaaggaaaggagacgattgaaaaatcctgtcagtgaaaacactattcaagttcagagaacgcagaggccaaaatcaggtactaacgatctcgcgatgtgcagacgccagaggcgcacgtcaaaccttgacctgaggtcccacacgacgttcctaaagaaacaagcatgccgataagttcttgatgacaaagaagcaacccacaagaaagaagattgcatgttgcaaaaatctggacagaagattcctacttacgatcgtctaccgttctatctgtcgggcaagacgaactgttcccagtgcaggtctcttgaatgtcgcattcaccttgagctggccggcagacgacggatgaagatgcatattgacaggtttctgtacagcacgcggcggacgttgggtcgcatactgcccctgttctgaacttgcaagctgtagttgttcgttatgattagtgtctatcttctggagatatcttcgacctcagatacaagagaaggggagaaagaatgatttactggcagggtcgcaacaggcagaagttgcgttcgatccaggatcgcaatcttccccaggctcaagtattccattaccacactagagtagcagtaggatatagccatgaagagccggtcagcgatgaaactcgagacaaggtatgttttctccggtaatagttgtgcacacacctgctgaagagagatgacatcggtcgatccaggttgtttgaggcaagacaggtcgatcgctttgttgcctatgaccgagcagatctagaaagaacaacagagaatcgagagacccatcggaacaatataaatatttggtgtcagcgacatgctgatgaagatagattgagaatgaagaaacaagttcaagggcgcacgttgccaatactacatggcgagaacactgtttcgcctctagacgaaactggactcatcagatactgtaaagtgaacaaatcaagtaaacatacataatgttgacgccatcagacacgcagtggaagggccacggcagcaatgataacagaagggagggaacgaacctggccgtcggcattgcattggctaactgagagcgggcaacaagttgtttgacccagggaacacccagatgcgcaatcatggatcgctgtagaccgaagaaattgagtaagatgttataaaactgaacagaaacctctacttggtgaattgaatcaagggtcaataaacagaatgatgtgtattcacctccgaaattatgaccggtctcatgggcgacaatcttcaacacattgagaggagcccagacgtcagtcagtcagtccgcaacgaatagtcaagcgcatacaagtcaaaggaagaggtgactcacctgccattctgtcgcaccattagttgagacggctgttcctgagacgaccccagaagagccttggtttctagcctatgagtgcatacggtcaagatttgtttagaagaaatcctccttatcagcacgacagtctcaactgatggagattcttgaagctaaataagaacactgacactggaaacgcacacctgccctaaccaagcgactccaacctcgcttcctgtcctgcagccgctcatgagatgccaaagtcctaggtcatcgcccgatctctcggatgcccctctccatgcgctgaataagctgagtcggctgttcaaatcggtcgaggccgaacaagcaagattccatggctcggtcgatccagaggacgctgaagtaggacagtccgttaaagggttcgagggaatgaagatagtagaaatgccgagggagatgttgaaagtctgacgatagagcgcagaagcggtattccagttgttaagcttcagccccatttagatggaccagaaacgagattcgtgtcagcgaaaacaatttgatgagatggaggaaggagttcatgtccttacgatggcttgcctagcctcttcgacagatccgtaggctccaacgtaagcacaatcggcagcaacaccagctgtttcaagcacagttgacgttagatcatctgcaagatgtatatatttaaccatgggaacgtaaacgtactgtaaacaacacgttgttccttgacgcatcccgtggtttgaccgatagtgccagagtagctagagaacgagagagagaggtatggtgtcagatatattcgcccaagagatcagaacacattctaaaatacaaaaaaattaactccgaaggtagacgtactctacagtcccagatactggaacgtcttgtctcgcttgtaacgaacctagaccggtgatgtcaagatccagatcccgcctgactctccaactgtctttctgatccattgaactcttcacccaccaaggatcattttgatcccaattctcctctagagatgatgaccttggcgcggtatataccgggtgtgtgttgtttgtgttgaagtctaatttgtcgtgcatgcatcctgaagaagggacttccgagatactctgttcgtaaccagaatccttgaagatgaccatttgtgacgcatcagctcgaccttggtcatgatcaagcagctgaacgtccccattgcgccgatggagattataagtttctcgagagagaacgttgtgaattcctccgttgtgtgtgaacgcgccttcaaagactctgccgagcgcagattgatccgagttggtgatgggtcggacgagaaatcttgcccagcctgaagactcggggtcggtgggataatctttgtcgtgtccaaaagacgagaacgaccgtgtgcgatcctccgcccattttcgatcagatgtacgtcgatcagagtagacggaaccggagaaggcaaggatcgatgtccgatcgagaggagtagatacaggcgtatttgttagggggtccgtagtcagcatggatgcctgagggtgaattaggtttctgcttggtttctaatcaagatcgcaaaaagtaaggaaacaagaaacatgattgacgcaagttgagcactctgtagaatacaataaaatgaacgagaattcagaagaaagtcgacctcgatcgaacgacatacaaggtgaatgtaaagctccgtgccgtcttccagatcgaccgtcgtcctccaccaatcttcaaacccgagatcgttctcctcaggtgtgtcggctgctcgtctataaacaggagtggatctgcgtcttgttgactcgagtggttgccaacggggaaggatctccaaccgagaagtccgtggttgatgcacccggacaaggggagagttatgatgaaaggaagctgggacaagaggtgggtcccgaacgaaatcatagaataagaatgcacgtatagacacgaccaaggtcaatttcataaacgcgcgggccaagattgaagcgtcatgagatatagagagacgaaaggcagtgtgaattgatcaaacgaatcgtcagcctgccaagactgtatgaccagatcgggtgttcatagaacttgccacatctcaaaactcagagagaacgatgaagagagaaagaagagaacggtatgaacagacctttggctggttgagcaagcaaggtaaatagaatgcatatataacctgaacagatgaggttcctccaacctgacctgctgagtgcgaatcgtcccatttgtgagtgtttcaatgaagaatcggctaaagactgtctctccggaacaatgttcttgtggcaaaagtttgaaggtggatgtacccgacagaacaccaaatgaatcccaaccaaagctgatgaaccgtttatatgaagccaaaaaaggtgcgctctttctaccaagcctttttattatccccggaggcgaaccgaaccgaagcgcgccaagacaatgccggtcggattacgtaatcgacccacagccatcgacagacgacttggtgttctttctattttctgggagaaacttgacttttcattcataacacttccacagctcgaccaaccatcgcgctcagctcggtgtccagcagctctttcagcaccgttccgtctctggtatacacccacttgtctccctcgggttcaaagtcaaatcgttttgggccgctgtttgtgtgcgttgagttgagaatgggagagagtgggagagattagacactatttattttacaaccagtttctcctagcagagctacaacagaggggatactgaacagaagcgcacgaacctgacgggactggagagccaaatctgtttgtttggtggctgtttgttgatgacgtacgtcccatgttcgcccatactgagcgttagtactccactctgtggtcaccgagcgagcagttttgacgagtggagattaggccaaaacataaagtcagcttcagtcatcgagcgacatacgcacgcacacgggctcttgacaagaatcaagaagacatcctttcccacacatcgatgtctgagaacaacatgaagagaaaggccagcacgatggtgtttgggtaacaaattaaagcaagcagaaaacgattttagaagatcgtttcattcagacattcctcctttgttctattttgtgatgatcaaccacccagcacgacatgcgcccttctatccgtccttggccgaaaggcaaggaacatgacctctactcatgtccaaaaaagaacacacgccctctccccgtatgacaacgacggatttaaattataacatgagaactcacagaatactcgacttcccatccgccttctgctccatcctcaccttcaactaattcctccagatcatcatgaagagtgttcatcgttatatctgataactgatggtactttgcctccgtcaattccctgctcactcatccggtcgtacacattttccaagcgtgaatggatcacccgcagggagttgataataaaataaaataaacagatccattagattaatgatcgatcgagatggatagacagacgtgttctctcgttcgtagagaagacagacaaactttaaaagaaaaactcacgaagcaggtccttgtggaggaaagaccgagtacgttcttgacagaggagttcttcctgtaggcaattgcatatgcacggatgagatcctaacattcggagaggagattcttatggggagagcagaggaagatgaggtcgttcgccgggcgagggatgtaatcgcacgcggtgcggacggggacgatgacagagaaaaagagaatgggactcgaggtcgaatgagagacgtcgagatgttgagcatgatgaacttttccgaactacttgaaatcaagacacctgagataaagttctgtttgttgtgtttgagtcactgacaaagatgaaagatcgattcgttcagatcagagtgatgggtcagggttgggtggatgtggacggattgagccgggcagaattcgcgggtgaaacgtaatctggcgtgatggccaatcctgactggcgcaaacgaggcaacctcagttcgcttctctctatatttacatcttcctttctctcttctcttcaaatcctatagtttgtccctcggtcttagtcgatcctggttcttgttcatttatcaaaaagagaagatgggaagactagaaaaataagaggaaagacagccgatgatagacacattttagaggacggcacatcaggcattggctaagcaagatttcgtctcgccgacgatggcctgcgatttttttctggttttctcttggagaccggaccgaacgcctgatcagaaccacagatatgccttagaaccctattcacaccctgtacgaacgtttctttgcaggcggatctcccggccgattgagaaaaatctactcgtcgatgtatctttggtcgttctagttggttcatctcggcactgaatcacgaaaataattgaatttcagcagtcttgacatgggttcaacagtggtttgttatttcttctctaggcaacacccttagatttccatttctgcgcggagtctcaagggttctttctgagaaccatgaatattctggctcaatctcctctctgtcttccttgttcacaattcatttcacaaaaatacctggatgatctgtattcagtcttgggaaactagtgaggacttgattgggaacaagtgccagaacaaaaagtccatgttcaccattttatttcagtaataatcatcatggccgctaaactgttcttttgtttgaatctttttaatttttattaaatgtcaccgccctgttagctcaatcggtagagcgtcagactcttacccagtctcttgacagttggcatctgaaggctgggggttcgacccccccatggggctagtttcttttgtttttgtagtcgaccctggttgttatcaatctggagtagcactcttgaagttgatgtgactgcgacgggttggtcgctctcttttctcgtcttctttcctcgctcatgggggttgttttctggtcttgacgtccgtcgttagctctgtcgttatgacaagtttatagccatgcttaaccaaatgatctatccgctctgacgcgcgtccaaactggccacgtcgccttcactgcaacgcgacggcagacgacgcgcctgatttttctatccgcttgacatcctcaccatacctcgacaagaaccatccatccttcccgcttttacctctactttctcttgcttcccgtctatactatataaacaatgagtgatcaactgatcgactgatgtcgcccttcttacagtcaatactcacccaatcaacttaccttgcgttaatccgtctcggctagaatcgtctacccttgcccatactcgcccacactcatctcgactttgatctatctatcaactgactgtcatgtcgctgacctctaacgaactgaacagcttgaagcgaacggatgtccagaagttgtgcaaggttggtctctactatacacttgctctagtcgatatcatcgctcccgcctgcccccttgtttgtcttctctttcttttactcactatcctgccttctgaacaaatagacgctcggaattaaaggagcaaaccaaaagactgacactctcatcggcctcattcttcatcactacgatactatcggagaggatgttgcctcaatgtttgtacctttctccgctatttctttctgcctccggttccgtcaatcaatatcaatcctatctcacccagcttgctgtctcttgctctttatggcttgtagaaagactagcttaaattctaggcttcttcgaccgactgctagctcttgggcaaaacaggcgagccagaaaggcatgcttcagaaacgagctgtctctcccaagcggatcgtctctcggaaacgatcatcctcttataaggctcggccaaagaaggaagccccgaagtcaatcaagaacgtcctcgcccagaggcatgagaaacccgcattgattgagtctacaaccgcttggaacgaggccacgtctgataggaaggcagacggtgatgaagcgttaaaggatgaggtcatgcgagccgaagcaggttcgcccgatagtgagtccgccggaaaggcctcctttccctctagacagatgctcctgatcgctgaccgtcagataatttcccaccggtacagaaaatatcaaggtagcaaccacagagctaacctcaacgtcaaatcccacgtcgacctcgaagcctaacgaaggtacattaatgctcttagctctctgccgcttcttcgccaggctaacatctgctctcttgcttcgaatcagtcgacattaccagccttctgttcccatcatcatccgcatgtacatgcatgaactcaaccgtcatgctatcctcacagccgttggttgatcctcgatccgtgtgggatgctctgaccgaactcactgctaagattcatagtttgcctacaaaagaagagagcgacctggacatgcaacgcttctatgatgctttggagcgtaccgatgtcgccatcaagtctgtcagctcaagaatcgatgtctccgaccggatgcgtaacctgaccgaacaggagtctgtcaagaaaggggacgttgaagcgatggtgaacaggttgattgattcgcgcctcgagcagatcgaacagtccgttgcttgtcgactcaaggcgatggaagacaagctgacagcccagatttttgagaagcatgctcctcaggtggaaacaatggttctctctgacctatctatgggactcggaggacagagacatcaaatctcgagtaaacgtgcttgggatacggtcggcttccctgcactcatatcttctgtctcgattgccaacgacttcactgttgacagggagactctgatcacttctacaccttcttctatggcctccttcaagacttctttccctcttttctcgccgcctgtcttttcggtagcaaccgctctagatgaccatcggccgaaacgatcaaagatagacagtctggtgacgggtggaatggccgcaaacaccgtcgggggtcttttgaaggatttacccgaaaggacgattagcagggatgatacgtcgcttatatcatcggctactcagtcatctatcgcatctccctttgctcctgtcatcgcccctaccatcgacacatccgctccggttgcttcaacactcatcgccggagtgacatctcctcaagtttgtcgtacaccgctgcttgtgacaggccagtctgccagatctattgccccacttcctttagccttccgcccaggctccttgaagccaaaagacaacaaccactactccaggacggctccctcgagtcgacagccgaccgcggcttccgctctcaagtgcacagctggctcccagcgcgcgactggcgtcaaggacggccagcccagcgataccatctcttacccgtcgttctctccattcgagcgccaaacggtccagtctcttctcccgcccgcgcctgctggcgcgccgctctggatctctccgatggcgtccccccgaccatcgtaccgatatcgacccaaggcaaagcaagggccaaccaaggagggagtcactccgctcccattatcagccacgggagcgcacaacgcacgacttggattgaaccagaacatagagattgctccgccgacgccggccggtccgaagacgatgtttgggaccgagaaggagactttcggtagaatgtttggcgatgagatgactccgtggatgtcgtgagcagagcggtctgcaatactgggtttatcacctcgtttcttcctcacctcttcccttcttctttctctctcggtttcccctacttctctcttccttctcttttgataccagtcgatcgagctctatcaaacaccatccttaatatatacccctccgatcaatatccttttctttcatctacatcgtgattcgccatcgactactctcatcacttcgcttttcttgcatcccgtcgcgtctttgtcttatcacttcttctatatatatgtatgtatactatattctgatctcgatgactcctgtctagtccctattgggtttcttcttgcgaatatctggctgcaggctcgagggattctcctgatagaatcgtgatcttgagcaggacgtgagtacgatgagcccaaacggtaacccacagttcaagaaacgacgaggataccaaaaagccaattcatttgatttcgactctttcttccttcccgacacatacacgtccaagaaacactgtggtataccattcctttgtagacagaaacgacgtgtaaacgaaagacgcattaagaccaggaaaatcaataaggacttgcttccataaataattgtggtaaagaggaggatcgaaaggaggtgtgaggtttttcctttctaatgaaaaatttgattacgtaggcatataaaggatggaagaaagtagaaagagactgagaaagaattacgaaaagggcgaatacacggatctctttcgaaggacgataccatatcgactggacaacgagaagacgcgcaaagtggtcgagccgtcagtatcttttttgtactaaactttgtgagagacgagatgggtgaacacaaaagcacagtcactcacgtaaacaagatcgggataggagccaataagagagcaagacagccaagaagggtagcagcccatctaggatttagcttctcgaacatctacatgatcaaaaagaagcagaacaacaacagaacagaagagtttgtacgttagtgaaactcgggttgtacaaacacgctgagcgagagacatggacaaacttgagctgttatgaacaaggaatacccaaaagaaaaccaacagggtcagcagggtgaacagccactcgaggcgttatcgataagacagagacggcgacatactggcgaacagagggaaaccagcaccaaacaacgatcggacgaccgtggtggcactaagggcggaggcggcgtgcatgagataaacctcgataatgtagttgaacaaggagaggaacaagtacaggattgcccatccgagcataccacctatattgacgaaggaagcggatcgtgcgtcagcgtcgacgttacaaaggactatgcgagtaagaagactgtttgacagcttggtacgtaccggcaagcaaaggggaccagtacgagatcgaagggaaactggtccaaccgaaccagaagagagcaatcacaaacatccaggacccgataagggccatctctaatctaacctccgggggaacgggttgaggggggtccatgtgactgtacttgtgatgaatccgaatgtatcgcttgttaaagtagaagatgtaggtgatcacagcacagatgccacctacaaaaaaatggggcgcaaacggagaaggaaagattgaatagaaaaatcagaaggaggattgcgggaagacccgaagagagagcaaaatatacaaaccgataaagagaggcaagaacataagaccagagattccttcagacatatggtgtccctgggtaaacacaataggatatgcttcgaatctagataatgaagaaagaatgggtctctcatcaacggtcatttcttcgttgttgaaagacttgacagagaagagaaggaaacggaagtgcgcacaagagatagaggatcccgtagacgaaactcatgtaaagcgtgacagccatcagcattggttctctgaaaaggatgtcgaacggcttgaccaggatcattttgactcgtgctttggcggaagtgtccaacctttcgactgaattcggtacattatgttttgaatcaatggaaacaatcatgaagcagaggtcagaaaacagatccgcgccttgagaaaatcagaggtggataggacttgctgggagcgtagtagttttcatctccgctcgactttcggagctttttcgctttcttagcaagaatgatgggctggttatgtgtaaaacaagcgggcgagatggacgagtcagccagggtttgaatgttcaagattccttcgaaaagaccagtacaactgccaaagtgcgctttaagacctaaagaagagaacaaaacaaaagaaagtgaacaaagaaggggaactgacagcgtaggtttccgggataaagaacaggcacaagacaaaacagagtccggcgaaagcaaacaggacccagtacaacactcgccagctgaccccggcggtagatatgaaaccaccgacgatgggacctacgatttgatggaaatttaagattgaaaaaagatggttgtgttcgtcgataagagaagatgatatagatgaagtggaggaaggaaggcaatagacataccaagagctggtccagcgaaaggagcgagggagaagaacgcgagggcgatacctcgtctgtcggcatcccagatgtctggaaacaagatatttgtttgagtacagccgctacatgcactgtttagagccacactaccactcaccagagatcaacgctcccgagttcgtcagaggacaagcggcgaaacctggagggaaaggcaagagttttcaacaagctttgagccgacttgcgtgtttggagaggaaaatgctgagttaaacgacagaaactcacatcccgagatgaaccggaagatcaagatgctagcggtgtttttggcaagggcacaaccgatttggaaagcagaatagacaaagaatgaaatcaagaatgttggccttcggccgtaagtctcggacagaggtccccagagtagcggacctgaacaggaaggatgtcgggagagaagtgtgttatgacgaggatgacgtttgacgaaaacctagaagacaagaatgtacataccgacacagtaacctgcgacgaagctgttcgatgagaagcaaagatgatacatagcgacgatttgattctagtcaggtgcttgaaagatggatgaagaggagccaaaacgaggacgtacatggcaatcaatagggttgctacctcttgagaaaattcaaaatagacaatcatctgagagatgactccggagcttggttcgtaagaatattatgtgagcaattttcaggcaacgccgaccagggattgagagtggactgagacgacttacggggcagaggacgcgaatgttgcgttcaacacgaggataccggacagaaccgtcaggatccactagagcgggttgagatcatatagaactgattagcatgtttttcaaaaacagcaagaccaagaggtcaaaaggttaaaaggatgatcgtccggggcgcgtactctgtagattgcactccaattctattaacagaaaacaggatcagcccgagatcagatcatgatcagaaaaagagagagtgaagacgttgtagggaactgacctttgggttagccttatcgtctggaccatcccaagtgacttgatggtctttgtctggtggttggaattgatgaaaaggattagcgtttgattgggaatcagcaagtcgcgaggccaagagatttgaataaagacaatggagtctccggaccacacaaaaaagactaagaaaacaaaaacatccaaggaacagcggagagtcaccagacgaaccttctttctctatctcggcgatacgctctcgctcgttccggtcagcttcttcagagtcacgaacaggaggaaggccggattcgtccccgtcgcctagggagactccaccggtcggtccgacgatgggtctgttagaaagagggagaaacagacagagaaaagaggcagagggagggcaagagacaagggaagggaaagaaacataagcgtttggtcagcagcccggaattgagtaacaggagacagtgtcaaagaggatgacaggacctcggccatgaaaggccgggaagggagcagtgggaaagaatagaatagaatctaactgacggattcgatatcctggaaagtgctctgttgagcgcaagatcctttgggcgtccgctctgacttaaagttctagttctctgtcttctagtctctaggagctttgaatcggctcgaatatctttaacggtgggtagtcttcggagggcaaagctatcagcgttttcgtcgtcgtttcctttatggtagtggtgctcgaaatggtctctgatcaaagcgggatgatcggaatctgtcggcggaccagtcatggctttttctgcggacgagagatcgttggcgagcgggggagcaaggccgagcatatctgccggtatggacgatggtgagctgtgaagtgtggttgtcggcgaggacattaggttgttttccttgttggtgtgtactgtgttagtgaaacaagtcgatagaacttcggagaaaccgtttggatggatcaaccttaagaagaaccgaaaaggccacgttgagtgaaagaagcaggcagagagtggatcgaatgagaaggagaaggagaagcaaaataacaaagaagaagaagaggcaagaagacaaagaaagagaactcactccctcaatgaagcgactcgacgatggtagtgagtgattcgattttgcgctcgtacctgatttgactttttttgggtgttggggcaagaattgatttactcagcggcacggcaaaagccgacgatctatgggtgactaagactgattatcatcttctagtgcatctctgtaatttacttcttattctactgtgaaagtttccttatatctcctctcccgccctctgttatgtacacgttctgtggtcccctccttctcgttgcagatccagtgagcatgctgctactgctgctgatactactgcagacacggctgccatgtcgctactgtcactactactgccaccaacaccaacaccaccaccaacaccaccaccaatactctcaacactcttttcatctctcaacccctccacgggcttaaacaaggagacgccgaccatcagccgcacgcggacgactatccgtctaaaaatatccggccggtagatttttgtcagacattctgacgtcaaggcagaatggattggtaagccgtttgtaagcatcgacgtcacatgtcacgtggtgtttacgtaaggagacaatatgtttgtgatatgagctgtatagagcctaagctacacaggtgacaatgcgcttactgaaactagtcactatccaggaaagttcaagcgtatgagtttagactttcaaatctcaggagacaagcgtaaacgtgactgaatggcaggcgtagctgataggaggtagttgagaaggatcctgacttggagaactgcatcaagagaagcgcgcaagcattcgtcttatgttgttcaagcgtgctacccaggcaggggtggcaatctggtttccactcggttactaaactaccagactatccaccagaggaatgtcaagctggaggatgatgaagcaagagatcatcaaacaacagaccgccaagcaagtgtatcgctgatcgagagaaacgggaaggaggtaggactatcaagcgcataagatgaaaagagggagcatattaagaatgggaagatatgatgaactgctgaacgagagaagcgagtacacagtacgcgtacgttatacctgatcctgattcctaacacgagctgtgctgggaacggggaaacagagaaaaggttcatcctacatgacccgcgatgatttccgggattgatgatgaaatattcaggcttactgaatacggttgacgaggacagggacgcaaggaatcaatatcgatataccgcgataacggagcatcagaacgaataatagggactgaggacaagggaaacaagggagttggcaaaggatccaggctccggagactacgctatggatggcaaaagaagctcgtcttgtatctaattctcagactccacagacatcccatgtggacattgcgacaatgaagaaaaacgcagaacatgatttcacgaaaagatggatcataggatgtgctggtagcacacgcgctgcactactccataatcgcaagttgatgcgttggaaaagcaggagaagttgaggtgacgaagggtctgcgaatcttaggttacgtgcatgtggcatccaagtcacatctctgacaccatggttacacgctcacgcctgcactcactaccttctatgtgccgctcggtgtctcttcctccgagatatttctcaccaacagaactgcaacccacaaaagatgtcgaaaggaaaagatcaggacctggtaggcaagtcgttcgctctctcatgtatcgacaggctttcaagccataccataggcatccttctatcagtttatcatactctcttttgtgtatcgatacgaagtacattattaattttcatcttttgtttcgaacctcataaatccaaccccacacctcgattgacaaaacagacctcagagagggtacgttgcgaaatgactcccggtcgttcttcccttcgctctttcaacccacgattttatgtttgaccgtcttttcgtgctttcttcagcccttcaatccacattggtcgtgctgacctcaccggtccagccgacgtcgagtacgggtctgacaagaccaagcacagagaccctgcaccaggacttgctctccctcctcgctttactcaagtcgcacacgacttcactcgccctggccataggaaagaccccaccgacgccatacgcagccctatcctcactcaacaagctcacgacagactggacaaaagtatgctggttgctcgaccaggtcggcaatgacgacaacggcaccggcagccgttcggcctttggtccgtccgaactagagaaagaatggaagagcgcaatggatgacgttcagcttgcactgcaagcttctatccgtggttaccaattcaggatgttcccttcgtcttccgatcgcgccgccgagtctgagaaggagaacgccgctcagctaggtgggcaagccgactacctgatcgacgtccgagcggtattttccgccatagatacagccacgcgctctctctcggcctcagagattcagagtcttgtcaagacatggaaaatacacggtgatcagctcaaagatggagagttggaactgagagagatcatcgagtcgatagacgcagatcgtttgtctggtgatgaaggaagcgaggacgaagatgatgatgatgatgatgataatgatgatgactggggaggcttgatgggggatctatccttaggaaagaaatccaccgagactccaatgacctctcaggagcgggatcgaatcaacttggtgggccctccttcttcttctcttctgctatactttcctttgccttcctataattgcattggccatgaaaatcaaccctaactctcgaatctctgttgccggatgttatacacacaaccagattctacccctgcttcggttcccatctttgttacatacaaacatactcaaaacccaccttctcccaaccttatcggccgattcactctcctcgcttcctgcgctctctaaatccctgctcaccgcacaggacacccttgtctctgcattatactcccctcaaacactacccgacatccaaagttcaatcgcgtgtctagaaaagacatgccttgatctgagcgcctgcgtccgtgccgacttgcagggtttggcaaaggaggaaattgacaagaaagcaggctggctcgatgtgtgggacaagcaggtcaagaggatctcgaaagagttgatcgggaaggacaggaaattaataccatgagctttttgaaactcttgtgattgttatcatttttccctttcgagtcgactgtccatttcttcctgatcatctttctttcatatgaccctgtctttcgtttgttcggaacgaccctcgctcgctttcgctggaatcttcacacaagcagcatgaatcttgatcaaagttgttgtgcgtttaaaaggaaagaattatgtgagaattagaagacccaaacccctcagactagaggttgatgttgtacctgcacaaaattggcaaacagaacaagatcagacatctaatgactggtgacagaacaaacagaaaagaggaaacaaaaaccacccactcatactctccatccccagccatctgtgccaaccagaggaccacactactcaacatgatccccacgttctgaacgacggtcgatattccataataatggtactcggatggataatccggcaagatgtatttcacgatcaaaagtgtctagagagaagcgaatgacaaagaaaacgatgaaagaagggaaaagaaaaggagaagaagaaaagaagaaacccccatcttcctgtagcgtcaactcatttttcttcttctttttttcctttcgaatctcacacattaaaaccatcaggaggtggacgtacgatcgagaacgaaacaccgccggccatgagagcaaacccaatgaagagtgcgagtcttgcccggaaggctgtgcttccttcacctccccatgctcctccatcaccagacagccgagatttgtcaatcagattcgtgatcagcatcccgactatgatgtcccaccacgatgatttgataccaatcaaccgaccgaccgaaccacagacgaatcagtacttgaaaggatttgtgatcaaaaaggcggcagaaatgatcaggatggagggcttacgagttccaaggatacctgggatccaatctacgaacgtcatatgcacaggtacgacatcgtacgacccatccaccggtggtcgagctcgcttggagagaatcagtgcatcaaaaaacacggcccatccgatagcgaactgatgcaaggacaagaaaccaaatcggagagttcacacagagatatgacagatgtcagttcggatcgcaagataggaacaagacaaaaccacttccttgggcacttaccaaggccccggcagagtatatgccaatctctctcttcttatgggcaagcccgggaatggacgggagtctgaacacaaagacccgtctgggatcatatctggaggattgtttgaatcagtataaccagatcgaccagttcctttcagatgcaactatcacacctacgttgctcttggaagggacatagctgggatcaagaaagagatggatgcgatatgaatgttggtagcgatgatgatgctgctgatgatgctgctgttgctaaagcacaccagctcaaagagagccggactgacatctcgtcgaaagctgtgcagaggattcatgtggcacgcaggcgggcccccggctctcgatgatctccgttaaacccggtggccgcgctcgccttatcatctttttggacatctttctttttgaacatctttcttctttttctctttcgttcgtcttcattccgtcaaacatccatccgcattccaattggaccagctgctttctatccatgtcgttccgaaccactgcttctctcaggcttagcgtcaagcccaaggctttcgcggccagtcctttcgcccgggcggcctacacgacttcatctacctctacatcttcctcttcggtctcgtctggtcagactgctcctgttcctgttccggttgcccaacgaccagtcaagcactttttggatcttcactcattgtctcctgagcagatcactggcctgattacccaggctcagcagatcaagagcctgatcaagcctccttcgtctgctcctcacaagcttcagaaaacattaaccgacaagacggttgccctcttgttttcaaaaagatcgaccagaactcgaatcgccagtgagaccagtgcggtcattcttgggggacacccaatgttcctaggaccagcagacattcaactgggcgtcaacgagtccttgaaggacactgctcagtgagtagtcttcccggagaacagctattcccatctttggtctctagcctatcaaagcattgccaaatgcattgcttcttctcgacctgcctttgtctcacttggctgatgactcgatctacatttttattcttatttcgtatttccttctttctcttggtactcccaaaactcaatctcaacccttcttgaactcccctatagcatcatcgggtcaatggctgatggtatcatggctcgagtcggagcccacgcggaggtcgagacattggcaaagtactctggaattcctgtcatcaacgcgctctctgatttgtaccatccaacccagacgctcgcttccttgctgaccctggccaggatctatgctaagcgaacccctaccgctcctcactttgctcctcccactcctgttgtcgcctctcaggctgaagcctccaagccggctgctgctgctgctgctgctaccccgtctggagacggacgcgcgacgaagcctctgcagaagacctcttggaacgacctctggtctcgggccgggaacggctccaagccaagcctgttgactccgctccaggggcttaaagtagcttgggttggagactgcaacaatgtggtgaatgacatgatcgtcacttacccccgattgggaatcgatcttcgagtggcttcgcccggtggaaagaacggggcctacgggcttgataaacgagtggaagctaagctgtcagtctgctcttcgattctcggcggacaattcggtgaccgttttctgtcttctctcttggtataacccggctgatctctgtatatatgttatcccatccagtgacgaattcggtctcaagcatgccgtcaccttcaccagctctccagaggaagccttgaaggacgccgatgtcgtcgtcaccgacacttggatctcaatgggtcaggaggaagagtctgctaggcgattgagagactttgctggtttccaaatcactgagggtatgtccttctgaccgatcttgaccgtcaccctatgtttctgtctgcctgttctcatccttctaatctccctcatcttcttcgccgcgcgcagagctttgcaagcgagctggcgcaaaccctgactggaagttcatgcactgtcttcccaggcatcaggatgaggtcgacgacgaggtcttctacggtcctcgaagcaccgtattcgaagaggccgaaaacagaaagcacaccatctgctcagtcttcaagtgagcgttctctttcctgtgtcggccccttgctctgctggataatttactgatgtttggttgcgctcttcttcctcttgggacgaatcatcatttctcccatggcacacagctcttacattggaaagagatcgatctaaaagcatttagaacgcctagcttcgtggcatagtaaaacattacgttttactttttcaaagttatcttgggctcttgtaggactttttttctctcatctaccatctcttttctccttaattttctttaaatatatgagcacttttgtcgaaaaagaaaggaaaatccgacttcgtcactgttcatctcaataggtgcactacgctatcggtgtataaagtatggatgggtatagaaaccaccacgaccttttcaggcagaagttcctcgaatgagttgcttgacctcaagaaactgataaaccctatcggcagcccacataggtttggtctttgtctcatcttgaagaagaaaagaggatcccccaaacaagattcgttaagacacgatgcacggtccaggtacaacctgtcaaacttgaagaaagactcacaggcttccaacttgtccttggatgcagacatgttggccatcaatgcctctcgggagcaactccacatctgaagcaggttgaattttttcttatcgtcacagtcctgggagagcgcgattctgagaaaaccgatccccatgtcaacccagttagagcagtctacatcagagaagtgagagtcgaggagagggatccttctgagacgaacgtgactagctccttttgcttggagagctccttgatggatgcttccacttcgacgagccctgaaaaaagaaagccacccgaggaatatccacacatcaggacagcatgaacgggtgaacatgacagaatattcacaaagacatacaggcggcaatctggtcctccttgatgacgaacgaagtggacaaagtagtttgaggagaagacatgtttgagaggttggttggaagatgaagagatgggatgggatacaagttaagaatggtcgagatgagaagtgagatggggactttatatccaaacggaatgcttcattcaggtcccaagatgcatcagcagatgtccccaacaggaacactcattcgagcgaaccggtcagcagatgaaatgataagggactaagacacgttcgtcctgttcaggaaccaggggctcaggaaactcgatagatagtgttggtccaaaccagccagctttacgtttaccgctttctttcaaacaatgtatgtacaatgaatcatatgcatacaatgagatacagaagtcgatcgagacagatttatttggatgcacgaacttgaataccacttaggcgacaacaggccagctgccaaggtcctcgaatcagacatcgttccgtgagtaaatatacgtgaagcatgagcggctcgaatgaagcttgacttacccgccctggaatttaagaagattgatggctagctgagagtctgtagaggtgtagtagtgatacaccaaaatagctccatcgacgtccttgaaaatgctttgacctcccggaccgacaatctgataagtggcaacgacgagtgagtaagctgattcaaccgcccaggaacagaatagatcataaagtgggtattcactgaatcatgagtggaaaggatctcggttcctcctccagagagggcagcaaccccagctttgtcggtataaggaccggtgatagaggtagctcgctttatagacatacaaccatcatcaaattggattgttcaggaaaccaagcggactgcagggcatggtttagttggagaaactcacggagacatgaatgctgtacgtgctactaagtccgctgcagcatttatcccaggatgtgaacagatagtaactatcataaaggaagcgaaaattaagctcgttttacagttaagccaacagattcacaagagagagtcaaggtacttactatcctccatcctgccagatctgaggagcttcctctgcgttccctacacttgcaggtcgggaggagatattcttccgctgagcacccgaaagaaccttaccagttgaagggctgatctcttgaaaaccatacagacgaatataccccgatgtcaatagaagatgcagcacagcgtgtgtgcgtgatgttcgggagagtgaacttgaacatgactcaccgatgatctgaatcccgctccagaaagatccataagtcaaccaccacctgccagttgcggcatcaacactcaattgaggatctttggcaagaagaccttttcagcaagcaaaccgttgggagacgatatatattcgactttgacataccgatagcattatagttatcagaggaagaggaagacaaaacaagaccttggtcgacccaagatccactaaggcctgcggtttgaagataatgcctgacaagttcagtatcgaatgtagaattgaaggctgaaatgatatgaaacgaaccggtagtagaagtagctaagaagatgccggatgtctgggatccgaaggaagacgcagcatagtacaggaggtattttccgtcttgaatggagagatcgggcgccctgaggaagagggacgtatagactgaaggtgagctgtctgtatgaagcatcatcataagaaacctatgatgagaagagaaaataattcaaaacaagacttaccagaggttggcatcagctccagcctgggtgtaagcataagtaccctgaggagctccattggggaatacctacgatgttgcatgttatatcgtgttagactgtgttctctgtcttaataacggccctctgatcgaaatagactcacgcttccagcagcagtccaggtctgatacgcccaccagtaagtgccagtatagttaataccaagctatgatacagtagtcaaacactaacaattcggtctgtggaggtcacaatagatagtttgggagaggtatagacctgttttgtttggtaggttcagtcaggctatagacattgtccagttgagggttgaaattcaaacaagcgtacctcaatgtacgtgcctgtaggcgtcttgactatagtgggatcgtgtgtgaaggttgcaccttttctgtagccgttagtgagccagaatttattcacaagtcagcatgccatgtttctggttacaaacttcagagacgaagggctatcagtgcaagaatttatgcttacaccgttccggggttggggtaggaagctgccgcgacggcagaaatgaacgcagtgaagagcgttccgacttgaaagaagttaaccatgctgtagaataatcaagcaagctgaaaaaatgaaacgagagatagcacaagttgatgcagaagatgaaagaaaacgaataagtctttctctctagaactaaatacggatctgggcgatgagttccgttgttctgcttgatcaaattcagccggaatgtccgtcccaatccaaagctgtcctctagggttctccgtccggttgaattcttcctctagagcacaaattgtgtcggagatgattgacgaaaagaatatttgatccgtgtccatattgtgtcaacgtatggcgatggcgagagaggtacatgatttcaagttaacgtttgacatcaagcgtgaaattaggatactcctcacaaacaaaagtccgtgtgtcaaggagtgattgaataaaagtgctgcttggaaactagacatagagaggaagattcatcctgatctaaaacgacactgagactcatagttgagccggttccatcggtcagctgatgaaggtcaagtccggaaggtagatgatcagctcgaaagtgtggaaatgttgccatgctggccaccgttccgccctctgtcaaggttagcatcaatatcaactatttttgagaattagcataccaaccagtacattaagccaagaacaaagacccagtttaccaaaattccgctcgtttctccgacaacatgattgctgagaaatgaatcttcacgatcttggatgaaaagctgaatcgatcatgtttatgttagggttgcatgctcaacctcctcttcgcgtcatcgttggggtttcctcacatatttctcaagaactctcgaaatgctcctcactagcttgttgctttcatgtcggattcacctctaaacactgctagaaaccatgccacctagaacgtcggaagctttaaatcctgctcagccttcgctcgactcatggctctctattccaccgacggtgtctgaacttcatcctgatcctgccttgatcacatattccgatccaatattcgacaaggatagcattttcatatctcttacatttccgattaccagcccaccaacgacataccagatcaggtcgcttatcaagcagtacatgtcgcctcctcaccacccgaaactaccaaaagttcttcagagaggggacggagtcagcccgactcacagaatgtacgcctggaaatgtctggtgctcaaaaaaggacgcgacggtaccggtggagaggtggactatgaagttagggaaggctctgacgatgatggagagaagtatggggcggatcgcatactaatggtgatggaaggagcgatcgactgtatcacattttgctgtcggttagtttctcttacgcgtcgttttgaacgtagccaggaggcttatagaatggttctttcttttgcccttcagatggtttggcggagaaatgcttggggtgggttttgcatcaatctgttcgagctgtaatctgaaaatgccttacttaactttaacttgagatgtctatctgcagcctatccgatttcaccacattcaaacaaccagcaccgaatctgttacagctcatatgtccctcgccgatcttcatcctcttctcctcgagcttgaagcccgcgactcggtcataacggacctacgagggaagctttccgctccaactcctaaagctgccgactactccgacctcactctcgagaaagctcaacgtcttctcgtcgcgcgctcaaaaacaattgaacagctccataaaagggttcgagaattgatcgagacagataaggtgactgtagaaacgcctgctgtgaacgtggaagaggagggcgagccaaaaaaggacgttggtgatacgggtaataacgacgaggatggccttggaacgtctgttctcaatcaagatctaggcgacccacacaaaaacctgtcgacagaagaaagcgcgtttctttatcttaagagtgtagatgatgatagagccatagcgggggaagagaaagaacctccaagaaagagaggacgagtaggcttggagagtagttaatataatgtagtatcaatctataaaggcgtagtctacaggctgtcgtaaggttatctatggttcacttttcaaatataaatcaaaatcatcacagttgaatacccacatctcagtcgacatacatccagtcttcatttacaagcttcaactttatacttgtatgtagctctcatcatcctctgagtttctttcgcattgctgctcacactgagctcgtttacgtctacagagatttgcagttgggatttagtatctttcccacttctctatttatttctctttttccttcttctttctgtcttctttgggtcaggtatcattgtcgttcgactggacttgtaagtgaggtccttttcagtgtcaatgctagttcttcggccttctactgatgagctaggcctccgaatcttcgctctcagaattctgtgcataaatctgaaggtctcgcaacctccaccaaggctacaatttctcttttagtgagtcctccatcaatcggatgacgaaatgtttaaccttgggtacggaagctgataaaacctgtaatggatacttagctagccgagcttcctactctttacccgttcaatacattcgcaatactcttatactgcggtatctcaatgagataggtacgatattcagattctcaaccatggcatgattagacagaagatgaagacgctaacgtggactcgtcttttcttttcggcctttctatgtctcattttgcctcgacattagaatgcctcattgtactcatactcctctgacgtccctttactggcaggccgtatcctctattgctaaggcccactctatacgtccattctccagttcggtacttcgcagcgtttcatcagcaactctagattcaacaaacgtcgcatcccaagcctcatcatcaagaacccactcactctcctccagcctatccacctctttcgacaaagttcttgacctatccttctcagcccatgctgctctccttcacgatttgaatggaaagggaggcgtgattccagacatatttgaagaagaaaaggcaggctacgatgacgttttgatgactcgagagttttcagtacctaccaaacatgcgttggtcgctccttcggcatccacaaccgatccactcggattcttctcaccaaacactgtaccaaatccaaacggggatatgttagaacctatggtggctgccatccagcgagctgacggaatagaagctagagctcaacttaagaagttggcagaagcagacatcgagattttgcacgacccggtgtacctaaaggcggctatcgactcgcttcttgtggactacgcagctggtgatgcgggtgtagctcgaagagatctgcttcagaccccggaagaaaagctggagtggtttattcattggtattctctcgttccagaggcagctgaaggcgatttgtctactttgtttggctcgaccgcttggacccgacagatgtgggcagttttggaactggtgtatcaattccctactcacctcgagcacctatctcgaatcatggttctctttgccgagaagggctacggtctattcttcgttcccagtctgctatcccacctcgcccggcatggtccgcctgagcaggtgtacgatttggtgatcagtgtctgccgtgcggccggttgggagaacggaagcaaagagaggtcggccgcgtataacacggccgttcggtctctctgtcttgccggccactttcatcctgcgatggagcttttaaagaaggcacggagaaggacatcagccttttgggacggtagaaagatgtgtgctgggatagaatttcacacgtaccaagttctctaccaagaagttacttcccaatggggaacgaaccatccttactgtcggacattaattcactgggccgtcgaacatcatccagaacaagagatcacgcctgcgaagaaggcgtacccagagttttcgcttatcctcgacggcccgcccgtgttggaagatctgccggcagcgattcgtcaggtgactcgacctggggccagagtttcggccaaggcactctcgttcgtgcttcaagcgctgtacgagtcacctgtgcgtcgtggaaatcttcttggtttgattcatcggagaattatcaaccggtcgtcctacgatccgagcttgccaacatacgcccgtcgattcaagacccaggagggcgtgtggatctcggcggagatgatgcgccttcaacgggcgggccgacacgaggacgcgctcgagttgtttgcatcgaggtaccagtggattggtctgccaacaacccggaggtgggcccggtatggattaatcgaaccgtcggatgtgttgatggacgaggcttcgagagatctgcacgcacgaccgaaaccccgagcgaaggacttttacgtcggcccggctcgaactctggcgatcaagtcgatcatcgcactatcgtacggagatgtgaacctattgcaggcggattatgcatcattcatcgaggcgaacaaagctcgtttgtcgatcatggacccaagcatattcgaagagattccactcgagtttgagttccatgatcctgtggatttggtagaaccgccagtgtttggcagtagtgaaatcgatggcgatggccgactgacgacgccttggtcgtcccctggattccaattccatttaccaccggtggcgcttccgtgtgctgtggtatggcagccgtggatcaatgcgttctcaaaggtcgacccggacttggcgatgcaagttctgcgggatatggtcgagcgcaagattcctacggaaagttcacagtgggctgacatcatggtcggactcgttgctcgggggcagccagaggcggcgatggaagcattggagatgatggaacgggatggggggattcagattttcaaaccggtggaccacctgacaattcaggctcgctcccggctgggtccgattgcgccggtggagggccgagtagtccctgtggtgacgtccgaggtgtacgtccggttattgttggaggcgactcaccagagggatccagaactggcgactttgatcgagggaaaattacgccagagcggcgtgatcgtcaacagggaggatgtgtcgatgttacgagatgtgtaccgaaagcgggtgtcatatatcgggttcgcgtctggggagcgaccacctacgtttgagcagacatttggtgatttgatcgacagggcgtctgagtggccggatgcagcgtcaacaatgcgggttgaagagacgggaatacggacgaagaagcatggtaagctgagaagggtgctgccaagctgggcggacacgacgaacgatttgggaacaccgatcgcatctgcattgatggaggtctcgagtagcgccagaaagccgggggagggtaccgttcggatcggccacgcagccgcgcgaagagccaggcgacataagatggcgacttctgtagagagatgggaacgatctgatgaaacagtgtgaactcagttgttctgtgcgttttgcgcgtgcgcgagagagagaagattatctagaaaggttatttgtgaacaatgtaaacatactatacgacacgttgcagcccgacgagctgatgaattaagctttttgtgctaagtatgcctgacttctcaaacgacccagaagggttgggtactgtctgaaaaggaaagaacctttcgcactcggtctagacccaacacaaagcggtttgcttgtgatttcttcttttcttctctctctttcttccttctgtttttggcacgcataaggtagaatagaaaaaataaaataaaataaaatccgaaatttcaatagacgtattaccaaccgtcttgcttggtaaggcttttcggtgagtcgtgaccgaagcgcttggtattgtgtggtgctttaggggcgatggttacgtagacgcagctcagcataaccacaaacgtaaccgtatctcggttgattcggccgtgattgtcaactgcgaacagattccggcgtttacggcaccggcattcattggaagattttctcaaacctttttactttttcaataaaattctgatcttgtcttttcggggacccgctccatccgactcactagtgagagcgacttctccttaaagaggatgatcagtctggggtaagaaggcagagtgttcttttctttcttccattttggagacccttgttaaccaccaccaaatacacagacacgtactcgctcacgtcgaccatccttccgaggtctatcccttcttattgttctttcttgtgcgtgcgaaaggtaggtaaagttcagttggcgcacatccaactcaatctttgtagtttgtcacccgagacttagactcagctcaccaccaccgcttagggctacagagaagctaactcattctctgtttggtcactggatcaatttttcctctctttctcgtttgttcagctttaatagcacggcaagcgctccatcgatcatagtaacctccatcttggtcaatcgtccatattgtgaatagtcctttcaacaacggcttctagaacatcttctcttccatattcaacaatggatcccacatcccctacctacaccgacgagaaaggcctggctctcaaagcctcccctctcggtcctccacttgaccctctcccttctgttccaactgaggacgctaccaacgttgagaagggcaaggcgcccagcacattcacctcttccaccggcggtcgtcggatgaagctctctaacatcgtcattgccccggccatcatcgaggacgacgttgatgtgtttgagcaacgagaagacggtccagactaccgaggggtttccttttggggagccgtcgttcttttgctcaagcagcagttcggacttggtgtcctttccctcccaggaatccttaacaccatgggtatcgttgtatgtcgaactgctcatcctgtccaggcttgtctgtcaagagaagtaccgtatgctgaattgaaacactctataccccttctgccttttcccggaaaccaaaaattagcctggtctcattctgattctcttcttctacgtttggactacctacggagactacgtcatcggacaattccatgctagttagtgtctgcttgctcttctgtcttggcgattgcgcaagagcattgaatctgatacaacgtttcgtctcattcgtagaacaccgtggagtgcacaccatgggtgacgtcggatacattatgtggggtcctcttggacgagagttgatgggttggggtttctggcttttccagttagtcgtttcttttcgccttgatcacatgtctcgtcttgccatcgagatctgacactctgtttccgatcattcttctttcttaggtgcttcattgccggtgccggaatgctcacgatctccatttcattgaacgctatcaccacccatggaacctgcacggtcgttttctcttgtgagtattctctcgaccatatagtagccatcgaaaactgcttacacaacagggtctgtttcttctcctcagtggtcgccatgattgtcattgggcttggagcgtccatccgaacgttcaagcatatttcttggttgtcctggatcggaatggccgctatccttcctgctatcttcttggtcacgatgtaaggcttttatttacttccgttcctttcttgctagtgctctttggatcccgatctaacatacgcttatatcgctcatggaacaatgtctcggctgacgacagtgcttgcgctgtggctgatcgacctgccaacgcgcccgctactggaccattcgacaagggactcaaagcatttggaaacccaagtttcgtcgatggaatcatctgtgtggttaacatcgtattctcttacggaggttctcccggtttcttgcccgtcatcaccgagatgagggatccgagacaatacaccaaggccatgttccttgctcaaactatctgcgtctctctctacttcgtcatcaccatcgtgctttggtggtcttgcggacaatatattgccagcccagccctcggttctgccggagttcttatcaaaaaaattggatatggaattgccattcctggtcttcttgctggtccaatcatctttacccacatgtcagccaaattctgctttgtccgggctctccgaggaaccaggcacttgcaagacagcactcctcttcactggatcgtttggctttccttggtcgccgttatgagcggcttctcgttcatcatctcccaggttatcccgttctttgattacttgatcggacttgtgggcgctgtctttgcgaccttcttctgcattgtcgtcattggtttcatgtggttgcacgacaacggtcagaagcgcaaggagggaccgacctctctgtcctacaagcttctctacatcaactccctgctcatgatcttccttggattcgccctccttgttatgggtctctatgcgtccatcgatgctatcaaactagccttcgcgagcgggaacattggaagtccgtttgcatgcgccgacaatagtaactctgtttaatacaccttacacacattcatcctatcttcacctcacgttctccgcatatcctctattcattttctggagtttaagtcaattacttaatataaacatcaggttcattcatgaaaacatcgtcctacccatcctttgaattcgtcttttcgtttttttaaaaaaaaattaatttttccttccttcttcactttaaaatacaacaaaaacggcctcgaacagttttgagcccatgtaactatacaatgaatgattccaaccacactcaaatttttcaattggaaccggacggaccatccaagtgaggtcggaggatttataatcgaatttgaaacgtcgacttgcagaacatgtg

SEQ ID NO: 359 - DNA, 12723 bp, Xanthophyllomyces dendrorhous
acatgtgagttagtaggaatatcgaaataaagccacaagaaaaattgtccaagggtttattttttgcttattcgcaaaaaaaaatttaattcctgctcttcctcccgcaaaagccaaggacggggaagtatgatcagcttgctcgacagtttttcacggatttcaaacggtcccgtaaaaggaagaggaggagaattgcctatacgatgcttatcaaactcccacgatcatcgattgcctatactttggtactttggatatccgtcatcaaataagtcttctgagtgttcccttgtcctcgacacacctcgtaccccctacattttctttaaaccgaattttgatgtcagccgcccccctacagcggatgtccgacagtctgtcggaacatgccgagaaggatgaacctaataaggattcctctaagaacttcctgtcccgtcgtcgtgttgcgcctaaagcagaaggagtcaacatccaaccagctgaggttgaaggtgacgagaacgacgtgtttgccgtcacagaggacgggccggactaccggggagtctcattctctggagcaatcgtgctcttgttaaagcagcaggttgggctcggtgttctttccttgccagccacgttgaatactctgggtgtggtcgtgagtaaatctgattgtctttttatcgagcgatcgtgtaggtacatttgtgaccgaataagttgtcggagagagcttcaattattcaaacaactcgctcgttccctgcatgtatcgtgctgaaaccgccttgggttctctcctatcgtcaaaccaaccagccgggcctgatcttaatcatctttttcggaatcgtggcaacctatggtgattatgtcgtaggacaattcagagtaaggttggtcacccagtttctattctcttttcatccttctccccttcttcttttcaacccaacataggctgatcgaagccgctttggtcgcagacaccccggggtccacacactgggagatatcggatacatcgttggtgggaagtggggtagagaactcatgggctggggcttttgcttacttatgtgcgcctatctttcttctcaaatttgaacctggtcttgtactttggctgatgtctttagattatcatttcttctctcttatccggcgctgcaggtgcttgttatgcggctccggtatattgaccacatccattgcgctcaacgctatcacttcccatgctacctgtactatcgcatttgccggtacgtcttgtcttaaacatgtattcagtgggcgttggctgagctggtgataggaacaattcccattctgatctctttcttggtgtaacggctgtttttctctatgttggctttcctctccagtcgtggcgatggtcattatcatgattggagcttcggccaggacgttccaacaaatatcatggatgtcatgggtggggatttcttgtatcatcccggccattctgctcgttaccatgtaagtgtagcttcgtctcaagacttataagagacctcttgtgttgagaacgggatgaatcgtccatttttatttttattctctcttcactttcttatcctgatttgctctaccccaacagtgcttgtgggatatctgatcgacctgcaaacgcgccttctattggtatctttgacaaggagctcaaagcttttgccactccctcgttcgtggaagccatggttgctctctcaaacgtcctctttgcctttggaggtgtgtccttctattgacagataattacgtgttaatctgctggctaatgcttcatggttctctgaatgactatcaggtctgcccgggttccttcctgtaattgcagagatgaaagatcctaggaagtacacaaaagccatgttgatcgttcaagccatttctatcgcgctctacatcgccatctctgtacgtccaattccgtatcttgattactgctgcaacacatgagcgctaagtgatcacttgtatggatttgttttgggaatctaccaggttgttctgtggtggtcttgtgggaaggtaagctaactgcaaattttattcctcaaacccatactgacggatctgtcttcccgctactccatatcgatggtctcttgtttcagtacatcgcttctcccgcgttgggaagtgctgggccattagtcaagaagattgcgtacggcatcgcactccctggactgcttgctggacccatcattttcgctcgtgagtgccattctctcgaggcttagaaaatccaagacatgtgactgatatggcaatctcattcttctcggtgggcagacgttgcttctaaattctgtttcgtccgactgcttcgaggaactcgccaccttcaggaaagcacaactactcattgggtcgtcagtttttattttctttttctccttcttcttcttcgcatcaagctgctgtcaatttcttagttcggatatgagtagctcacttcggccttgaaacctaacaacgattatcaactttgtatcatcagacctggctgagtttggtcgtcgttatcactgggttctctttcaccatctcccaagtcatgttcgtccatttgattgtttctctctctctcccctcgtgaggcaggagtaatctgacctccggattgattgacgatgtcctcgacttgttttttctagaccgttcttcaactacctaattggaattgtaggagctgtcctggtcagtctgttctgtctatcgatcacgggcgtgatgtggatccatgacaacgaccacaaaaggaaggccgggccaacgacgctcagctataaggtaaatcccttctcaaaacgaaaacgtgaaataagtgattcatgcaaaacgatatcagcgtactaaatatgtttctgccacagttgctttacgccaacgctgtctttttgtttgtcataggaatggcaattctcggaatgggtctctatgtatggctctatgtgttagcttttcagatatatcctcatgtacttacgctcttcctatccttggtttctccacacccaccttcttccacaggcatccattgatggaatcaagaacgcgtttgcggctggagaaattggcaggccgttctcttgcgctgacaacagctagacggttgtggtacatcatcacgcgaattacccaaaagaaccacgcccggttcacccttttcttccttcccctcatttcatacaaacccaagagtgaatgaacgcattgtattctagctatgaacatgtagtctcttttgaaacactgctttccaagactggttataaatcaaacgttagagagccacactggttacaggttactctgggatagtaaccactgacgagacgtgcctcaggaaatttagacaactcgttttgactcttgatcattcaaatcctcgaccgactcccttcaaacgtctctctctctccgattgaccgtcccgcttgtcgcccacacttctttctttacttaatagcttatccgggacgcaatacaactagatactgtttgtgattcttcaaaaatggcacccacagcctccgtcagcatgccctcttccgaacaaccctcaaaaaggtcaaagcagaccactcggtaccacgagcgagcgaacgccaatgcctccacctctgctcccttagctcttccttctgacttgcctcagcctccgacagatgactctccttcatttggggatctgctgaatgctaagcctgctcttgctccattatcctcgtccaacaacgcaaccgtcggatcagaaaagacgacttcgctctctcttgctaggcttcttacacaggcccttcattcgtccgattcgccgcttctggagaaatgtcttggttactcggatcatgctttggtcagcagcacggtgaagaaacttcagcctgaactttctgtcgtacttttggaaaggctcggggagcgaatttcattgggtggtggtggtcgaggcggaggagctagtgcaaatcgggtgagaggtgctggcgtttggttcagatgcgttatgagggaaaagattggatacctagtaaccgtaagtctgaacttttgtttcccgatcactacctatatatgttctctggtactgcgaagcatgacgcgagtatcgtgatgcacgaggtcttgtacgaagaattagtttcaacagcgaaataaatactgacggcttcacttggctgcaatcccttctctcggctctaggtccccaacttgcttgtcaaacttgagcctattcatcgagttcttaacgaacgaatcgcccttaacgcaccccttctgtctctctctggtcgattggagttggcactcgctcagattgaggctcgtcaacagcagcaggcatcccaggcggcccgagctgctggcaagagcagcaatggaggaacttatattgagggagaaagcagcgactcttcatcatctgatgaagagagcggaagtgaggaggagggtgaggatgttggagagatggaggatgttggattcggtattggctcggacgaggatgaggacgatagtgaggatgaggacgatgaggacgacgaagatgcagaagatgacgaagacaagtgcgtatatcgctcctttattcttttcatattcacattcactctttcaacttcatctatttggatgagagcgattggtataccgaggactgacgctacgtttgtccatacagtgagtccatcgaagactctgatgctgaggtcgtgcgcaatgcgaccttggtggatgatgaagcttccgaggagggtagcgaggccggggacgaagacgatgatctcagcgagtgattctagggttttgtttgggattctcatgattcttgttctatcttatatatctctttctacttggcctggagaggccttgttattcatgagcgaattcattacttttgatttctgactgaattttttggtagggacatctcttgaggatccagtcttcctgtgagtaacttgttagtcgatcgccacacacagaatttagtcacgaaaaaagtgaattgcaatcaggctgtcaaccccagcggccatgctacttcatagacgatctttatcttcggtaatagactatccttctagaatctcttcacgaaagtctcagatgatgacttagctttagcattcaggtgtgcgacctataaattttatgtcacaacatcctagtcgacgaacaatatatcaacaaataaaatggaaatcaaaagctcggctgaaaccctcttcgcagtgccaattctattcaagcttccaaaccccgtcagtctctttaaggagtatagttcggcgctcgtccaaagaaactcggccagcattgaggatgaccgttgttaataggctggtcgtttcggagaatatgatcggtaccatcgtgagtgacattgacgggttcttgctaggtttggatacaaaataaggagcttacgtgtttttgattgtcggtagacccttaccatcatagtctgccgccttagcatttccagcattaacctctctggcagcatcgataaacttctctagtgagacataaccataaccctttgacccatcgaagtagccgttctcatctctaagttttattcgtggcgtacaagatagataacgtcagcgggagctattcgacaagcttgatcagaatgaataagaactcactttgagtatttcatatagaaggggttgtactgcagacgaatatacagcgaaatcgtgagtacacttcaaatgtaacgggaaaagttaatctacacttacatcgatctgtgacaacaagcgcgaagacagatacaatcagcatcagaagttaagatgacaagaccaggaggtaaaaagcatttaccttgcctacactctcgtccacaacagagtatcctcgatgagcttgatcaaccttgacctctccctgtattggtcgaagagacagcgatgacaccaatcagtgaccagagaaggcttattcatttgtttcctttcatggtcttcaagacgtaccttggatgccatgtaatggaagttttgttctgagtgtacaccggccttcatcggagcagcccatctgtattgtcgagatcaggtgttgtaataaaaacgggcgcatcagtcaatgcgcaagctgctgcttgagagggaaggtgcgcagaaaagggttgaatactgacgaagcagtgtacaccccgacacctcgagttgactcatctccaattttctcccattcgacgagaagagtgatagtgtcttctgttcgagcgtcacatcccaaccctgtggcgatgcccttagatccagaggccgtgactctgaccggtttgaagataccctcaaccatccaagcgtgcacatcaatatggtgagagttgagatagtaagaaatgtcagaatcaatacctgcccaagacttgaaagtctcgagctgagatttaggctgtgacatgctatagaatgagtgttcagatatgagagcgcaaacgtcaggctcaggacgttcttcaatcggactgagcttgcatcggtatagaacgtactaggaggagaaatagttgaagtttccaagggcagcagctctggatcgagcatcactataggcaggatcaaatcttttgtggtgttctaccatacaaaccactccattcttcgcagcaagttcaacaagttcctggtgatgctgtgaagaatcaaatgtggaggagagatgttagagtcacaaggtagatcaaactgtcgcatgtggccaaagtggcctacctctagcttctgggttgcaggcttggtaaccatgacgtggtgcccgagctccatcgctagtttcgcaatctttggacatgaaggtcagtatgatgagcagttcaattgcgatgacgggacgaatagcttacaggaaagtgtgtggagtctggagtaaaaatgatgacagcggaggctttgggtagagcattgagagcctcaatatctatttcaagtaattgttagaaatcatagtctagttgtgggatttcttgatgctaaattagactcacaagcttcaggatctcgagtttgctcatcgggatatcctttaaaggtcaagtcaaggccacggtagacatccccaatgttcttttgaaagtgctttcggatatctggaaacttgcttccggtggtgccaaccattgacaatctgtattgtaccagagagatatcggtcaagccttcatgacaaaaagacgataatggtttcggcgacagcagttacttactctgaaaccttccctctacgccgaagatcgaacatggtaagagcgacaaccccgatctggtcgatgacatgtggatataaattgtcagtagcaaagaagatgatgaatcagatctgagatgcggcccaccttcttgtctgaagtggattgacctccaccaacgaagcctgtagtgtactctccagtgccgaccatcaggactgggagtgtttcgagagaggcgtagtccaaggaagtcatcgtgagagttttgaggagtacagtttgagcgcgagcaagacagtgtgtgaaattgaatggacgcttatgatagaagagaagaatccaagaaaaaacatatcttgctgtatcggttcgttggtttcttaagaatgcttcgagtagagccggtccggccaaagattgaacagatagatccgtccacggaccggagccgggccggacggccgtgttgttacaatagatgtttggttacagtatccacagcgttgtatgattagggttgattgctcgtgtactgggcctccacaaatgtggtcaacacatgtgagatggaatgaattgttccaaacagccaatcattcttattgcgactctgccctctgatctcatcttcaagctccgttctttttcttttgtttttactccgagtctgtcaataacacaacatgcgctccctctccaccgtacaggcttctctccgccgagcaatggtctcatccctgcatcacgtacttcggcccgccgttgcctcatttccctttcgacgactcgctactattcctcctcagcccttctcaactctcgccagcacaaactcgtcatgggaagtgtccaccacatcagaaccacacacatcatcgaaatattcggagaatgaagtttccgatcagatgttcttcaatgtcggacgtcctgtcggaggagaacgcggtgattttgttaggtccgtttcttcaatagcaagataacctggccttgatcgaagctcatcccactgctttcatctatacttcgccattcagagttgttgaggttggacctcgagatggattacagaacgaaaaagtcatatcgaaggatgaccgcgctaaacttatcaaaggccttctagtggctggattgaaaacaatcgaagcaggaagctttgtgcatcactcatgggtgcctcaggtttgttcatcttctatttgtagtttgattccagcagtgtattcattttactacatccatcctctacaatccaaactgacatatcgattcattgcgccagatggacggtacagatacagtattgaccaaaatcgggaatatgaaccctgatgtccatctaccggtctatgttccgaacatgagaggattcggccgacttttaaaggccatccaatgggatgagtacaagcgaaacgccaatatagaaggagagattctttgtgacgagatcacagtaaccgttaactgcactgaggtctgttcaccactccacctactcatgaatctcgtacacctcaagacttacctctgggatttccttatttgtaaatgacggggctttcgttatgcttggtcatcctggacgtggttcggttagacattctcctttgcgcatgaggctcttaacattcgagagcatatcgaatcccttcgagaagtgatctccttggcaatctcttacggctttcgggtgcgcgctcatctagctgtggcgatcgaatgccccttcgagggaccggtaccagcttcgcgagtagctgacttggctcaagagatggtcgagatgggatgctacgaggttgctttggcagacacgaccggccgaggagatccagttactgtgaggaatctgattgagacggtagctgctcggattggcgtggatagaatctctgggcatgtgagtcaacctgatttccattttcgctgttcacttgctggctgcatacttagttactcgaaatatgtctatatacttttagtttcacgacacattcggcttaggtctctcaaacgtcctcacggccttgtctgtaagtgatcactgacagtctgagaccatattctcaagtatttgttgaaccaaagacatctctcttggcttttgtttgagctgtatgcagctcggtgtccggtcctttgactcggctgtgggcggtcttggaagttgcccttactctccaggtgcggccggtaacattgcgaccgaagatatcgtatatacccttcataatctgggctatcacactggagtaaatattgtcgagctcgccaaggtcggtggttgggtctctgaaaaaattccgcgagagaacgcatctcgcgcagggaaggcgatcctctctcggatcgcgtgggaggaagatgctgacgtgaaacggctacgagctgagcatttcagcttctggcagagctgggtgatcaaaaaaaggttaggcttgttggcaatcctttttggattagcaacagcagcaggggcctggaaatggcaaaagatacaagcacatccagcaatggtcgaggccggcttgcgatctagaatggcccaggatctaataaccgatgccttgtccgagatggaggacacggaacgaccgccacggacagagaacagaccctcaggctacaataaataaaatatgacccgtctgtatttaggtgacggccttagttacaattatcaaaatgttaaactagaaagtattctatgtataattaatttcatcctcctttctctccttctgcgtagctgatgatgggacctgccgttttgtgtcagcatgaaggcacatttcgtacaatgagctgtgttgaacgaggaagacaaaattcaagcaatatacatagtagggtgtagagagaaaaagccgactttcgactgaaactagctgtttggccaagactaacagcacaaatgcttctgaacatatctcgatcatgcgtaactggggggctcatcagccgacagttcatccgacacaagctctttgcctagatcgtcaaacgatcgacatcgacacgaacacaaatcccgatcagtcaatcagtagaactgccgaagaatgaaactgaagactgctgtgacacgtgactatagaagcggtgtcatctgacttgcgaatttgcttgtacaaaagtcaggttggctgattcgctcgcgttgtcgacaagaattaggaaacctcatttccagcctttctttttttcccctcagaacacctcacatcttctcacaaaaaagtaagatattttcacttggagttggtggatttggcgactgaatggagagacagaagcttgatactgataagacattcttttgtcatctatctcgaacagcttcaaaatgggaaaggataagcttcacgttaacgtcgtcgtcatcggacatgtggattctggaaagtccaccaccaccggacacatgatctacaagtgcggaggtatcgacaagcgaactatcgagaagttcgagaaggaggccgccgagcttggaaagggatccttcaagtacgcttgggttcttgacaagcttaaggctgagcgagagcgaggtatcaccattgatatcgctctttggaagttcgagacccccaagtagtgagtagtgttcgcgttttgtaccgagtgtgcttcctcgaggagggcggaggagaaggacgttgtgtctgactgcctttttcctcctttttctttgcctgttctgacttgtctgttcctcctcggccctgttgattgtccttgcggtcgccttccagcatgatcaccgtcattgatgctcccggtcaccgagatttcatcaagaacatgatcactggaacttcccaggccgattgcgccattctcatcatcgccggaggaaccggagagttcgaggctggtatctctaaggacggacagacccgagagcacgctttgcttgccttcaccctcggtgtccgacagctcattgtcgccgtcaacaagatggacaccaccaagtactctgaggctcgattcgaggagatcatcaaggagacttctggattcatcaagaaggtcggatacaaccccaagaccgtcgccttcgtccccatctctggatggcacggagacaacatgattgaggagtccaccaacatgccctggtacaagggatggcagaaggagaccaagtccggtgtttccaagtgagtgtcgttctctgtctttgtcttgctggtgcttgggtgggcctgtgctgttgggatatgtcgacggaagctgactgtgacgttcctattttttgccacaggggaaagaccctcctcgaggccatcgacgccatcgagccccctgtccgaccctccgacaagcccctccgacttcccctccaggatgtctacaagatcggaggtatcggaacggtgcccgtcggtcgagtcgagaccggagtcatcaaggccggtatggtcgtcaacttcgctccttccaacgtgaccactgaggtcaagtccgttgagatgcaccacgagcagcttgttgagggtctccccggagacaacgtcggtttcaacgtcaagaacgtgtccgtcaaggacatccgacgaggaaacgtctgctccgactccaagaacgaccctgccaaggaggccgcttctttcaacgcccaggtcattgtcctcaaccaccctggacagatcggagctggatactctcccgttcttgattgccacactgcccacattgcctgcaagttcgatacccttgtcgagaagatcgaccgacgaactggtaaggtcatggaggcctcccccaagttcgtcaagtccggagatgccgctattgtcaagcttgtcccctccaagccgatgtgtgttgagtcctacaacgagtaccctccccttggacgattcgccgtccgagacatgaggcagaccgttgccgtcggtgtcatcaagtctgttgagaagaccgatggaaagtccggtaaggtcaccaaggccgccgagaaggccgtcaagaagaagtaaacgtccccgttggcttcttttcgataccacctcactacctctatcctatcatgttatgatatgtacttccgaatattacacttttctagccctttgacgtatggtgttcacatgagacatgttcagcggctaaactaactacaacatcaagcaattaatttgaataagcatcacaattaaggccacaaagaactggcaacctctgattgaaaccacgagtcgtttccaggttgctattcaagaacaagtctcaggaagtgaaatctaaacaaactagctctccatagtagataaaacactttcgagtgttatgaggacaaactgcgaattgttttaaagagtatcaacttaagtattctgttggtaatgaaaaagtgaatcaagagagggagatgacagaagaagaaagaaggtgaggcaaaaacgaacataggtagtcaaaatacagtcaacattctggcccccttacgttgt

SEQ ID NO: 360 - DNA, 6718 bp, Xanthophyllomyces dendrorhous
ccatcgtggctgtttctcttagtgtcgtcttagcctttctgttctcatctttcttctcatctgagcacgttgtgttctctcacatatatctgtgctcgatactttcttttctattctattctctctctcttttttttcctctcctcagtattcacatacaccgttttttggctaagagaacaagggtttttctcatctgtagaacaaatcgtgaatctccttacagaatacacggtcttggaattggatgctaaatgcgagggcggaagggtccagctaccgtttgttgtgacttggttggttttagagttttgcagatgagaatgtatgttgaaggctcaggctctcgaagatctaggaagatgccaaagtcataggcataggtgtactggtagataggacgaagacacttcgaacgaagatgacagaattcaaacttgagagaaaagataaaagagaaaagagggaaaaaactatggggaaagggaaagcgacgaagtacttgtatctccccgtcgctcggcatgtatgcaagccagaagggatgcaagacggaagggatgcaagacggaaaggatgcatgcaggtatcgaagtgtgaaaactacagagggtagcaaatacgtattgttgagatggtatgcaaatgcatacaagcatatactactcggtctgatccctaacactaaatatcccagttctgctataaacgctgctagacgcgcggccgtccaacaacacgctttcgggctacaaagtggaatgcgtcgttctttgccgcaatctccattctctctattctgtccgttctccccacctagagagggagatactattgaaaatctgatcgattgttatgtcctcgcatgcatttgcatactatctgaactatacgtgtttcttacatctcacctttcttacttgtgtccgtcctttccgttctgcatcacttcaggccggtgtgcatgccgagggacaaagatatacaaatagatcactgctattttcttctccgtgattctttcctttttttcccttctcctccaagtgaagaacttatcgtcttcgtctgaagcgcattagccctatctctcaacacatgtctgtccatgactttggattggatttaaatcttcgagagcttgagcttcggttcaccactacatctgaaaatcatactatttatcaagtcgtaacagaaacaactgccgagcctttagccttctcatctcggcattcgtgttttgcctcgtgttcttcgacatatatatctctccgcccaacgctttctttccttttctctttctcttttctcagctttctccaagaactatttggtcactgaggttagtccctatctgtttccgtactctgcctatttcctcatcggtcaccgatagcttacttactttattgtagaaagaaaccatgttatttggcctagatttttgttctatttgatgttagcacgcccacaaatattctgttccctcaattaaaaatggctaccaacgtacaagatcaccttcgggatctctcaagactttggtctaaagtacagctaggtatatccctcattatattttattcactcattgtcaaaaggttcacacatctctatgtatgacgaggtttaaagagctgggtgaaagtgacacatcgaatagcttcaaaatatttccccccgagcaaaccatgtatgtgatagatattgcaagttggtttatcgacccacacaacattgttaaattgtgttttgaactcattcttcaatttgttgatttaacgcgtacatcggctgataccgttcttctccttgtttctttcttgtactgttccattccttttaggtctccttgattatcagccctttcttttagcgtagaacgaaatattcatattcagagaaggaacggaaatttcttcatcgaaactatcaacaacagaaccacctttggaaacaaatatcatgtacattcttattagcctcaaactattgtactcactgacgtatgacacatgaaaattttccgtgtcatctttgttgttaccttctggaatatttagacaaaatctcaagatcgtgaaaacgaagaactaatttgtttggaatgattacgtgcaccgcctgaaaaaaagagcttgatttattacgctgcccattgattgcgttataacagtgtttgcctcccaggttccttcatctttcaaatgtaacagccctttagatgaattcagaaaagtccatgggcataaaagtgcagatatataatcatgaggcagcaacagtagctttcaacaactttgcctttttatcctttgtaattcaaagcacacttccattacacactgataactcaggctgtatccataaggtcttggttgtgaagaatggaatgaaaaagagcgcgaatagcaggtgtgctcgtatgatgacattgatattcttcccttgtaacttgccactctctgcaataaacggttttattttgggccgattttgttaatcttgatttccggtcgccacgattgattttttattcgatatcaggaccttggcacatgaaccctgatttatatatactacgcatgaaagcctggagtttttttgccaagtttttccatgacgaaaacttttagtatatctataccactacgacagattcattgtgtttgttgctaacgagggtataggaatagacaaggtacatgatgtagtttgacatgaataaaatttttgtagacgttgcactatagatatattagagaaacagtttcttcggtttgaattgtatgctcaaccagattttatgttgaagatgaatctgatttaaaagttccattcgtatcttaaaaagcagaggccgactctcctcaaagacgtgtgagggttccctaaattttagatatactatgagcgtttctttcatggcaatttaagaattttgtgctgatcagatattgcgtttttgcattgagacaaaattaccttcatttttgagcacaatgaatttgtgaaactacagggctcgcttacgtctgtacctccgacttgataaggtatttaacatcaaacatgtaaacctcgtcatcatgtcgagctcgataatgctataaacaactggagttcaaaacaacgttgactcggaacatgctctcaagctataagtccactgatgagaatatcatttcaaagtgtgaattcagttgcattctaaacatgagagccagattgaaagcactcatgataccattgatgcatttctgatgagtttgatattttaaagacaatgatatacaaaactgatcacaattcattccaaatctatttacaaaacagtcatttctattctatactccattttttgagcagaaaccacattgtgcatgctaaattcgataatggcaaaacgttacctcagtattcatacagaatcaaaggaagacatacagaatcgtcaagcacttctcatatcgggattgcttgaacttcagatggaacctgacgtagaagctatagtttctgcttcccatgttacagacgaagggaaacaatatctaaaatttgatagagatagtgccaatgaagaaaacttatggaaatagatcggaaaaattgactaaggtttgaaggatgttgcagttttgtctgatgacgagagtgttacgctagaagaaaagcaatctttcatgaaatttgggtagaaaaaccaaagtaagaacacatgatcagtaaaatgacatttcttatccatcgcgatatacaaataaaacatttttgagcgattgttttatgccgagtactcaatggtctagtgcaacataacttcactaagatgaggcccgatacgacatgattccttcaacgggttcatcgaaaagaaacaaagtcttagttttgacatggaatgaagaatgaacaaaccgaatcgaagattcacaaatcgatgtacacattgtgttcattaaattgattcaaatggaagatagaaatttcttccagtacactgctttgagattgaaaattgctgagatacatgagagagatttttttcttcgagacgtttgggaaaagttatgtatgttgaagttattcatatttatacggtgagtagagttcgtactgcaatgatgtgatcatcgttctatagtcgaccaaacaaagatcactttggcaaaaagcttatcgaaaaaaagcagggatagtggtgggcacttagtctaagaactgccattcagaactgcagatcaagctgttttcgactcaaataacggatgaagctgatttgtacttattcttggttagataagtatctactataaatattttataattcttatcttctcaaatgttccagagagtacaatatgaaaatatcatgacatatgccaatttctgcacacagagtgaatctatagtgactctatcaatttgaatataccagatattctgaaaaagtactcatgaacttcacctacattgaaatggagtgattgaaagaatgggcaaacaaatatgttattactcctatcgatacgttctaaaggtattcgaaatgacggtttgttgtgctcgttttgaacaagacaaaagctatccttgattgtttgtgaagtgcttaatgatgtgatttttctctctgcagctcattagtgccatgtacttaaaatatggtcagcccagcaaatttgacgatcgttacgttttatcttttgcataacgttttttggatttatatctgcacgtcaattatcgaacccatttttctgaagagtacagtgaacacatcaacatctatcaaatcaaagtttcctgtattcaagatcttatgaatctagctcaatctcaagcaatatgtcatgacacgaatttgacatttcactatgctgggacctgaaataacctttttcttctatcaagttttgatctgcatctggagaagttttgcagtagtattgattcactagatgatgtacgtaaacatgcaaaatgtttatctcacttcaacttaagcttcatcaattcttatcacagaagatctcgtgactaaaaacgtcaaggtcaggtatgaatgaatgccaaaaacgaagaccttctcagcgctgtgaaaccaatttgcaaagatgcaaagtttactcaactcatggctttggtcgagacttgttgatgatgacttcgacatacttctttgatttcgatctattttcttaacattccttcgaaccttgaataatttacgtcataatttgtaatgtaacaaagtataattcttgttcagataacaattatttgatacgataaagctggttttttaaccttttcgctactaaagtcattttctaggcgttagcttgaagtccatcagcaatgccatggaagtttatatctgacaggacgaacaaatatttttatccatcgtagctcaaaccaaaaaaaagatgacttgtgaaaataagagacgatttagtatcatcatcaaacatcatgaagtgagggtatgtggaatagaattgaatcagaacaaatcaatcaacgactggtcacaagcattattttgcaggaacacaaacgtgacacacgcaatagattcggaattctgagctttggaggaaggctgcaatcaataatttactcatatcagactatcatgatattatgcgagaaggtgagaaagtcaacgaaagatgattcaccgaattttaggtcaagctatcgtccagatttttactttacgcaataatgtatctattgctctaccgaacaattgtggctgtgtttccaagcaactagacatgcagtatgtacaagtaggatactttgttcgatattattcacattttctgaaacagctcaactatcaatgttattgacgcttaaatgatgtcatcaccgaaatcaagccagacaggcatctgctcttcatcgaatatctaattggctcaaaataacgtggggaaaccttcagattaggtgatggtacatctcgagactggtgcctaatgtatattcgccccaagatattgatgcaatgatgaattatcaatggaacatgaatttcagctcagatgatcgtggaaattttgttaaagtaagtataatcaccatcagatgtttgggcgatgaacctgagatttcgcaatcataaccagggctcccgacttgcgtctgaaagtcaatgttaatgactcgatttacgatatcaacgcatgaagctgaggtcttttcgttatttgccagaaagaaccgcgagatacgcatcggctcgtcacaaacaattatcaatatgattaaaattatgattacaagattgtgatggatgaaacgagcatactgacaggcagactatgctttagcaaggaggttgacacgatactggcagttttgatagatgatgtctttgaatatctcatcccttggtgacgaagtaaggtaagtaatgttacaacgcaaaagtacccgttgacttgaatgtcaagactaaacttgatagatatttattgatatctgtatattgaaattcagataaaaccgtatggccaataaccaaaatctgaagctctttacaaatgacaaaacgcgggacacacaaaggtgtcatccaattgattacgaagaaatgaagacatgttgaacagtagagacatgatctatatattattgtgataaaagaagagtgttgagttgattttaaaaatatacacgatttgttctacagatg

SEQ ID NO: 361 - DNA, 22132 bp, Xanthophyllomyces dendrorhous
tttggacacaacgtaagggggccagaacctctctttctcgtttttcttactcttattcctcctcctctttttctttctggctcttgtaaaaccccaatctaagatgacattggcagggcggttgaacgcaaaagtgtagacacaaaccgtggtttccgttgtctaggtaaccagtagagggcattggtgtgttcttctatcttttccatcctactttctgcacatatctctccaatgtcgtatatgcagtaactggttttacgctttctgtttctggccctcccaaacaaacacacacacggacgcacggtgtcgatttgatgattgagagagccaggagcaagaccagatcggaatcaggattggagactaggtccaagttgcccttccgatacgccagtacgagaaactctctgtttatatcatcacgttcgacaaccacgtacagcgcagatccaatcgacagagataacagcacaaagatcgtcaagaacgtagataggaggcaagagcatgcgtaatcgtgagtttatgggcaatgcactaagaaataccggaatgaatgtgtttcattcgcgtactgcatgcgttcaacagagcctctcgttggcttttcctactaaatatatatcaacttttttgtttctctcccaaatttcacagacaagacagatgagagatgtcggccagatgtctatgatcgctatatattgtcttatatctcgtgacgatgattattcaagcggtgttgttgactgatttttggtcctccaacgtcgaaacgtgatcataacacactcacttacaagcctttcctggacatcaacttctctaactccgcctgatgataatcgttcaatcctgacgttgtgactcatccgaattttaagtcaagaccggtatctttgctccctatcaccgccagaatcttaccacgagaaagaaggtcctatgtaagcacttatgtttcacctgcgaacaacccaattgactttcggcccagaatgataagttgggtcgtgctacaatcaaatagggccatcaattaaacaacctgaacttgtttgatcctgtgtcaaacatcgagatgcgactatctcttctttatctttctgttagttatgcgatcatcagaagcacgatttcgttcaagataagatccagcgggttaccctacaaaaggtgtactatgtgtgatggattcatagcgttcatatagggttcatgcgccactcttggacatgataacttatttcatcgtgcacgcaactataaatcctcttccctgcatcttacgtcccggtttccttgcaatgatggtttagtcacgccactcttcctcctaaccgctggtctgaagcagggcttttgtgtcagtaatgttcggctctcatatccgggtcaagctgttgttcatcaccgatcaatatttaataccagtcggacagacaaatataccagaccattctcaagacacctgatcatgcagtgagataagatctttggtcgaatgcaaatgccatagattaaaatatgtcgctcattgtaaccggtcttcgggttgggcttcgattttgtttgctgatgacctggggaggcaattattcgttttttgctttttctccgacagcgaatactccgttcacttttgacaaaaaagtccccgatttgatcaagcgcgctcttcaccgctgagatgtctatgatatacagtgtaccttgccgaaatcgcagcgggttagcggtggctgcctatgagatttacatagaaaaagaatgcacaggtctaagcatgtgtgtacgaataaggttcatagaatcatggaaaaagacagattccaaggaaccagacgctggtgcaacgtcaaagatttagatcgtctcgatgtcgataaaatacagctttcttctatttggtgttaaatacaaaaagagtacgttgccatcttccaatattcccgccaggagagatagtatgaataatacttgtgaaaccaacttgataatctctcgagagaagctgataaactgttaagtgtgttccacttttgttcttcctcctatttggctgcattctttccttctttcttctaccatctttgattataattaaaaactatgagaaatgctgatgaaagtctagaaggaggagtaagtgtgtaaggaaaagagcatggttacattagtaaccgattcttgttatctttgaattattcggaaataaagcagcggactcatccaatggtgccatcgggaaaacatcgagcacgctatctttttctacgaatccatttcttcagatcgctcaagacttttttttccacccgttccttcctctctttctttctttccttccacactcatccacgccttcttcctgttcttcttgagtcgtcgtcccccctcttctactgtcaacgcttgtctcgccaccgcttggtctcctctctccttcgttgttcgtcttgattcagctctctctccaatctagaactcaccttcccaattcgccctgtccagtatctacacactattattggctgtctcgtacgtagtatccatcctattgtgtttgtccctcatgtcgagaacagctacgatgtggcgatttaccctcaaccgatctgctggccctattgatggtcctttcagaggtcatcgatcgacatgtagttggctttgccacttccgctgttgtgttcattttactgatttcgcccatcttttttcatctggcctatgaagaaatgtctacttccaccacatcgctcgttgggcagatcgcccaggccacttcttctaccctccttatatcaacaaaatctgtctatgctcttccgagctcatccaattcatcgcctagaatcgaaattctcccaacacatgccgatcctggattgattgcttcccgatcggctagtgtcgaccataagcttacatcgatcttgcttgagtcaaccggttctttcaaccgactggttccatccttgacctcactgggatctagcgcgaccgtcgttcacgttgctcttcctaagagctctgatctctccgacgctgttgcccttcgttcctctggttggactatcattctttccacaaccgctcaggatgctcatgatcatgccattatcgctagcaagtacgctcggcagtgtgccaaggctgtccttcacatcttcactcagctggagcagaacgagcttggttttgaggtattggaagagactcccttgagggaatttgtcgaagctgtgttgcccattcctgcgacagccaatatcaacccgactctttcggagggcttcaaggcgtttgaacgggcttctctctctacccttgctcttcttcgacggccccaacgaccgtacgtttactccggtccagctaacgcttcgacagtgttcatagtttttggcacggatactccctctcttgctcacctcgccaaaacgtcttcaactcacttcggagtgctcgaagtactgcttcttcgacccttcgcaccctgccgattgatcgccgctctccctgagggcgtgaagaacatcattgtactggaacagagcttccgaaaaaccaccaaatggggaggtctctacctcgatgtcgcttcggccttctccgatcagaacgatgctccccacgttcatggagggcttctcggtacactttctaccaaccagcacaccgttgaggcggaagtctcgcacatcatcacaaggctcggctcttctcaggaccttgttcttggttctattccctctttgtcctcagaacttaactcttctctctctattcccgcagtccctgagctcgagtctgcctacaccaagatgctctctcaggtatttggaactcgtcttgagatttccaatgcccccgcactggtcccagctgaggggcctaatgctacccttccggaatacgctcttggtaaagttcggtccgatattgcgaagcgagaccaactcgttgaagctgttaagggtctcatcaacacgtacggtgtttctcagtccgtacactctgccttcgccaagtggttgctcgctaaggacgacgctgctacggctgagtctactggaaaggctgctgttgctgccttagaggtagatgatgccgttcattccaaggctgggaagaagatcattgagctcaaggagttggtgaaacccctcagcagatggatcattggaagtgacgcctggtcatacgatctcggagctagtggagtgcatcacgctatcgcctcgggagagaatgtgaacttgttgttgattgattctgtgccctacactgaaagaaacgctgccgaagcccacaagagaaagaaggatgtcggtctttatgctatgaatcatggcgatgtttatgtggcgtaagttcgccctgactgtatctatctttgtctatatacttattgtgctcatatttttttgtacagatccgtcgctgtctactcttcctattcgcaggttcttcaggccttgcatgaggctgaccagttcaaaggaccttccatagttcttgcttatctgccttatgctgaggagacagcctccgccctctctgtcctgaaggagacgaagcttgctgttgacactggttactggcctctctaccgatggaacccctctcttgaggctatcggcaaagagcctttcaaacttgattctgagcatatcaaaaacgagctccaagaattcctcgaccgacaatcgcatctttcgcagttaaccaacgcccagccaaccctggctcctgagctagtcggttcacttggagagaaacttcttgttgcaagaaaagataaggctcaggcagcttatgataaactcctttctgctttcgacggacctccattattgatcctctttgcttccgatggaggagcggccgagaagatggctaagagactggccatgcgagccggtcttcgaggactagctgctcgatgcatcccgatggataactttcctctagatgatcttaaacttgagtctcatgtcgctattgttacttctaccgctggtcagggagaggccccacagaactcccgagcgactgtcaaagctctcgctgcccatgctgccaaaggcgacaagatcttctcggccgaccttaagtacacagtgttcggaatgggagactctcattactggcctcgacccgaagatgcgcattactacaacaaggcctcgaaggacatggatgctcggtttgaagaattgggagcggaaaggatggtccctctcggtttaggagatgaccaggacgctgatggacctcaaaccggatataagatctgggagcctttggtttggaaggcgatgggagttgatggtatcgaagtcttagaagccgagcccgaacctattactaacgagcatatcaagatatcttcgaactacttgagaggaacgattgctgaggtaagttgttctcagtgttatacgttcatgcatctcctctgatagactaatcgctgtggttgatctctacagggattggttgatacttcgactggtgctttggatgcttctgatggtcaactcaccaagttccacgggtttgtttcgctttgccctctcgagcaagtcacactgcgtgatgatactaatgactcttattcccgttctgatagcatttaccaacaagatgatcgagatattcgagacgaacggacagccgccggtctggagccagcttactcattcatggtacggttatatctcttcgcctgctgcattgatttcactacttatattccgtacaaactactttaggtccgggttcggcttcctgctggggtagctactcctgagcagtggctcgctatggaccacatctctgacgttcacggaaatggaacactcaagatgacaacccgacagacttggcagtatcacggaattagtaagtttgctgtatattctgatagtccacgctttctctgtctgacttggtacacctcttcgctcgatacactacagtcaaaaagcacctcaagcctgcaattcaggacatcaatcgagccttactagacactatcgccgcttgtggtgatgttagtaagtactattttcgttcaacatgtgatacaactcctgtccttgcttacaatctcttcctcagaccgaaatgttcagtgttctgccaacccttcaatgtctcaccttcacaaggaggtctggcagttctctaaagatctctctgagcatcttcttcccaacaccagtgcctacgctgagatttggctcgataagaagaaagttgcaggagatgctgttcaggactttgagcctatgtatggaaagtactatttgccccgaaaggttcgtgctcttctgcgtcctttgttttgtgtgttttcttctttctcttactcaaggttcttcattgtttggactggctttacagttcaagattgctgtgtgcttacctccccacaacgatgtcgacgtgtacaccaacgatgttggtttcatcggaatcgtagacaaggcctcggagaatatcgtcggttacaacgtcaccgttggtggtggtatgggagttacacattccaatacaaagacatatccccgattgggtgatgtgattggttttgttacccctgagcagggatgtgctgtggctgaggccattatgctcacccaaagggaccatggaaatcgagctgatcgaaagaacgctgtaagtcttgtcatgaattatattttctcgagctaagcagaacttgaattatttagctgagtttgggcatcgactttctgttccatttgtcgatcaacagcgtctcaagtacaccgtcgatcgacttggattggatggctttagggatgaagtcgaaaagcgactcggttataagctacagcccgagagaccgttcaagttcgatagcagtatcgataaattcggatggtctacgggtcatgatggaaaccaccactttactatgttcatcgaggtaggttttctcttcttcttttttcatagattcatctatcaaatctcagtaatctcatatgtcttgatttttgcccgcgtcatcaatagaatggtcgagttcaagacgagcctaacttgcaattcaagaccggtcttcgagagattgctaaagttcacaagggtttcttccgactcaccgccaatcagcaccttatcctctctgatattcctccaaagaacttgccggagatcaagtcacttcttgcaaagtacaagcttgataatctgaacttctcggctctgcggttatcaagttcggcatgtgtcgccctgcccacatgtggattagctatggccgagtcagaaagatacctcccagtcttggtggacaaagtagaagctatcatggaggagaatggactcaggtttgtatagtcttccgctcaataactggttcttctaagattccatcccatgagattgagactgatatattgattttctcctaatagaaatgattcaattgtgatgcgaatgaccggatgccccaacggttgcgcccggccttggcctgctggtatgttttcatcattcttgttttatctgcgataaatcttacggatattgactgaatattagccttgtttgtccattcttacagaaattgcatttgttggaaaagctcctgggcagtacatgatgcttcttggtggtggattctatggtcaacgtttggcaaagctttatcgaggtatgtagcatcctgcttcttgtttctaatggttcctgaatatggcaggctgatcgttgcgcccttctattatcagaatctgtgaatgaagttgagattctgaacatcttggagcctctcatccgacggtatgctaaggagcgaaacgatggggaacactttggtgactttgtgattcgaattggaatcgttatgcctacgacctcgggcaaggcgttctatgaacacacgcccatggccccggccatcactgcctgaactgtctagcttcagcctactgatggctcagttacgcacctcgtcttgtttgtatcgtttgctcttgtggtgtacaagtcgtctatttcttccgcatgtccaccgtctgttgtcttttgttcttttgtaacaacacccaatctgggccttctcttttggttttttagtgtttttccttcttgtcttatctccctatgtttctgtctgacttttcgaccaaaatagataaatgttattttgatgatggattttttccaaagcttcttccacaatctgatcaatagacaagatgatttttacctattggattgaaagtgaaatacaaaagacaagtatccttgtgttcgatcagccgaaagtgacgattagacagaagatgataggctcaagtgtaaggtagcgaatataatgctgtaacgcatcacgtgactattatcttgtttgcctccgaacagaattttcgttgccgaacggtcggggctgggggaaccgatataattttctggtggacgttcgtttttctttttgttctcttcttcccccaacctcatcgttctatctaaatcgtgggtcccttttttcactcttccactgtgttgccaccgagagttattcgttgtgtctgttcgtctccttcggcaggaacgtttcgagcaacgatgaactactcgcttaaaacggtttatactcatgctgattgtgccttactatcaacttttcatttatcaactttttttcattctcacctaaaagagacaaaatgggaaaggataagcttcacgttaacgtcgtcgtcatcggacatgtggattctggaaagtccaccaccaccggacacatgatctacaagtgcggaggtatcgacaagcgaactatcgagaagttcgagaaggaggccgccgagcttggaaagggatccttcaagtacgcttgggttcttgacaagcttaaggctgagcgagagcgaggtatcaccattgatatcgctctttggaagttcgagacccccaagtagtgagtagtgttcgcgttttgtaccgagtgtgcttcctcgaggagggcggaggagaaggacgttgtgtctgactgcctttttcctcctttttctttgcctgttctgacttgtctgttcctcctcggccctgttgattgtccttgcggtcgccttccagcatgatcaccgtcattgatgctcccggtcaccgagatttcatcaagaacatgatcactggaacttcccaggccgattgcgccattctcatcatcgccggaggaaccggagagttcgaggctggtatctctaaggacggacagacccgagagcacgctttgcttgccttcaccctcggtgtccgacagctcattgtcgccgtcaacaagatggacaccaccaagtactctgaggctcgattcgaggagatcatcaaggagacttctggattcatcaagaaggtcggatacaaccccaagaccgtcgccttcgtccccatctctggatggcacggagacaacatgattgaggagtccaccaacatgccctggtacaagggatggcagaaggagaccaagtccggtgtttccaagtgagtgtcgttctctgtctttgtcttgctggtgcttgggtgggcctgtgctgttgggatatgtcgacggaagctgactgtgacgttcctattttttgccacaggggaaagaccctcctcgaggccatcgacgccatcgagccccctgtccgaccctccgacaagcccctccgacttcccctccaggatgtctacaagatcggaggtatcggaacggtgcccgtcggtcgagtcgagaccggagtcatcaaggccggtatggtcgtcaacttcgctccttccaacgtgaccactgaggtcaagtccgttgagatgcaccacgagcagcttgttgagggtctccccggagacaacgtcggtttcaacgtcaagaacgtgtccgtcaaggacatccgacgaggaaacgtctgctccgactccaagaacgaccctgccaaggaggccgcttctttcaacgcccaggtcattgtcctcaaccaccctggacagatcggagctggatactctcccgttcttgattgccacactgcccacattgcctgcaagttcgatacccttgtcgagaagatcgaccgacgaactggtaaggtcatggaggcctcccccaagttcgtcaagtccggagatgccgctattgtcaagcttgtcccctccaagccgatgtgtgttgagtcctacaacgagtaccctccccttggacgattcgccgtccgagacatgaggcagaccgttgccgtcggtgtcatcaagtctgttgagaagaccgatggaaagtccggtaaggtcaccaaggccgccgagaaggccgtcaagaagaagtaaacgtccccgttggcttcttttcgatacgatcatctcactacctccctcccccttcccctccccttactatttctatgatatgatttctccgaacgaatacttgcaaactattttacggcatttctttgtttctctgatacgtttcacatgtctgcaccacttccatgatttcataagagtacaaagacgattaatgaaaagactagaaccagagtggtaagacttcaacgtgaccatccgtgtaaccatgaagagagtcaatacacctcgccgaatgtataatactgctttcatcaaagaacatgcaaaccaccaactctgataatctcttcaagtctgatgctcagatggctaaagaggctggtcgagaggaaaaactcgtccggacacaagccctgggagatcctattaagctcacgagcaaacctcttgggattcttatcaaaggtgatgaggtctgggcggctgagagtggattcatcttacggcgattaagcctaatagtctgtcttttccggttcggtatggattaatcatgctgtggacatgctgtacttatcattgcctccaaatgaatctttcattgtcgtttgatcaaagaccggaaagtctagtattgtttataaaggacatactgcaccggtaacctgtcttgcattatacgaccttccttcctcttcggatgcactcattcgacgatttctcctctccggttcgtgggacaagactattaaagtctgggatcgagatgtatgacatgtacctatttctaccttcaccggctctgcgtctcatttgtatctgctttttcaacgttttgtgtctgtccatccgccttgtcagaccgggatatgcctctctaccacttcggttcacacagactttgtgaaatgcttgctgccccttcctagtctttctacgcctcttcttctttccggttcatccgacaagtccatacgggttctttcccttgcttccctcgcctcctctccttcaagttctctcgagcaaatgcagtctttgcaagaacacaccagacctatcaagcgacttgtttcggttcctcaagtggagagggatcatgtagaggcttattctgcagactcgatgggaagagtcatcctctggagtttaaagataaatgatcatggaggactggatgtgaaggagaagcacaggtggagtgcacacgagacgagcgtgacagatctttgggtggaagaagatggtgtttggacaggtgcgctggtttcttatgcatttactttcaaacaggccgaacatctgggctagattagccagttttttctaatcttactcctgtctttgatcgttactttcggatagcctccatggatactttcattcattatcacccgttctcttcttcatcctcctccctaccgatcaagatcgtctttccacagccatcgatacatcctcaacctgcccctcacgcgctcctgccgcttttccatctgacgccacccattctattgaccggctcagccgacgagttcatccgagtgtgggacctgtccgcaggtgaagcgtccgggcaagcccgtctggtacatacgattgaaggccattgtgccgacgtgacaggactggccagatgggtgaaggatcgagaggagtgggttgttagctgggctttggacggaacggtcaggagatggagattaaagagtacgtccgttcgggtttcttttgcttttgtctctgggtcactcgagttctccgattcacaatgtcccccttctcttcttttttgctcttctctcttctctctatctggccaactttgccatgactctgaccatggtcgtaatcagatcttcttaacccaccgccgccagcgcagccagatgaaggagaaaaggatggtcttactggtggaatgactgaagaagaagctcgggagttggccgaactgatgagtgacgaagaatgaatgtatgcaaagacaaacgagactatcgagatgcgcgaagaagcagagcgaatagttgatgataatgcatacgatagattaaacgcgtaagattggtataacaattgagcagcttcgggaggcacattggattacacacgccccggttgtgcgtttcatttctgaaaaaagagagaacgatggggtatcaagagaaaataggagaacgagagagaggtgaaaggtacagcagatcgtgtattcaagaagtgggacccagatggtttaggacatagattctcatatttgtccaggagggggaacttggctgtagaagtatagaagcaaactgacatgcccctttctcattgttatgatcatataggtttgcatcaagggaggagctgaagatagttcgaaggacagatgccggtctagcggagaaggaaagaaagaggtgcggatagaaacagagtaaatgactgcgctacttcatcgacttcaacttgacgatatttcttttatcaaaagaagaagagacttacagtaccatcatgcttgcgggcttgccaccatttgcctgaacgacacgtacaggaaggaaatagtttagaggcaaaagagtgatatcagacacgactgaagatgtgaatgaatagtcaaaatctaacgaaccggtattatctgaaatctcaagaatctcgcccttgagaaaggacatctcctgaggatcatcaggcgaagcttgatctgtgtgagagaggtaaaccggtcacacgttagcgctgtacagaaacacggaaaatgtcgcttgtgatcttaactcacaggcataaagcgccttggctcgcttaggaggcataaacgcgtcacccctttcgagatcggttgattcttgcataaggggtgtactcgagctaccgaccaaaacatcctgactttgatcgccaacatgagactctccacctgggtagccactggtatttgtgctgcttctcaggttactattccgaatctggttgatgtgtgctgtcgagctcgattgattgttagcgtacgcgttgggcatcattccatggttgccaagattggagccagaggattgaggtaccatgagagattttgaaccggacggatgaacgagctggggtccatgaacgacagcgttcgagttcaggaggtggtttagaaccgttggcttctctgatgtcaagtacaagagccaaaagatctgttcgttgattgttttattgtcggccaaaaacaagagtggacgctcaagtcaacagtgataggtaagaagcgtgagtgaatgtatggactaacatcgacgatagcaagaataagccagcctgcaccggctgcttgttgaggatgcaaagaaccaaaaatgttgtttgcctgtccaggatttatatagtttaaaagtatattgaccagaaggaggacagaatcgaaaatcgccaatttatgagatatgttcgacgagaagtagttagccggtgaggagaagatgaagatcacgagaagatgctttgagcaaacagagagactgaccccgaagacggcaaacaccagagcgacagcaccaaaggtacatagctgaagctggtacaatggcaaagagtctgtggcgatgccaatgaacagaccaaccatgacgcccagctggcagaagatcccaaaccaggacgtctcgaaaagagagccggtgaccgagctaggcctttgggcctcaccgacggccataccaatgaaggcaacgaaccagcctatcacagcaagagcccaagtgataaggaggatgtaatgagtaagaaatggctctgcaaatggagaaaggaagaagataaagaaagccatatattagttagaaaccaaggcgatagctgtcgtcggagtagtgattgatccgaaagcactcggaacatatgtgattgaaatacgaacgaaaactaaagcttgttcgtccgggcatgttgcttgtgagaggagcggtagacgagtagatcgatagagtaaggaaagcagctggacgaaggatgaaggttgaaggcaacaacaaaacgaacgagctctaagaagaacgagatcaaccgtctttgccagagtggaggattcagtcaacaagggaaaaaaaaggggggaagactacaaaactattctattgaaacaggaaaacaacagaccaatttcctaatagatcgagagattacaatatggactatgaaatgattacgagtttccagaagattcaatagacaattatttaaccctaacgagaccactagagcatcattccttcaccttcacctccagattatcattggtaaacccgtacgattttgaagaatgtccaactcccggtacgaatacgttcgttcgtatgagcaaccagacaacttgcttcccaacacgtttcttctgcttcgtatagatggtcacgcttttcacaagtctgtcctgtttcccttctgcttgactctttctagtgttgcttacgcgcccggttaggttttctgaccagcatcgtttcacaaagccaaatgatctccgagcactcgagttgatggatagggcagcgaaggctattatgaacgagtatccagatgtcgttcttggttttggagagagtgatgagtataggtccgtctctttttgatccagagtaaatatcattcggaaaagctgctcattcctagctttgtcttgacaacgacaatgggataaaacacatggcaactagctttctgatccgtcgagccgccacgatgtactccagaagggagtccaagattgtctctttgctcgtcagcctgttcacctcggcctatacatttcactggcctgaatactttccgccaaccgatcctgcattgctcgcctctggccaggcggatcccaacaagttactgtacccaccgacgtttgacggtaggattgtttgttatccttcgcccaaggaggtcagagattactttagctggcggcaggtcgacagtaagtctcctttcctctcgttatcgtctctctcttcttctttttgttcccatcatgtccttcgtcgcccttatatctgttccattcgaccctgtccgttcagcccatatcaacaatctctacaatacgacattttgggcgctcattcaactttcagatcctcctctcacacccacgcaagcacacaaggccctgcaaggctcattctcgaaagacaagaacgagattttgttctctcggttcggaatcaattattcaaaactcgatgaacggtatcggaaagggagtatcttgatcagagaggtcagtctaagtttgattcagatttttccatcatctctttcctaatttcatagaaagccggtcgttctctgaaaactgctttccgaatcttttgtatgaacaggagtcaaaacctgaacaagcactgccgatacctcctacacggtccggccctctatctgatctcccttctgttgacaatctctctctccagtcttcctctatgcctgtggcttccgagtcggaatctgctaccgtctccacttctaccactaccaagacatcctcgctcaacttgacagagccgagaacccagggcgcgaggaaaccgaagaaagcacaacgcgcgactgagccggatggaacgagaggtcctgtggtggtacttcacgtagacctcatcaaggatgagttctggctgaccaggccttggttgttggcttgatttgagagtctcagctttcttttaaacatggctagaaagattcatgatgcctggtaaattcagttttgccttgtatcagtcggaagatgatgataatgatgatagaaaagacataagattctagataaaaaaagaggatagatcatcggatgaatgtggaaaccagacatgaaggaacacaatgtattgaaaaaaaggggataaagatggcaagaggagaaaaatgagtccaagaaatccgaatgatctcgaatttcagctctaaaatgtgaactgaaagaaagacacgatatcggcgagatcttctgattgactagttagaaaaaaaacagaagaaaaaacatggccatctgtagaagcaaaggctggaagcagaagagaacgaaaagagaacccaagaggtggatgaagagacgagaggtaatggtttataaggcgcctgttctaaccctgatatgtcctcgaagacctctggtcggcgaccaaacgagcccactcgagggcgagtcggtagacataaatctccatgtcgaccttccggccgttcgtcatcttccactttcgaccttccattgcgatctttctaagttctgaatcgtcatgagtaccagtagcaatcggcgtggtcccgttcgcgagcttcttgctcgtcgaagcagatggtccggagaagtaggcgtggatgttgtagatctcttggtagtcggacgaaacaggtatgtagtgcaaccagggctggatccagtccgagaagaactctcggtagactgtggtcttcatcaccgcgctcttactcatcaacaacgcaaacaacctggcagagtagcccataccgtcgacgtcaatcaaatacttgtgcttccagttttcgccgagcgagacaccatcagcaaatcgatggtcctttcgaagtccatcacaaccgccagggtaagatgtgcaaccgacggctttgacaaaggcgaagtccatcatgtcctcatttaattcgtccaccggtacggtcacctcgacgtacttcttgctcgaatgcgagacgggtacgacaacagtccggttcacatcggaaccgtcagtgctcattcggacaaggctgagcaagagagggaaaaagaaagaagagagacacataagcttctataattcacgcaaatagacggagagggagaagtattggaaagaaagtagaagaagatataagcgactataagctcaccggtgtcgctgatacctcgagagatagccgggaggagaggctcctcctccagtcgtagcccctctccagaagatcttatctgttttcttctcccaagggacatccatatcatcgaaatccttgatacgcatgttgacgggatcccagccgtaggtgtaccttttggttgacgaatagtagtagtgggtcgggatgatgatatcgctgaaaccgagtcctttagcaggggagaacatggggtaaagtgaatcgataactcgccagtccgagaaaaagtgaccctgatcaaagtgggcccaggggtaatcacagaagtcgtatttgtcgtctacgctctcagagaacacaaagtcttctccggtctcttgccgggcaaccccggcggcgacaaggtagttgaaagacttctgctgtccatcgttgaggggagttcgaatggaaccaaagagtcgtctagcctgtgacgatggatggcaggttcgccggaaggcctcccacacggaaccgccgtcaccttgccaagacgggatgaattcacctccaagaacagatttaataccctctgtatgcgcgcgtgtgcgtgtgtgcatgttgcagatgtattttatatgtaaaaaagccgcaaggtgagcataattgaaacaagtgaaagatgtatggtttgaaaagagactgactggacgaatcgacggtgagattggcatactgattctgctcccaaggtacgaggactcgaccctcagccttttcgttaatcggactgattcatcatgtaaaatggcacgtataaatacgaataattctctctttaagatctattttgagcaaagaaacgtacaagtccatgtcgggaagtttctctttgatgtagcaaacgcaagggagaaaggtgcaaaggacgttagtatgaaaacgacgggatccataatgatggtattaacaaacaaggacgaatgcataagacacaccctggaatttttctagcattaatataaaaccgttcgctcgggctccggcctcggaattttcgagtccggtatcagcctcaattgccttggcttgtccatcttgaatacggacaatatccaccgagggcagggtaccgacttgttgagatcttcgcctgatttcctcaccggtgaggagccaatacggccgaaggtctgctatcatttggtcgtactcatcaatgatggtcgcgccgttggcagtagcaaactcgtaccagtcatcgaacccaagcggtgggtctcgatgatacctttgtttgtaggttttgacagcctcagccaaggtttttgactgggaggcaatcatcttgttgtacttgatctctgccttctccatcaagatcggaatagggtgtacgatcggcttgtcggcgtatggtgcatagtactgtcgcagggtctcatgagaagggaatgcctcaaggcgtcctttgtgtttgagaaaaccgccgaagacgaatatgagggcggcagcacccagaagaaagacgactggctttgctcggctcgcaaccgttttaggtttcaatgtacgcggggacatggcaagagttgtgatggggaaagtgaacttgttcttgagagtgacaaaggaaggattaaacgaggaaagacgctacaaccacttcttctactactactactactactaataaacgagacccttccaggaatcggcgttgagtggaagtgtgattgggtgcacaagcaaatatcgtccgaagggaatggatggagagtgggaaggaatgaaaaagaaagagaagggataaagagaacgatctcgggaccagcgccataggtatgccccaaatttacccatgttttggctggtgagctccaggccgacagccaaatttgcccaaacatgaccaaattagtccgaggctcaacaccaggcctccggtcggttgatgatgccgtccgtttctccttctctctgccatcctcaagcaatcagacactcacactcacacaaacacacagacttacatctcttcgaagatgtcctactttatgactcatttaccgacggcctggtgagtgttttattccttggtataatctcccttttctttccttcccactattctctctaattagtcttcatgcttaccggtgttctttctctcgcggctatacctttctaggcatgtagaccgtgagtatatctttttattcagatgaaacattgccatcagaacgactcatacttatccttccgaactcatacagaggccatactctctgaagaagacagagtagtgatccttcgattcggtacgcctctgctgacgcgttctccaaatatcattgatcttcaacgcctcacacttaccgactaacgcgatgctttccttgtatcaatatggtcaaatacaggtaacgattgggacccgacttgtatgaagatgtacgtatactgtctttcctatatacaacctggtctagcccacatagccttatatatggactcactcattatctcttctcatacctctctaatcacacagggacgaaacgttgtactctgttcaggaaaaggtgcagaacttcgctgtcatctatctggtggacatcaccaaagtaccggattttaataaggtagctgaatgcttcttctgccttttctcctctctctctctctctcttctcatctcgagacttatgctgttcttttgacttggccttcctatgtgtttttatgcgcatcaagatgtatgaatgtaagttcctttccagatagaatatagagcctttcttatcagagtgtcgctcaatagatatcctatatcctgaactatagtgtacgatccttgcacgaccatgttcttttatcggtaagtatcttatctcatttatatttgtgtatcctttcagctctcactcattcaacccttaaacaacagaaacaagcacatcatgatcgacttgagtacaggtaacaacaacaagatgtaagtcctgttatgtttcgtacgaagcttatgaatggcgcgccaggctgagatcgttcgtctttcgcatcatctaacgacattctttttcatctttgtagtaactgggccatgacggacaagcaggagatgattgacatcatcgagaccgtctacagaggtgcttccaaaggtcgtggtttggtcgtcgctcctaaaggtatgtattcctctaattcagattaggtatctctcattcagctgtacttattctttttctaataaatctttaccttcattattgataagattactccacaagatacagtcagttttcaattctcatgcctataaaacccttacaaaggtctcctaatactttgcatcttcttttgtttttgcagagtattaagtatgccgagttgaaagagtgtgacgagatcataaacggaaatagaaagagacccctcctccttagttataataatcaatgtgcctcgatggctttcaattccacggtttgacaaacatatttttcagtgtgaatgtacaatacaaacgatggcactcaacagtatgcgagtaaatcacctagaaaggctcctatgagttgactttacatgttagtcaagaactgaaagtgcattcaatcagacaacgacggcggccttgaccggcggttgccatggcaacatgggaaaatatgatacattcctcaaatcaccaccgaatttgagaaaccagcccttcccttgatgcccatccccatacctctcacacatatctcaagccatggcctcgactgatattcacctcaaaaatcaggtgtttgacctggtgtttcatcctaagcataatactttatacaccgctctgctcactggagagatcaaggtcaggaaacaccattgcttgcttctatcaaagacgatcggactcgtccgttgagctcgagagccagaaacatcacctactcatgtctatagggaagaacgattgactcacctgagccatggactgaacttataaacacaaacgtacaaaaataaggctttcaactacactttaggagagccagacgagatcacatacgagaaagcgttctccgttaggccgactcggaagagctgtcggagcttggccttggatttcgagggggatctgttatattctgtaggaaaagaaaaggcactcaagtccgtctttacccttgttgttttgacttaccttgcctacgatatacgtatcattcatctattgctttttgatgttctttgataacagtgtgatcgatacagtcacaggccaagtcgtctctaccgtcgctgaagcccatgagtaagtgtgcttatattctcatggctcaccgctcatttgatttatcttgtcattttgacaatatcttctctctcacgtagagcacctatcaatcgggtctcgtatcttcttccgtcatgtctcgtcactggggatgatgatggtgttgtgaaggtgagttctccttcctagttcccttaaaaaagagattatgtccgaaagctgaagtgagcaagagaactttctcatcatagctctgggatcccagaatcaaaccgactggaccgacagcgcagaaatcgtttactcatcactgggatgttatcactgactttttgtactttgatgacaagaaacacttgctcactacttcgtgcgccttctcctccgtacccatcaaccttctttatgtttacttacatcctctctctgtttcgtctggtctcatcttggttggatcagttcggatgcaacgctatcagtgatcgatatccgaacgtccaaagctgtgccgctttcggtatccgaaagtcaagatgatgagcttctaagttgtgtatccatcaagaagttcgtgcccccgtttcaaccgattcctccctgtttttttttttgtttttt

SEQ ID NO: 362 - DNA, 22415 bp, Xanthophyllomyces dendrorhous
tttttttgtttttttttttcaaatcttgaaaaaccgcgttctaagtattaactaaaactccgtttctcctcgaacagcggagcaaaagtcctcactggttcatcgatgggtattctctccgtttgggacaagaccaaaggttacagagattgtgttgataggatcccggggtgatcatttctttcattcctctttttccctcttgtttttttggtcgatttcctgacgcgcttctatctttttgttgaatagacatcccgactcgatagaaacgatagttccactatctgaagatatcgtcgccaccggttcatcagagtatgtccttatcgtggtcgaagagaaagggaaagaagggatgagacaggcaaagcccagagaagcactcaagggcttctgctttgaccatagatctgtggtgacccttgagctaaaagtataacctgacccaacatgtttttcctttgtctgtatatcatcttacccagtggaatgatccgtatagtatccatcctacctaccaaattcagtacgttcccttcctctttccctttctgagccctcctttcttcctctcttcacgtcttctttttgactgatttaatatgtgttccccttgtcaacagtgggagtgatagcccatcatgaagattacccaatcgaacgactcgcgctttcacgtgatagcacaatccttggttcggcctctcatgacgaagtttgcaaactgacagacatccgagacatcttcgacgagtctgatgatgaggacgaggaagagggcgaaggcgagagcggcagcgaagaggatgtcatcatgggcgctgatgggggtgatggtaaaggagaagaggaggaggaggaagaggaggaggaaaaggttgttaggcgaccgagtcctgagcctgagcgaagaaagaagaaaaagaaagagttggttgccaacagggaagaagaggagaaggccgagcgaggcaatttctttagtgatatgtgaaaggaactctgtctttcagattgttattcgcatatgctcctctaatcagcctcttgtcatgtacaatgatatacgtaaacgtgtctttgaaaccagagccggagaatcaaagaatcatgaataaacatcacgcagagaacagattgtaggatgttagaaagaatgttaagatagatagacatgaaaaaattaggaaatgttaaacaaagcattagtagagagattagagggaaactggtatattggactatataattcccaagtatacaatactcaagtgacttcaacctattccaaccagcaatcaacagaagtgaactcgtcagttgcactcaaaagaaattacatagactcaaagcagaacacagtacaaagattggtcacactcacatatcgagatcgtaaattctttttcttggcggccgtaccacccgctgtaggtgttcccattcggcttagcaaatcggccgtagggtccacaacacctggtttaggtggtggtacactacctgctctggagggtggtcctgcaggtggcccggccagcgggctgggttgagctccaggtgttgcggatgcgctccgaggaggaggtccgctaggcggagcaggcgcacttgagctcataggcggaggagaaaacgattgtcgaagggaagaaggcggaggggcccgctgagaagaggatgcgggtgacattgtctgagcccggggaggaggcggaggtggtttaggagcttcggcttctggcccagcctacattatcaaaaagtagatggtggttgaataaatagaagaaatacatgtaagaaatacatctatcacgaactttcttgttaatccatttcttgagatcgttgtcatagtagaaagcgctctcttctccaagcttggccttgataggagcagacttggtaggactttgagtagaatctgtcttctttccgccccacagcctaccgagccaagaacctccggcggccggtttggcttctgcttggttcaatgatgtcagttgagactctgttgatagttccgatatttacacatgacgtcgcgacttaccatccgtcttcttctcctcttctctcttctcgtccttcccatcatccttgctctcttcagattctacagcggccttgtttgttttcttctttctagaagcattgcctagcccgagatcgtcatcatcgtcctgatggacatcatctttgccctcgacctctctactttgtcgataagccgataaaccctctttggattcctctacagacacgctttccgcctcatacggcgtatacgattctccagcgggctgataaatcgacgccgttgaaggcgcgtaagacgaactaggctgatagtagatgttgtccgtagatgggggacgagagagcgctgcgaacgaaggaccgggcgaaatcgagttgtagtgagagaagggaccgatcggggctaaagatccgttattctgaggagccgaaccgccagagccgattggcttgacagaagaggaggccatggcaagttctgaattggagggggaagctgtgccgtcctcgccagcgacaaattttgtcaagcggccttcgaaccatgagccaaatccatctaatgagggtttggtgactgttcgcgagatccacgagccagtagaatcgttgctggatgttcctgacaacatttgagatagttcttgaagctgactcaagaaagggagagtatgcgatgcagatggggctttgtaaagcttgagggatgcagcgatagcatcacagtacttttgggctctcgcgacatcaccagattcgaccaaagtcaaggcatggagcaacttgtacggctggagatagtcgatacccctgaagggctcttgtcccttcaaaactggaatgagagacagggcgtactcgatgagctcggtgatgatgactgcgtcgagatcgatatgtctacctgggtgagttgacatagtgtaaagatgcacacgaggagccaaaggtcctcccagtggattaagaggcggaggtgtgttcgaaagaagatagcagacatgtccggcgttgacccaacccttagtcaccagagagtttcctaatgagataagggcttcggtatctcctaagcttcggttagcagaaatcatcgcggccacctctctccaatcactgctcacagcagtttggtcaaatgccccagtcgacaccgtagctgatggaagccctataacagtaggaataagcatcctgttaggactttgaaacgaactgcggcagacaaggaggggttgttgacaagagaacgaaccatgattgactcccccaaacatatcgtacgtcaatttcaatgcatcccggctctttccggtactccctccatgtccactcagttctgaacgagtgaacgccttgacaacttcagcgaaagcctgcttatcaacactgcttgagataatcaatgcgtggctccagagtttctctttgatggcaaactcgacagcagattttctctcgccttggacgagcagagtcgaaagctgatctaaggccgaagatttggaagacaggggctgagtaaatccgccagagtcagagtccatggaggtacgaggggcgtaggaagatgtagaagtcagggccacgacaggagaaccagagcggaagcttccgagggacggagtgttggctcgagtgagattagttccagctgcagatgatgtatggcccggcatcaagattgcccgaacagaatccttggccgcatcactaaagacaggtaaaaatgagctcaacacactcaggctcgcgcgctactgaacgacgcgaaaatgtaagagaacgtgacaaaccttcccatcaatctgccttcattctcgatcatcacagctaataaccgaagtaaaatcgcctttccttcttggtctctaaactttatctcgtcacccttgcctttcacccaggcgagtccctgttcaatttccgaagcctgattgtctatgtaagctaggactgatgccttcttggccttttcgcccgccgcgttcttaatcgtggcaggatccaaaaatagtggtccagggaaagaaggggaagaaatgtcttgaagtaatttgatcgaaaaagagaagccataaacaggtttacactcgttgtcagtcttgttctcattctgaagaggtgacaagaatatcaaaatggcatgcagacatcaactcaccagattcagggctgacgtcggccatcgttttgatttggatcgtccgtccatctccttgatcgccttctccgtgcaggccggttccaaacgcaccgtaccctcctccgactccaagggacgggtagcatactacgaaccgaccaccaaatccgaagctgaacactggaaccttcttgaaagtttctcgacctcgaccgagatggtcctcggtagcatcgtgaagcacttgaggtgcgtatgccgagggttgcgtaggagcggacggctggggctgaggaacgaaggtcgatgcagatgaaggtggagggggtgcaaatgaatgagttggtatagatgtgggatgagggacaaaagaagacgaaggcgtgtaagaggagggcactgatggaggagaaggaggagaagcaaccaggcttggttgtgtagtttgaggggatgagggggtagagggagaagtagcgaccggagctatctgtccatgagcaggcgatttcggtgtagacacagatgtttggaccggcgacgcgtatcgatacggagagtagctagaggcagctgggggaggaggaggaggccgagcgaatggaggaggagctggcggaggagctgatcggacggcaggcggaggggcatacacggccgaggtcgagcgagcgggtggcggtggcggtggcggcggaggagcagcgtccacaggtggaggagcagcgacagacatgagagaagcagaagccgcaaacgctggcgaagaggaaggaggtggagaagatgagaaatatcctgaactaggctgagaaggagatgcaaacgccgcgtaagggttgtttcccaagctaggcgatgagtacgggttcggagacatgtatggattgggggatttgactagtctgggaggtggagcggctgcgaatggcgagagactaggcgagaacggtgcttgaggaggagaggacagagaaacctgactagggagcgatggagccgagttgacggcttggggacctgagttgtaaggcagtctggaggcgtatgggtttgcagtcacggttctttttatagtcggaggaactgccggttccatcgcaggtgggggggaaggcggaggcggaggcgaaggggagctaggcaggtcgaatgtcgggtagtccgacacctcttcgtcaaaaaagttggcgggcgattggtccactgtagtttcctcccaagcattgttggctggagcctattagaagaatagatgatgtacatttcggaaagttaaatcataatctttatacgaacagcctcatcagccagatgagatgtagaagaaagtccgacgaacatcgttaagatcgggtaaggcgccgaccagatcacgcgcaaatgatgacccatcgttcaagccagccgtaggctctaaggacgcctcgttccccagctcctctccaagattaaacccagaatcaaaggtctcatcatcgaacgggatcgagtctgatacggttggttgaacaatgttctctgcctgtgatgtctgttcctccacttcgcgactgagctctataggctgaacttcctccacgacctcgacttcgacctcggccacgaccggcaccgtattattgcttgattcttgctcaagatcaaacgaggtgccggccgagtcctcatcgaaagggatttcagcggacgcggccacctggtcatccgttccggtctctacaagtcctaaaggctcaatcgagatctctcgactaagttcttcttcccacccatccggttcttcaccaaagtccaacgggtcttgtgtgaaaagatcttgagggactacttcgttcgtggcctgtcatgagttcatgagttgggtgatacacacacaccccggaagcatggtttcaaacgttcaaagatgtaaagagttgagtaagttgtccagcatggaaagcaactaatcagtgaaggaataaaggtccggagggacagtttcctagtcagcacgaacctcatgagaagaaggttcaggctcttccggagaatgagaggcagcggaattcttgatctctatctgtagatcagacggatcgtctgtatgttttaccggatctggtggaggacctgactgagagtcgtccatgagtggtcttacagaaagatgatgtcaattggaccgaggagaaggaagaaggtatggtaagaagagaaaaaaagggagatggggatggttcgtcttcggaaaagaggacgatctctaagtgtgccagaaggtttccccaaatttgcccagatgcctgggcttttgtttggggtagctcaattcgaaacttaaaaagaaatttcatcctcacaatacaaacataacgatcgataagggaagagagggagagagaccagaattttgaatacaatcaacaccatgtacaagaacaccatcttaaccagctccttctctctatccacatcgttctatatacaaatcacaattagacggaaccaccagcggccaaagcgcttagccgggcgctcacgttccctcgatggctcctattgttcaggtgaacaacaaaattatccagttctggaccgacaccaggatcataaacctttccagggcaatcaaactgtattggatatggagacgacagtgaggtgatcagagtctgatgattcaagcataagacatgagtgtgcaaacaagaagcaacgaacgcatttgattctccattctgtcactggcgtcgaaggcagtacatttttcctcggcttaggaattatctggaagttatcgtcgggatatcgctttcttaacgagtcggccgcgatcgcgatccagcttggaggaggtgggggagcctgaagcatacacgagaacaaaatcagcgattggaatacgcgcactcatacggaaacataaggaaggtagaggaatagtacataccggacgagttgcagataagggtttcacataaccgttcatatttgccgacactgtcggccgcatctcttcaacgcgtaagggttgcggtgggggcggcggagatgttaacggcggaggtatcgattgaggctgtggtattgatgatgtttccgaatcacgctctgatcctcttccagtcaaggccatgtctggctgatcaagcgatctgggtgaaggcgataaactgactgggtctttgtttttcaatgtatctaattctgattgtgtaggtcgaagatggttgaactctggactggttggcaaactggatagcgagtctggggaggctgcgtccggagagaaatcaccatgtggggaagatgcggattgttgctgcaacgacttgccagtctgaccagactggctggaagacgtggatgaaaactgtctcttccgaccagagctcggtcgaccggcttgtttgagcgatatctttgaatgtgttcccgggcccggccctttcttccgataatccttcttgttgttacttatgttatcattgacgttgttgttattgttgttgctaatgacgctgttgttactggcggtggcggacaagagatcttttcggtaatggggagctgagaatgtaggggtttccctagcggatgtcggtggcgatgacggaggtggcgacgtttggatcctaggaggggaggatggcatcggttgaggactcgtcctatcctctttggcgagagaggcaatactagccgaagcgagtcttgcggccgcccgtttcgatggaagcaccggtggcggaggtatgaccggcaccatcttcggtgccatggagattggcatcaaattaccattctcgtctagcagacccaggctaggaattgaccgcttggtcgcttttggatcacgatccggcaggttcacgcctcgtcttcctctggtttgcctcttctttcgtctcagctccttctcgcgttccttgtccatcgtgtccatctcgacaggatcaagctctcggtagataggggtgaaggacgcatcggcaatatcttcgctccggacgacgttgacgagtgagggcagaaaagcgacccgaaggtcatcatccaagataggcgttccatcgaaggggtggccgacaagcacgagagacttgatgtacgtttgggcttgctctcgaatatcatgcgcgatggcagttctaggatgaagagtgatgaaggggatatccgaacatcgaatattagtatactcgcagtagatcatctagaaaaaccctcccaggcttgaatacctggcaaggaatcaaaagacttacttgaattctccggcaagcccgagatcactagcatacacttccgcaaactgctcgatcatgctgtctgatccgttggcatcccactcaaacgcatccaacaagttaagactcccaatagtgatatcgagctagggatgtagagatcgattggaacgcgcaaaagatacgatgtcagctctcggatacatgcaagaactccagacagacaacatcaacgacagcctcgacgtactttgataagaattctcatgtcctcgaatccaacctgcctctcgtccggtcctcgactgagctccccagcggtgagcggcctgccttctttctggttggttagatctcctccaggacctgctgatagctccacttgcttccatcctctctttcgtctattactctgggttctttccttccacccaacccaccacgcgctactctcttcatcaagcgttccattatgagcatttcctccctttactgtcggattggccgagctaccgacgacatttgcagatagagaaaacaccgagcggtactctgccagctgttcgttgattgaactgacgatcttcgagtggaatagctgagggagatggaagtcgtcaacgagcgtttgagcaaatatctctggggttaccacacggtctgagtttttgttgaagatcaaaatcattgatcagatcaatatacgctttcgttgtgtgaacagatagtcgtgtgtatgttaatctaaaaaggagagcttaccagaagcattccaggtaaaagtatctctgaacttgatgggttcatgatcgatctctatacggatcggtacgaggtgctcctcttcgttcgcgactgtcttcatctgagtctttgtgctatcagaatttttaaaaagattcccaagtgatggtgagcaggaagagaaggcgcaaaaaagtagccagagaaaaggaaccaacaatctgatttcttttcttttcaatccttcctctttcctcgaacgtttgagctctggccaaacgacggagaggccttcagttctgttgctagacctatctatcgacatgcgcttgtctgatgatgcatccccttcccaccaacctggaggaaccaaacctcccggtctagccctcagtatgtcaagcagcgcccggctacgttccttgtcggtttcgcaagccagggcgtacgtcttgtctttctcgagccaccttttgatctgtcggatctctgcctcagtcaatgcaggaagtaatccaccaaacgtcgagtccttgagttccatgttcagagggagaggttcgacccgagtgacgggcaagccaggagtcgcgttctgtagagaagccatccagtccgaggcaaccgtgctgtttgatcgagttggtccaaggataggacctggagaggatcctataggcttcgcagatgcaggagatgatgaagtcggagtagaggctgaagggtgaggtaccgcggacagggaggcgacgcgctgcgaggttagttgggattgggatgacgaaggacgagaggacagggtctggacagaagagacaggcaatacaggaggaaggaatccctgatcgggagggattggcccaagctgggtcggcacggtcgaggtcggtcgtccggatgaagaactaggacgtggatcaaccgatgtgctctgcggaggactgcctgcagacccgataggtaccctctgctgttggactacgcctgaagggatggcacctgggtgctgtctggacgagccaggaaagccgggaataccttcgtgagacctaccggacgcgaccatcattttaccgattacgtgtagaaccggtggcctgtctctgaacaacacctgaaggacagccggctggttggcgtaaggtctggcccacggcggcagctgatccggaggaagcaatatcggaagctttggattcggcggaggaagcggaggaaggttggttggcggggggatcgacatcagggacgagacctgctgtggtctctgttgattcgtgggaggatttgacgacgagtttggtcgttgcggattggaattttccggtagatgaggttgctgttgacggagaggtgttgaggatgaagatgatgaagcagccggtaagggttgataggcggatgagtatagatgaggctgaccgggtggaggtgagccttggtgagcggatggattgtactgatactgggcctgctgctgttgcaagtattgttgcctctgttgcagatgaagctgttgctgctgttgttgctgcagctgctgctgctggtgaaactgtgagcttgtcgaaggtgataatgcctgctgggctgtcggggagaacgagaattgattgttccactgctggttgattggaggttgtgacggatggcgttcgccttgctgacgaaggtcgggcatcatgatggacgctcaagaaggcgagggatgacagctaaaggacgatgagcgaagcacaacaatgggaaaaagaggttaaaaccccagaggaagaagacagaaaaaaacagggaaaaaaaagaaaagaataaggaaaagaaaagaaaaaaaaaagaaagaaagggaaaaagaaggatagggtataacagccaaacttttggtggacagatgagtgattgatggttgatctcggtcgtatctccttgtcctacccttttcaggatatctctccttcacgacaacgaagaggagatgatcggatggaggatgtatacgtgagtgagatcgacggatacactggaacgaccgggaatacgaagaataaataacaacaaagataccggctgaagctgaagcgagaaaccgaggagaggggaagagaaaaaaatggaaacgggcaaaaaagggaaacgcgatgggagcggccggtctgttcacccagaggcggtatggtgtggtggcaggtttcgcgggtttcatgcacggaccccttcctcggtcggtcggttacgccggtttgggaaagtttcgctcttttcttgttgccgactgcgcggttctaatagggctttatagtgttttgtagtgcttcgcagtgctctgtttggtccactctaatcgtcgtgtaaccaattgaggacggtcctgctgaacgggctcgtttgttacccgtgcgtcgtgtcgatcggtcggttaggcttagaagatcattgggttccaagccgtggataaatgaatgacatgaacggagaattattccgggtacatgacaaaaagcgatgaaagcagatcgaccaccaactcgcacgggttggatgatgggtccgatgacgaggtcgatcggacatgcggccactggccaagtggaaagctgagcaaccgagacgtcatacacgcacatgtatggtctatctctttctggatttcgtccatcgctctatctgcttttgggttggagtggttgtgttcaattgcctgaacgtttttctctctctccttctccttgaatctttgttatcaattcattttgcttccaggagaatctcgccaagtggacccacgaatagtatcattggtttccaaagaaatgaaaataataataaaaagacaaaaagaagaaaagcacagttttgtatccgttggaatcagcagcttccttcggacgatagtttgccgataatattttgatcttccccctcatttgtttgttgttgctcctcaaagaccgagcagcttggctctctggccttttttgacgtgtgtttaggccgggtaaaccccagcgtgtttcctttccctccttggcttttcttgtctctgctctgttctgataaacacatatccccacaaaacgcataccttttgaaaatcacatatatctattatacttttttccatcatggtcagctcaagccgggcaacccatcgatggccactctcgacggcgtcccattcatcgttttcaccggtcgagccgaagcgaccggcccgttaccgttcgctcctcctggggtctgactcccagatttatcagcctcggtctctcctccgaaccggtctctacctccttgttcactctctactcgctctcccttttcttcctgtttctctcttcttccgccccccagtccgctagctccgtcctcctctttttcttcttcctctgaaaccacactgttatctccgttggtacttcctccgaccgacgttgtcatcgtcagttcaccatcaacagacccgttcgatgcgtgcgaattattatgcccgtgacaagtgagagacgacccgagtccgagcgaatgtgattccgtcttgagactagacagtgttgagagtggaggaagagaagctatcgatccaggtctaagagaaagaaggaaagaaacaaagaaatccagagtttacgccatcagtttcttggctaattcgcccagaccaaggcgttgtcacatatacacatgaccaattcgacaaggaatgaaacaaggacgaacgggtcgacgtgactggaagagatggccattagtagattcatcaggtttgccagggtatgtcgcagatcgaccgtcttgagattccgatcggtcatcagctagattttatcgatcgaaacgaaacaccaaatcaggcctgtccgtatttcaagagaagaatccgaaaaggttgaacaacatagaacggagactagaactgaccagctcaatatccttgttcagtagatgaacagcgtattcaaaccgatatttggcaactccttttgaataaagcgggaacctgacaagaagatacaagcctctggtcaatcgacatctcgagagcacacacacacacacacacacacataaccgtccatactcacattcttgtggggccttgcatatctgacactggatctttaacgagacttcggctctgcgcgggcgtcaacgggtacaccaatccttttctcagatattttgctagtaaatgaaccagcatggtgacataacccaaagctgcagcgatcgactgctcatccacttgaatacccgccggtaagtcttcaaccgccagatggagcggtggtgctggctccttgtcgatcggcgtcggcagagcgacatccaagatagtgaacaccaacgcccggttatgaacctttggtccaatggggaaaataccttctagcgtgcttgtcagtcgagaccgatgatattggaagtatggccgaagagcatgccgattggcgctataatcgaacaatcagatcaattgtcagccaccaggttgagcatccaacaaacttggaagaggactctggaaatggcaagttgggtagacatacgtcagagtatgggaaaacgagttgatctcagctatgtgagcccgctcttccaccaggcaagcttctcctgcctgcaacaactcttctcgtctctgaatgttatgtcgataatcatcaatacatcgttggactgtcaatgtcatgtttgacgacaaaatgaaaggtcagcgcatcaaacatcgcaaaatcacaaaaaggaaataaagattcccacgttcatgccgactctgttgttttaatttcaaatgttctcgaagacgtttcatccgatctttcctctcgcttagatcccggatctgagacgaaaagtttgatcagtaaaaaaagaaaagaaaaaagagaccaagctagacagttgatagctcgtcatcagatgaagaccagacgtaccatgccagctacctcgttgtctttctctatgagattgttcaatccagcctcgattgctctagtcgattgtcgtgtgtcctccagaacagactgcaagttgaccaatctgattcaagcgaatgaccgatcgaggccctaaacatcagttccatgccatctacaagaaagatcagaggtacgagaagaaaagaggaaacttacttcagcagttcgcctatccctatccctcgcttcatctttgtctccctcagactcttctcaagcacacttttctccgccccaccatcccagccagctcgaccgaggacttttcctcttttcttttgagcttcccctgaaggaagcaagttgagttcaccgtccgaaacgttcctagtcaagaccgggatctctgaagccggatctggcggaggaggcagatagtacagtgtgtttggatgggaagatagtgtgatgatcagggtgttgggaggtagaaatgactatgcgtatataaaacaagatcgattttggacgtagaacgatacatattgaagcatgtcagttcaggagacaaacatatctctaggctcttgtctacgccctggtttcctcgtaacccagagggagaggaaacctttctatttatttatttttaatttcgcaatccgagtagaaagacggacctttccattccatctctttagtctttccaaatgtactttccagcttttcagaattctccagccctcttcatccgctcctttcctccgccgccgcctcacaaagacctcgaccttgaagacagtcagcctgccgacaaaagatcccatttcatccgagaagtcgtgctctggatcaaactcgccatagagcggatgagtggaggcttgctgaatccgagagatgaagaatggaactggatcctgtatgcttgaatagctcgtaggtacaacatcggcgcttccagttcgagccatagccgtggacaagactggtgggacgggtttctgatgagatgctgcataggaagatgcacgttgcgcctgtcggggaaaggcgctgtcgaccgatgtagaagtcgagatcatcataggtgatgctctttccttcccctttgtgctgcctcccgaggggggagcccaattcttaatcgtctcctcggccagactgagcacgacaaaactctcgagcagtcttgacgaggccagcattaacggatcgttctcttccgactctacgttcaatccaagggatttcatcctgaccgattcgtcggctagaagcgagtcgggttcgatctcttcctttgattcgtcgatcctcgaatgatcagacaaattgtacccggggccgacggatctgatcgtccggtcagaacacgagctgccgacactcactctggagctgctcctcggtcttcctccagacgtagtgtttaacgagctgctcagaaaaggcgatgaaggcggatccatcgttggcgaaggatgagacgacgtaggcaagtaaggtgccgagttggagggaaccgagagtcgggaagacgtccgtgctcgggagagagacggtcgacggggttgatgcgaggttgtagaaggcagatgcagcatagccaatggagagctcgagagctgggcagaaaatgatggggttgtacttatcgaaggctctctcggagactggaggggttgatgagaagacatgttgatcagaaaccttgccttgatcttgtacaaaacgcgagcaaagagaggcactcgtatcggcactcaccttggcgcttccgatactgattcgtctccctcgtttgcctggtagattcaaaagctcgagatcatccaatgtcattcttcttctcgccttcctagcgatgtttcctccggcggtactggtgacaccaccgctgctgacgccgttgcttctgcccacttgtttcgatacatcgtcctcctcttcaccgttctcctccccctctccctcacgctggggggtgttgtagccggtggtgagcgagtctgttggtttgaccagtgggagggagagtagttcatcccgatgaggtgtcgacgtcaggttatggattgagagtgtttcgagatgtcgaatctttcgctaaaagtttataggaaagcaaagttcaaagagagtcagacggttatgacgataacatagaagcgctcaagcagggactgggttccagcttctggcacacacaaactctttctctccttgagagatggagaaagcgaagtaagactcgtactttggggatcgtccgagagtcaccaaactctgactgatcattcgacatcgaacggggtgggaaagagtgcccgatagatcggatgaagatcctgtgtgttgttaagaagaagaagaagaagaagagaaagaaagtgtagctggttgagtgatcctctttctacgtcgaagaacagacgagatgctcggcgggctttctggatggaaacgaaagaatgggatcggtctgattacgcttgttttttccggtgtcttcctaaggcctactcctcccaggcgtgaccttccccatctacaccttctctgattgtgtttgctctttcactcgcatcttgcgtttgaccatcggccagcctactcgagaacagaaataaccccgatgtccgaaacattcgctcctctgacaaaccctccggtggacacacaggccgaggattctgttgcgcccggtgtggaggagggtaagatctctacggtcgacctgacgagtaagtcgcatttgtcctctcgacgcgtgcttttgtactttttttttttgtttgcatcgttctttttctcattttcttggagcttgaggctagagcctgataaatgtttgttgaatctcttgacctctttacagccaacaagcgaggagcatcggatgagaatgaggaagaggaagaggaagagtcaaagacgactaaaaagtataagcctctgatttgtttgatctatcgatcatccggtctgataactgaacctcagaacacgttatattgcattgtgctgcctggccgaacctttctcttgtgcgctcttggcgaccgaacagaccaaagctaacgggcacaggccagacaaagacagcagagacagcagctgccgaagcctccttggtcgaacctgaacaagaaccgtacgagtcccccacttctatttcaatccgactggtatttctacccaaaaagagaatgtatatgctgatggcgcgtctctaaaaactgggactgtcaacttttatctttcaagagttgaggattctggagttctctcgcccttgccttctccgcggtttgaaggagtcgatcctgatgttcagcagcagcaggaggaaacggcggaagatgaggaagatgaggagaaagaggtagaggaggagaaagaaacgaaagagaaggcgcacaagaagaaaaagaaggacgacgaagaggactcggattctatcgattcggacgaagaaattgacgaggacgagctcgcgttcctcgatcagacagccatcatccccgatgaagaagaggaaacagccgggacaggaaggagatcaagcagacggggagccgcaaaggtggactacgtgaagtaagattggtcgttgcatacttctttctctttcttgtatcttttccagtcttgctcgcctgacatcaatctctcgtctttccattcttgctcactcgaagggccaacctcgaattgggaggcgatccgaacgaggaggactgagctacccagtcttgatttgttctgcctcgtttctgtttctatgattttctgattttcaattcttatgcgacccggaataaagaaaagaagacgcccacacacacacgacgagagtgtgtgacttgttatgtacattccattcatgttatgcaaccgtgttcaacaagatcactctttcttcgtcctctatcggcctgggaccggggataccggttgaggatcgattagaccaatacctcatagagaatggcaaagcgagcgcgagaccagagagattggctaggatgtcttgccagtcgaaggatctggtcgaattctgcagttgaccgcgagcgcaaccatgaaccgatagaaacggagaaggacgcaagcagggcgagtacaaatacagcgacagaaagaagaaaagtcagacccatgcgtttgatgctaaatactaaatgacttgaagaaaggaatcaaaaagaagagaaatgagaaagggccgaaacttacagtcgtccaatcttgaacaaactcggacaaaattccaagaaaaagcccgttgatgagtagggtataaactgcagggacgcaggtcatcaatcttggcgccggcctgtgagccacgatcagcaaaagggagagacagaggagagaaagaggtggagaaaacgagagataaacaagaaagtcattagatgtaatcgggcgtcaagattgaaagagtagaactcacggaggatccaggatagggtagacaagtgtcgtagcgatcgcgttctgtccatttatttgtttgtttgtttcgtcatcaaccatacaagcataatagaggtgaattcgtttgttctaagaacctagctttcgatgacgaaagagaatgactatacccctaggaagtgttggatctaaggaaggcgcgtgagacagatgaccggataaaaaggaagagaggagggtagcaggaaattatgtgagccgggcaatcgaaccaaaagacacaggcgaaaccaggagtactaaccttatcatccagtccgagtggtgggagcggggcgagagccagaccggcgagaaggccgatgaacaagccagagatgataaagaacgcctatgttttgaggcagaatcggatattctcgtgagcgcgttgaccgaaagaagaggccaaagaggtaaaaacgaacgagtctgatacggaggttcactcccggaggaaccaaggttcggacaagccagatggaatccaacgcaattgaccgagtcaggaaaccaggaatattgaccatcatgagtgagaaagaaccatgaggtcggaagaaggagagaagcaaggcagggggggagcagaacgggaaaaaatacagggaggagaagaagggatatggagagaactgctgagcagtcggagagttggaagaaaaaagagaaagtctgatggccactctctgttggctgggccgggtgaaaacagagggacagcaaaggctgatcggaatcctgaacgaagaagaggcgatactaccgagcaagcaaggactggatgttgagaaagagaggaggaaagtcaacagaaacactacgcgtgtcctaatatgctacgccgcgtgtgagttccacagaggagtgtactgagttctctttcgtaaggttcatttatctcgtgaagaaaagccatgcgcatagcgaatagttgattcgaggtctagatggagaaagagaaagagaaaaaaggaagaagatgatatgatagtgatgatgatgatgatgctcctttctgtttcctcaccacgctttcctctccatgctttcctctctcttatcgaacgtttgatctctcacatgaacgaatgaatgaatgaatgaatgaatgaagaaacgaacgggcggacgagcagatgcttggatggatacaaactcaataatatcgaaacagaacagaattttaaattgagaatgttcaccgttcgacggctcagaagatcgtgcacgtctttcagctgcatgccttcgatgcgtttataccgaccggttcttttccagcatcttcgctgtggtccaaggaggatatcagatcgtgttcgttggtcacgaaacagaaggcatatatttttcgtcgtcgtcgtcgccgtcgtcttcgtcatcatcatgaactttatgattcccttgatggccggcaccaccacttttcagactaagagcagtaagagaagagatagatgcacgacgacgacaagttcaagacgaacactgcatagaaactagtatatagacaacgagaggaagatgacgaagatgaatagacttccaaatggagtaaatagttggaatctgatgaaaagctaaacgggtaaatacggggagccgacctgcacgccaacgtctatcggtgactccttgtgttggcgatggcgatggtggtgcctgatggaggcgatggtgggggtgccatcgaggatgacggcgggcgctgaaaaaaaggaggttggaccgcagactatgtaacctggcgctcggttttgtttctcgggccgagcctaccggttgagccgcatttgggttggggggagggggagatgggaggtgaagagtgggtttgtgcctgtgcctgtacctgtgcttccgttcttgtgttcctgtgtacctgagtgtccataagcccatgtgtccatgtgcctgtgtccctttgatggtgggcttcttattttgcccccgtcagcgggcatcggtgaattcttatttgattccgtcgaggacgaccgagcaaaagtgcctctagcgggaaacacaccggatccgttcccggttgggccggctgatgtgcgtccaaagcattcgaaacaccaaccgaccacacaagcgggctttcggatgaaaacgggcgagaacaaacagtcatgcaggaaggccgagtctggggtttgggggaggggcctcattaaccggaagcatagagctaagagtcggggacaaagagcaaagagtgaaacgttcatgggaagccagagtgtcaacaaaacaagagtgaagagataagaaaggcaaggaagccacaggatgaacagggggagagactcggtagaattatgaaagatggaacatgaatcttgcaagcggcagaggccaaaaggcgaagggcgaacggtgaaaaggtaggaggagtaagaatatttgaaggaatgtattagtaactttggtgagctcccttccagatgatctctgtccgtcggtaaaagaaaatgaaggagaaagaaggcgaaacgggatgaaactccgggaaaatgcgacggaccaagaaagatagacgatggaaacagaacaaacagcgagagcgagagagagcatgtgtgagactctactggccgatcggttccattccctgtggttcttttcctcctccttcttccgcgtcctcatgctcatgtccatgcccaacatgctcgggaaataaaacaaggaggagcaagactcaaagctgccaaaatgaaccacacagttgagcctcatcgggtttaatgcaaaatacagaatacagaacctgtacgagaaagagaaagaagggagaaaaaaaaggagaaaaaaaaaaccccccagtcggtgtttcatgcgtcggtcagtggatgctggaaagaatgtgtgctgaaggtctcgtcgacttcttaagaacttgaacgggacaaacgaccgaatctttctcctttccttctctcctctctctcatacatttgttcatctggttcgcccgatccgttcctttgtgttctcttgctaacacattcatctcgttcgttggtctgtgtgtgtgagtgtgtgcgtgcggtgtattctttctgttcgctccaacatacccatacctatctgtttcctagtcacccaatcacataccgtatttcttttttctctcccctcttttctcatctcctcaaccccactcacagccccgctcgctcggtatatcttgaatccccaatcgccaatctccaatttcattctctctccggcgtctggatctcctcggcgtttctgtctcgctttcttctttataaccttcacccctcgaccggtctttccaaatcgacccacgggccatttcttctagatcccatcctccccacgtttttcattattatttgctcttatttccaaatagaaataaactcaagataaaacaacgggaaacagagacagaggatccctaccaaggagaataaatcttaccaagccaatctaccctacctaaacgaaaccggaaaaaacaagagaaggacacggaatcctggcggcaagagaagaagagaaaaaaaaaatccctcaagatccggtcgctcaactctcgtcctccatctggcgttctcttagctcatccatcaaacttgacccaatttcggactcgtgtcctcgctcaaggctatttctgttcttcgtctctctgttggattgccaatcagatcgtatcctaccgaattcttcgtgactctcgtccatcccgtcgacaccgccaagagtgataagttcaaaggcagattcagctttgtcctagtctggtcctacccttaccattcatcctctgtgctctatccccatccccatccc

SEQ ID NO: 363 - DNA, 40844 bp, Xanthophyllomyces dendrorhous
ccccatccccatccccatccgttctcctcgttataatcacgaggtctcttcccccatccacatgtcttcaactcgcatcaatactgcttcccccaccaacatcatcacctcccccgccactaagagttcatatcagtcgtccttctcatcttccactgcatccacttcattcacccattcagtcatgaagtctcgctcacctcgatctcgatccgctggcccatccaccaccaccacctccgccgccgcgaaatcatgttcggccattccggaccgacactacggataccgtgaggcagcttgcagtgccgctcgattcgtaagtccagcttttcgtttacttctcattcatcactccctctctacctctctacctctcttcccctctctttctctcttgcgtcgtctcttccccagaaacttacgggactcctcttctcttttttggtttctcttgatttttctccccttcccacccaatattaaatatatatatatatataaaatataaaaaattagatcctgagcttgtatcattgcccgaacataccggcaaagacgtcaccctcatcgcctcaaccgtcacttgatgtcttcatcgcctatgctctccaccgaacaaggcttcccacgatcgtcaccacatccgccctacacctgctcctcaggctgaaggccagattcccggaggccagaggctcaagtggacacaggctcttcctcagtgccctcatgaccgccagcaagatggtctgtgatgattcgtactcgaatcagagctggtgtatcgtcggtcagggtatgtttgcccttaaagaagtcaatcaggtgagtctttcctttaggtatctgggatgtttgtccttccattcttcttactcacccttctttcctgccttctttctctctctctctctctctctctctctctctcctttttagatggaacgagaattgctaggctaccttaagtgggacatcaatgtaacagtagaagagtgtgccgagctcgatgtaagctccatccatcccaacatctcatcactcatacatacaactggttctgactttgaacgcattctgtttcacttcacagctcaaactacgaacagattactctggtcgaccgccgtgttccagctcaaactcgggccttgactcgataacatcgtcctcctcatcgtctgccaccacagcagtcaggtcgatcccgatctctgagtgcacccttccggatgcgtacccatcaccaccgtgttcccccatggtcggctcttacacctcggttgactcctcagaatcctcgccttcgtcctgtggcccgtgtgcgacacctccgaataccaggctctccacgtttggtccgtttaatacggccaccaacacggccaccagaaccaacaccacgtcctcttccgtagtggctgctgccgccgccaccaccacagcaacagcaaagcccgttcgccagattactgatgagatggacgagatcgagagctggtgaccaaccgctgtgttgccttttctttctttctcatatttcccccgtctttacctttgccttcgatttgtcctcttcttcgtttcccgctattacctcataatcgtcttgtgccttcttattggattaccctcatcaaatcatgtcttttgttttaatccaagcttcctcagtctctcttctcggaaaaaaaatcccacatctctttcatctttgctggcttgttcattctctctctacctgtttcctttcgatctatcatctatcatttcgatcttcagttgcctttcaatcttgtattcttcgttgtatgtttcttagaacccaaatcaaattgcaattttcaaactcaaaaagtaaacgaacttcaaatacgggtgcaagaagaaaagaaaattgtctgtcaaatagtttaagcatgcctgtgtgctccgttcgattctttctttcttttccgcctcttccgttgctccctccttttccatcccgtcttgtttccccggccatcgtcatcgatcactcgatctcctgcatcatagacgcccatatgaacctaaaaaatccataggaaatgataaggagatgaggcaggaggggcactaagaaaaggagttagatccacatggcccaccacagagttgcgtccccagcctttcagaattttattttattttattttattttgttttctgtagatacaagttccttctcctctccttattgatgctgctccatcgctccattggtttgtcgctctctgcagcacgggcgttgagtttgctttatttacttatttgtttattatccgactttatcctatctgttcttcttcttcttcttaaagccggaccggaactcggatagagattcccccatggaaccgaggttgtctcaattcgtgccaaaacagtaatattaatactaatgacgatgatgatgatggtgatggtgatggtgattggtccgcgtgacgagcagcgactttatcgggatttcaccccacccgccttcatcatcatcattccgctcaaaacaaaaccaaatgaatacatctcaaataaaatccgatccagacggacaccggagtgaacatggagcaaggaagcaaaagttattcagatgatgcgcttaaattagaaccgatgggtagtgagagagtgatcgagaggaaacgataggcggctagctgggaggaaagtaaacaaccaacatgctgaggtcattctctgtccgccccatccaccagaaaagagataacctgctacttccatcttgcgctccctttctattccattccgatctattcttttcaattcaattcaatttaattcaattatattctatctctcttctcttagtggaagttccgagagtctatactgaattaagaacggagcaagagctttttgtttcggaactatttctttcttgttcgtttcgcatcttgaaaaaaatccttttttttttcttttttttttcggcatctgcgtccgtaagcgaatgggagatcgttctaggcagctgagagttctccttctttctctggctggatatacagatcccatctatctctttaaaaaagaaatccatgtaggttgtgttcggtttcgtcgttttctatgtccatctcatctcatctcacctcatcccccacctcatctcatctttcgatcccccttgcctgctgattgttcgatgaacgctttccccgtttggtgcaaacatacatacacatacattcacgcaaacgttctggatccgatacccactaatgcctgactgacccgctcattctcggttcacctttccgtttgatcgacctgctacaaacacagagagagagacgatagccatcacggtttcaacatatagaccgaagatagacctatacacatatacaacactaacgccacattcacaaagatgaacctgttggatcttccgatcgagattctcctccagatcttccaacatgccgccgggaaggacaagcccgccggccaggccaccacacggtcggtcgctagcctgttggggttcacgggaaagagagagaacgttttgaccacattggcgctggtctctcggaaatgccaggtgagagctcgtcccccccccccttcctccttattttgcccaacacgatcgtggttgaggtcgaggcctgtctgatgatccgggtgcgcttgtcgacactaggatattgcgtatgagttcttctatggctccctctccatgacgaacgaccgcgcagagaggttctatcggtcgctcgaaaagaaccctcggttaggaagtttggtcgtcagctaccggttcatcagttgtgatctcgcccatctgcgtgcgttccaccggtcgatatactctttgccccccgcccagtctgctctacgggtgattcattcgcccatggtagccaccctctcgtcgcttgtcgatcgtgaacagccgccgctatcaccatcatcaccatcgtcatcatcgatagcgccatcgcgacgattggctgttccagactcggtgcccatccggacactaacactctcatccgtccatcccatcagagatgtcccgaaactggtcgaccctcgttctgcgtggatgaacacatccgagctcgagaaactcgtcctgaacttcacgcccatcaatctcgcacccaccctcccgctccggtcgaccgatccgttctactcggtaccgcttaacccggtgtttgctcgctcgttaagatcgctcactttaggaaacccggtccaggggctcgaaccagacgtgatcctgccggtgttggaacgtctgccgaacctcgtcaggttgaccatcctcggatcgagcgcccccagtctgaatttcatcctacgggcggtccccgggttgcaaaccatcgtgttcaccagagctccacaggccatcgccgaacggtcgttcgctcaagccgacagagccaaggacgagaacgggaatgggagtgagaacaacgacgaagcggtcacccacagggctttacgacagatcgagatcttgtcgcctaacgagacccggctgatcgagtccttcaacaggcgcttcctcgatctgatcccgtcccttcggtcattccaaccgtcgacccatcctgctccttctcaatctgctcgcgctgaattcgagcgacgggacgtccgggatcgactacatgacttgccagcactcgagaccgtcaggcttgcagggctcgtctttgaccaagtcagagcatcgggcgaaggcctaggtcgtgtgaccgagttcgcggtggccctagatctatggggcatcaagctcgtcgaccaggacttggatatttggtagtttgggcccaatacagtcgcttcgttttatcagaatgaattaaaaccttgttcttctcgagatcatctcaatttgccgtcatcatcatcatcatcatcgttgttactatatagaccatgtcacgtaggcttctctgatcgaacgcattgcagatctcatctttctttctttttttctttctttcttcattctcttccacctgtggacgaatcgttcatcatgcggcatccaatgtttcttcagacaaacgaaaaatagtagtgatagaatcgcccctgtgatatatttaattagaaaaacaaagggcacaagccgtcttcctccggtttgctcgttcaggttgccatagcggtatctccactagacccaccaccggtccctgcgccagcgccgacggtctcctccttcgttcctcctagacccaaccgttggagaatcgagtctgtttcttcacctgaaaagatctttgcgagcggtcgcttcgtcgtcgggttgagcgtcaacgtggccaactcgactggaatacaaacgaaaacgatttcacaaatccgtatggacagtgtcagatgaagattggacaaaggccaagggaaaacaaactgcaacgagacaaagaaagagaagcaaaaaaaaaagaaaaaaaaagagactaacgcttctcggatcccagcttggtcgtgtccatagttttagacatcactttgaggcacagatcggttgcctcggccacattcatcgtctccttgtagtcctgcttcagcaacgaggttgccctggaagtgcaaaacatcatagaagactatcagacctgaaactcgtacgccaggagttgaaagaagactaacgttccgttgttggcaccaatagccgtagccttccatccagagtagttgcctgacggatcagactggtagagctggaagttgtagagatcatcatagccgatatagatcaaggagacaccaaacggacggaggcctaatcgatacatggttatgaaagagacagaaacacttggtaaggacatgattaagtttgcgacgatgaaagaagatcatgatacgtacctccatgttgagtgtagccctgggaacagtcacaagcgccacgagtttataccggtgcacatagatccgatgagtttgcatgccttggaaataaggaagacagaagagcagtaaagtacacacctgctttagatcacaaagcttctgaacaagcacttccaccggaatgtcttcgttatacgacaacagatgattttgggcggctgttcgagcgtagttgactacagagttggcgtctgcagtgtatcctgctattccagtgatgacattgctgtaaatcattccgaccaaatgtttttgctcttcgtcaatttctgccgacccagaaaaacatgcacagcgatagacaccagaaagactcaacttgttgagcaggaaaaccttctctcctccagcagcccaggctgcgtctccctcagcccctccgcccttggtcatactcaggtcgagcaacttgcccgtcaccttcttctcggcggccacgaccactccgtcagtcgcaaggatggccatcacggatccagcatgagagatagcctccatagcatactcgactgaatgaggaaggagactgaacggtcagtctggtgaactgatgggttcaaggaagttatgcgagtgtagaaaaggacagggctcactctgatataatcgacctgaacaatggattattcgaacgaacaatataccagctgggttaatctactggctaaaagcgacatgaacaagtagcacggagaaatagtaccttctggagaaaagatagttgttctacctgtttagttcaataataaagaggatcgaaggtgagtattaagacaaggaagaacgaaattggaggattcgagcgagagatggaccgaaacgaggacgaactgtcgtatcttctagactgtttggaggaaaacaccaaacaaaacacagaatgagaaagagtgcttcaccggagctatagtttcacaagcttgagcgagactgaccatgatgtgagatagaaagaatagataacaagaaagaaagttggtgggtcgacgtggatgagatgttggctctttcgttcagacagacattcgacacatctggtgttagtctgagttggaggaagggcgtcgtggaacttacgtaagcaaggatatatttgaatataagcatcttattaaaccccattcaaataaagctctcttgttaagggcaaccaagctatgacataagcgattgcatcctcattccctgtcaactcgcatcgatctcttcgttgcgatcgtcaaccgattccatcgccatcgccatcgtcttgtttcgttttcttctctcaaccaccatcatactaagaagccaaatctccatctgttcgtctctgtcttctccctcactcctatctcatctcagcgcatgctctccaggctcattcttcgatccattccgctcgtagcccgtaaacctacttttgtcaaatcgttctctagtaccttacccatcatgtccggacctcctgctcataagatgggtcagtctcacagctcctcagatacatcttctgcagtcattttcactggatctgatcaagtctcttctttttgggctgaatcctgggcttgctctcagcttactttgccaacatggcttcctctctccctgaatctcacggagagttccgaactgttctgttcgtctgccgtcattcttcttttcctttatcttccatcgcacgatgtgctgacgtgcgttcccttgtttgatgtctcgaacagctggactggactctacagtcaggtcgtcctgatgactgtccagccgggtggtgagagtgagtcgatcttttcgctggcatacctgcatcgtaaagaccaatgctaacagcgcagagctcattattttgtcatcgaaacagtcggagatgaagttcacaccgtcgatcaagctttgtccttcacgagcgggatcggtaaggccatcgtcggtggagaagagcaggacgtcaaggctggcgatctcgtagtggtcccagctggcacccagcacaacttcatcaacactgggccaaacccgttgattctatacaccgtctactccccggcggagcacaatcccaagactgtgcacaagaccaaggaggaggctgatgagcacgaagaggacggaactgatgaggcccctggctggagtcagaagtccaagaaggagaacgaagccgctcaaaagaattagatctgacaagctccgtgcgctcttggaaacaatgatcaagccatcgacggcttgtcctctgtgtttagtcaattttgtattactctgattatctgtatctatgaacaggttgaaatctgaatccaatcgggagtctgtacagattggtctcaagtcctgaaagaaacactgcgcaatgaacacttgtctgcaagtccagcgatatataatgacacatgtctcctcctcatctattcgtctttgaggatgtcactcttcttcagtctatcaaagatcaaattttaaacacggcatgaaaacgaaaatcagatcttgttgatcgaaagacaatgctagaaagaagagaggaaagaggtcagggcaactgactttaattcatccgacgaatccttcaagtccgcccctttggcaagaatcttctggaccttgtcatccaccacgatgccgagtcctgatagcggagtgatgaagaagagtaaacaagagtagaaagacagtcagcgaggaagaagaagggagaggaaggcaaaacaaaagaaagaccgagaaggaaatggctaaccttgatcctgggtgaggtcaatgacatcctcgagaacctgtacgaacgatatttcaagcaagttcatgacgtcagtcgattctatttctgtttgaccattcgatcgacaagagagagagcataacgcagcgggtggaggagaatcaaaagaagcgagaatgttcggacgtacaacaaagccatcatggtcactgtccaacttttccaagatcgtctgcacctcttcctgctccggtcggtgcttaatcaccaacaatgccttctccaaatcggccaaagaaatctttccctgtccgtcgacctcgatcatcttaagcgagccaccgactttagagtcataagcttcaagttgaatatcgatcttgttgagcatcgatcgaatgcgcttagaaagcgaggtgtcgatctcgtcgtggtcttccggtcgaagcttggagccctaggtgacgtaacaaggatgaagaatgtcatgagttagatggaagaacaagaaggaaagagaagaaaagatggaagatgagaaagacgtacctcctcggaagcaatgttttcctccattagctgcttaagctcttgtcgctataagacgagagaaataaggcaaccgttaggtctttgactaccttctcatcgaagacgggccgaatgcaaggggaaagaatccatgcagaaaaaagaaaaaaaagaaaaaagggcaaggacaaacctcctttacaatcgatgaccgggcagacaaaacagtcaaggcctctgccaactcgtggagctgttctctggtcattcgaccatccgcctcaactgattcctcagcctgggcgctctccggctcggtcttcagctaaaaggtagacgaaacattcccaaaattggtaagcgagctgaacggtacatgtaccgttttctgagacggacaacgaaacgaacctcagattcaggcagcaaggcaagcgcatcggaatgcatcttctcctgtctggccctctcctcctcctttcgagccttttcctccgctcgaattcgatcatcctgatccttcttctcttttcgggcagtctcctcctcctgtattcgagaaagttagacgaaacatgtcgagacaaggcacggtgtaagaacatgtatggcgcattctaaaaaggggagcgaaagaagagaacgatagacgaacctgctcttgctcggcctcctcctcaatcaactcctgctgctgctgaaggacttcgagcttctcctggtaagtcgcgtcgcctccaagaacctcgagctcggcctcagaaagctgttaattgtcgcccgaatgatccagatcagcatgtctggaagaaggagggggaaggaaacaaagaagaagagagaagagagaaagaacggggcggcaacaatgaaagggacgaaccaagttatcaggcaaactgctcaatgtgacctcgagggacttgatgacatctgcgtgctcttcgttgaagtggaaagctcgacttaggacgagaaggacaccagagaccttgttggtgtaatgaagctcaatccaagactccagctcccttcgaagcgcagatggagaaactccagtgaaccggatccctcgagactggcaggccatttggagctcagacacagaaagcgactgaataccctcagccaggatgacctattccagaagaatgatacaagatggattgaggtgagtaacgcgcaggtcgcttaagtagacgagatgatggggaaggtatatgagaacaagacggtttgtctagctaaccttgtcgtcccgtcgaatcttttgaagccggtttcggatttgatgtctaaggaagttgtctgttccgaaggcatggatcttcatatatctcgacatggagaccagctgaggtctggacaggttgtccagtgtgacatcagactcaaatagcttggcgaccttgatgatgtcctcctttgagggagattcaccagttgatcgaacctaaaacaggattcaaacggtttgtcagccgataagttgtcgaaatgacgatgtgaacggaacggacctttcggaaaaattgcttaaactcatcgctcttgacgacgtcgttcgccttaagaccactctccgagatagtctcctgaaggaacttggccataccgattcgaactcgaagaagcttccgttgcttctcctctgccgcgtacttgtcctcgaatgtggagggcagcatgttcgggaagaacttaaggaacactgggagaaggagttcgagaccggggatgatgacaaagacggagaaggggataagtctgaggagatcagtagtggttcgtttgagctgcctggtctctcgcctagtgagagtacctccattaaggaccttccactgaagctttgagctgattttaacttcttgtccaagaagctttgtgccgtgccaatagtgtttggcctcttttttgaccttctcccatgtggtgagctgtggtttgacgtcttttgatgagtcactggtctttgcgatttccttggaagataaatcagatgatgaggatgacggttctttattggcggtggaggaaggagggttggtagagtaaagccgggcgagcggtagaaggggtaagtaggtctcgctcaagttggaggctaggtaaggcgttcgccgactgaaccctgccagcttggtataaggagatgagacaccggaagatgtgttccgaggagaggctgtagattcagattgaatggtagatgacaagagttaggagatgtgagatgtgattcttataacctcgaaagtaagaggaatatagaaagaaacgtagagcgacgaaacacacctcggacgatggtcggtgtcagacgcctggcggcataggtgttcaacccagaaactctgctgaccgacctagtggaagatatgagggagtacatgagagaatgttcttatgtgtacgtgggtggtggcaacgctgtatactgtcgagctggagaaagcaagaacaagtagagggaagaaaagaaaagaagtacaggatcacagcactgacacactcagcctttctttcttcggctcttctcggcatcggacggagtaggaagccgcagtgaatttggagtgaacgtaaccctaacacggcacttacctatgagtacgtacacactcacacccaacggcttgactaccttttgacgttcttcgcgctcgtgaacaagtgcttgttttggtatggagagaaccatcctgagaactagtagattcgagagcagtatgctgtggaagatcctccgcccaaaatatccgtcgaatgtattctctcagggttcaaacattttgcttcgatccaaactgtccttgtcatgtcgatatagaaaccatacaatatagggatgagggatccatcgtgctcttcctgatgtacaaatgctatccaggagtgtgcgctactctgtgggtctgcctggtcctaaactaaagggcgtgatgaatcaaaaagtggcacaatgtagagcacgtgcaggcatccatttttggcacctcagtagacaacgtgataagcgacggtctactagctcagactagaaatttctgtaatgacttcattagggaaaaagagcccgaggagggaacataacgcagacgcacgaccagctgaagcagagcatccattcgatctgaccgacatcaaacacactccttcacttggtcatactcactcacacgcacattacatcttccttccttcctccctctcttctctgtattcgataacaagtctggatacggcctgttttttctccccgaccagatttgttttctcggtagaattaacaagaagaaaaaataaatcaaaaaggactaccgctttccttcttcatcgctcgcaacgcgtgtgttcatccagtcttcgtagcaacccttgctactcactttaccaccacagatctctggagagactaatagagtaacaaaagagatttattcttcggattcattttctccctgtccaattgatttcctttccctgctctctgcattcaagaggaaaaaaaggctcccacttcttcaccaatgagcttctggaggttcgtcaaccaaactggttcaaactttgaggcccttctcacgagagaacccccgccgacactcgaagagcttctcgaggataccgaactcttgaccgaatgcaagactcagaatgcgaagctcatagagatcctaggaagggaagatcacgttaagggtcttcttggttgggtcaccaaaaatatggacccattggaagaccgggtgggcgagagtgaagaagaagagaagaggagacaaaagtaaggatccttctgtttcggttctgtcttgttccttctcggagagtcaacggtgaccgatctgaagctaagaatcttcttcaattctccctcacagattccctaacttggcgaccgaggtcctgtgttctgacgtgtactctattttggacacctgcctttccgacccggccgagtacctgaccccgttttgggagaaagctatcggtcccgtgcccattcaagcatcttcttcgtcgtctcaacctgtcggttcgccctcttctgtctcgtccatcgtcgatgtcgacctgacgacagacggaagccagactgccttgtcgtcaagcacgattgatcatccaccctcacctcctcctgtcgagcaaccgaccgtcaaagacacgctcgatgaagatacctcgatggatatctttgtagaagatgccactgatggatcgaaagctggcgaaaaaaacgagagggagattgtgtatggaatgtggtgcagggtgaattccgtctttcttggcaagaagacggcagaggttagtcaaacctattctttctctgtccttcacagttactttgtctgttactcttgccctcggtttacatatcctctgacctgtttgcactatcttctcagatactcgcgtttatcaaatctcaaccgagaataatagaacggctactcggaaagttggattcgcctgccattgtcgacttgttttttcgattaattcagtgtgaagagattcctgaaggacatggtgtgattgacgtatgttcttttctcctctttaattttccttctgcgtcctttctcgcgtagggtcactcaacttttgtcttttctactatctatatctgtctccgtagtggctcgcctcagaacgtctggtcgaaagattgacgagcttgctccacccgaaacattacccaacctaccatgataccgcgaccgaccttttaaagggaatcatcactatgtctgctcccgcgcctggtccgttcaacccaaatctaaatggaaacccaaactccagccaagacggacctatgtcagaaggaggcgtggccacaatgaaaaacaatctgctcattaggcagctcgtcaacgcacagaccgtcgacaaactggttgcctacatgttccgaccgtctggttcagagactcctaccggatcaccaaagaaacataaagaatcggtcgcttcgatgagggccattgagaacgaactgccaggtttcccaccagtctatccgccttgtaccgatcctgagatcgcgctcacctcgagcttaacatccacgatcgcggtattcatcgagcttatcagaaagaacaacactgactattcggaacctcatctgttccatgtcgttcggaacgcgctcatggctcggtcctctgctagggcgacggacaaaacgatgtcgacagacggtgcggatgatgagaatggcacactcgacgaacatgatgatgacgcggaggaagctagagagcagcaagatctggaggacacgatggagcggatcaacaaagagatcgggatcgttcacttgggcaacttgttgaacgtgttcacagaaaatatcggcggattccaacacttgatcaaccaaccgagaacgagcaacgaagccgcgcccaccactaccggtccctctgttccactgacacttgaacgattcagaatcatcgagctctatgcagagttgcttcattgctcaaacatggttatcctgaaccgtcccgctgggtccggcccggtctacaacgaaaacggacaccttctcgaaggactcgctgggcttgacaaactatcaaccgctcttagtcgggcggaaaatgaaggagcggacgataggtcaatcagagatcaattacaggcatcccatgagctcccgatcagttgctcatcctctgatgcaccactcgatatcgacgatgaagacgacgatgacggcgatgatcatcgcccccatattcacgatgacgaggaagaggaaggtcggctcaacgatggaaaggtcggatcggaacatgatggaaacgataaggtagatgaacttagggattcaaaaatgttgagtccagagccggaggtggacgccaacggcgagccatcatctactcgcccgacgatagaagaaaagaccaatggtcgacctcaatcggtagatctatctacacaaggtcctgtccctatggattcttcctctgcggaggaaactagaaagaaagacgtcttagaagagcagctttcccctggagatgtcctcaagcaagcattcataaaccatcatcttcttgctgcattagtcgtgagtaatcttacttttccgaaaaccatcatctttatatacaggtagaactaactctagcgaatgcgtgttaacacgatgatgacgacggcaggatatgttcttcgcttttccactcaacaactttttgcacacagtcgtctatgatgtccttcaacaggtcctcagtgggaaactcgatcaggggcttaacaagcaacttgtgatctctctgttttgtgatgcccaactcatagaaaaaatcttaaccggccagaaactcaacgacgcttcaccgttagtatacgttattccgagacacagacagacctttgtcaaagttctgactcagtttgttcttgattgtctggctggatgtcggcgaccaaaagtactcgactcggtttcatgggtcacctggttctcatcgccgaggattcgatccggtttctctcccaatgcccagaagatcttcttcagactctcacaagttcatttgatcaagaagcctggcttactttcgttgaaggtccatattcagaagcgaaaaagaaggataacatggtgatgggtggtggaaaaccggtggccgctcatttgacggacgaagctggtacaggcgaagacactgagagtgatgaagatgaggagatcggtgattcgatgaacgatagaatgggtaacggagacgctggcacgagattgaatttctctcaagggtttgggtttgattcttcgaatatggaggaggacggggagggtggggaaactgcccagcaggtttgtctctcttcctcttctaactgtttcaagctaaagacctcgtgtgctgatttctcttgagttaactcttggttcagttctctcggtatcttgctcagcagatgacatctggaaactcagatcgtcagttcgagtcctcttcggatgacgatgacgacgacgaccatgattggatggtggacaatcatccatttgatcgaaatccttctagatcccaagcattctcatccaacgtaagtcgtcagattttttttaatactctggcttcttctgctttattgtttttcactatcaattcaaaggcggttatctgacgactgttccatgtatttttgctacatcaggaacccttcgtcaacgctggaaacgggttcgacgatgatgtacgtcctgtcccttttgtttcttttcttcctctcaattgacatccagaactaatgaggtcttatctatctccttgcttgtgtattctctcaggacgaggcttggggttctttccaatcgacgtcgaccggattttcgaacaacggaggtgatgatccgtttggcgatgattttgctgctccaacatcctccaactctgaagccttggcggcgcttgaatggaatgatgctacattccaacgcgagtttcgggatattgattctgaagatgaagagtcaacaaccacaaagatccggatacctgacgcggatgatgaagaagacgaagatgatgatgtctctaatggcgcccgaggccgtagtattgccatttcgaatcaggcaggttcgtctggttctggctggaatgcatttgggtcgagcttctctcgatcgccgtctggttcgccttcgtcttccacgtcctcatcttcatcttacaataaccctcgaacggtgtctcctcgggcgattgcactcaactctggttcatcgcacttgtcatcatctccatccaactcaacttcgttctcaccatcatcgccaaacttgctgtcccacacaacgaacatgtcgctctcatcatcaccatccacacgattaccggcgggcgcagccgctatctttacgcccatgtcggcgatctcgcctccagatccaagtctgctcgaggcgaccgatatcgatagaccactaggacccggtgtgggtaaaggagtgagaagggtatcgtttggaaagggtcgttcgggtgggttccttgaaaagatgggggtggatgggaagcgtatccgcgtaccacgtgagtcttcagcgcttttcatgctatgttcctttgcttgtggcatctcgttgaattgatggctgtttgatttttatgttctcttgttggtgcaacagaagacgagattgcgcttgcagtagaatttgactctgacggctcgtcatcttcttgatgtctgcagaatgctctctccaccagctttgctcggccgcatctttctacttgcttaccttccatatctctgtttacagactatcacaagatctatttacatcactaacaatttttgatacatttccccttcacttttccatacttcctgtacaaagctgtgtatatgcttttctacctattggttatttataggccattctctcgattgattgttgcttcgtgccaatgtttcgcacctgctaaccccggaagtcacagtaagcaaataagttacaccacttcgttcttctggttgatgtcaccgagtcttgccgaactgcacgagagtttcgacgccaagcatattttcatcgcttggcccacaaaatcaatatataatcaacactttgtggctatcagtatatcctcatattttcatcacgatcatcactattaataccatcaacaccatcatcgccatacctctactgatactatcaatacaccatgggtgcctctagttctcaacctctaattccgctcactccatttaacccgcctctagggatccacaccagttattgtgcacctcacccggtcacgttggttctcaaagagaaagccttctcgtttagcggtgatgattttaatatcaaggacgctgccaacggaatggatgtcgtcagatgtcaggggcaagcattgtcgttcagggataagaagggtgggttcttacaataatcaggatctacccaaacttacttactaaaatctttgtttgaacatcggtaccaactatcagtgatcaccgatacatctaaccgagttctattcaccatcaagaacaaactcttgtctgtcttaagcacatatactggcgaggatccttccggtcggttgctgttcaccgtgaaatcaaagttttctagtgagtctctgtttccgacttatgcttctcatccagagcaattaactgatgaccaacctttcctcacgtgctggcgtcagttggaggcgcaaagatgactgcccattttatcaacgcatctaacgggagagccatcgagcttgagcttcgaggtagtttctgggaaggttcagccgcgatcactttggatggtcgtccggtcgctcagatttcgagacaattcttgacatctagagagatcttcactagtaaacaaactgtacgattttcctttctcacctcttctcatctatctctcttgtgaccgttatgcaagcgttcatctaactcaacatggggtttcttgactctgtgctctaacaaacgatagtactacgtcaccgttgcccctggggttgaccttgctctcattgcagcgattgcaatctgcctagacgaactcacaactgagggatgagtggtccaacaaaaatgccttattttcctttcctttcctgagatcaaatcagacatatagcttatctgcggggatccatcagccagccgagctgttcctctcatcaacaattaccttaactctaatcaccggatccttccttcctcgatacctccatacactaaatttattctttgccaaacgtgcgaagctacatgatctgttgcatcgacagactggatcaaccatacagttttgataagcaaattagttcaaaatcatgcttaacgtggtatttatatgcgcaaacaacggaaaatgtcatgtttcaaacccgaatattcctacagtcaaaagatgagtgttctagggcgatgaagcgatacatgagataataaacacagctcgacggaatttttctttttgtcacaaagaccccagatgcaaagcaggtaagtcagaaaaatgaatatgacggaatttgagggtatgtaggtggatacatgcgatgagagatgtgtgcaaagatgaggagatgattgagtacgcgaagatagaccgatcagaggaaccagacgagatatagtgaaagagagatgaccagacataatttccctcaatacaagagctagaaagagccagatagagaggatgtagtatcagtgttatgttttttttttcttttcatagatctctttcatttgtccatcaaaaagaaagaaagaaaactcacataacctatcgcgctatagtcatcgaacaataaaggcattgagccgcaaagaccaagacaaagtataagtagaagaagagaaatgaatgtgatcactcacagaatagggaacccagacaacagaccgaaccaaaaaacgatgttggcgatcttcttatttcgtttcactatgggcagtcgaccaatagcaatcaacgggatttgaatcatctacaagattgcacagacgtcgcaaaacatgtcatgaggtcaggttgatggaaaaaggaagaagaaatgaaggaggaagaccagaacctacctgcaagacaaacagatacaaccttgaaagccaaatgaaacagagggacagcattcagtaattctggggcgaggtatttagtcactggacgaacacttacctgatctttttgctgacgacagccatgacgagctcatgacaaagggcgctaagaaggaacgtcaggagagtagcctggttcctagacacctttcctgttgagagggaagaaaagtagacatgtcgaaggagaaaagtctaattgattgatcgaaatgaaaaagcaaaatcaatggggtgaatattctgtctttgctgaatatacatctcaaaacacttacatgaacaggcctgatcggaaaggacagagaacacaagaattcccaaatcataatgagaaatcacagttttgaaggtagcattcatgtgcattagcaagtgtcaagggacatacttgttccactgacgagcgaactgatcccaacttgtcgaattcctatacaaaagtataataaccaagccccgaggcgtcaagaaggtttggccgagataaacacagttgctaaagaaattgtttcggatgaaacaagagctaaccaccaatcctggtaaaattctctatcgctgaaactgtctcaaataagagggtgcacaaaaaatgtggatcagtgctaagatagcagatgcctgaactacagattcttatttaccaggtgagctctgcaaatccgttacagatacattcaaagatgatgaagaatattctgtaaacaacagaatgaagatagtaagtgattgaatcgggtttggaaccaggaagatataagacaacaggcttacagaatgtagtcgatcaccatgggaagcgccagatttatgtaactaatgataaaggaatccccaggtttgggaagttgaggcactgtaaacagacaaaataattgacaatcattcagaccagattctctgcatcttttgagaatggatactcactgatgtagtgttcggtgatcagataaatcagtgaaaaagttcccatagtggcaagcgtcttctctaaaatatagatcggccttaatctatatatggttaggaaagaaaggaagtatcgataagatttatcaatcaacaatttccaatataaatcaaaggatgatgagatctcgtactgagaggtcctagggtactccaattcgtacaccaaggtaggtacgagcaggtaatcggtaaaattccagtatgtcacgttcgccggccaaacgaccttctctactcctgtactgattaactccgccttttgcgcatccacgttgtgcgccagacccgaaatctgctgatctggatgagatgagagtggatgaacctgaggagctgatatgggttcaggtgatggctgtctagccggtgtgacatctccggagcaagatgtcgtcgaaggcgcacgagaagactcaacagccggggaatcagtgccgttgctttgaactcgtagacgttgtcgaagcgctgccgccatctgaagactggaagtttcctgttgagtaggctcaagcttaggcgtgccaatttgaggtgatgattcaccagtggtaggtacagttataccatcatcatcatcggtagtagtcgtcgcgattgctgcgttccgttcggcttccaatctccgttcttggacactacgagcttcagcatagactgcttcggatccacctgggtatgctgcaactgcttccgaaagatcgatttctgtctgatgaagggaggcccgaacgttacatagatagccgttatgggcgatgtctacaatgaaatgaagagtgtatctgtgagctgacgtcatgcatctaccctagttcccagagagcgctggtttaagttggacttgcatgaatggatcttcatcatcatacttaggcagtgtaaggtcaaaaacccggactgtacccaataccaattcctgttgagaagtgatgcgcaagatcagcaatttgatatgaatgtcgacgacattcacacgtgacagttttcgaacactgacctatgaaacgtccaccgaaccgtaatccctgatataaagaaaaagagaataaacaatgtcggttgaagcatgaatctgtttgttcgagatatataagagaagaacgcacctagataaatggcttgacagatatgctgaaacgctatagttggccaaccatatttccaccagcctctcttcatcccttgtaccaatgggacgcatagatagctcgcaccaacgaggatagcatcactgactgcaagtatcagtgcgtcgccagagatgagcttgaagaacgagccggaaagaaagtatccagtttgctcgtacgacctaatgactgtctgacaaaacaggaggaacaaaccgatccagaagagggtataaaaccctcggaacggatccgtttgggaagaggtgttgcccagatcaaagtgagatgttcgaggagtgaaagatatctatttggaaagaaggtcagacatgacggagatctagatgtcagaaaaaatcaacacggtgcttgaacgaaacatatgccgcgaatgattctaaccagggctttcaagttcttttgacctctggatttgaaaggttgtatgcggatggtaccctcatcagtgacgatagtcgatcctttgttgctgatactgctcatagcatatcaatttataatgtgaaacttgtcagccgtgtttcacgatgtctggaagaagaagctcagaaaagacagaatcgaaagagaagaaaacgcacctggccgttgtcacgtcgattgtctttttctctcccttgccgatggaaagattcaacggagtgctcgactcgggaatacttatgactcttgaagagggagcagaacccatagccgcagggctgaatgcggggtttccgaggaaaacaaagtgatacagcacatatcatcgatgtgtcaacccttgcgcattgacgaaggaaatagaagaagccgagcaaggaacacaactagcttgacaagcaaaaagaatatgagaaacaggtactatcactcactgaggtggctgcatgttgaattcacagtccaaaaaagatggtcaccgcttttgaacgatgttgatggtgacggtgatggtgaggacgttactggtgatggtcagttaatctaggggaaagtttaggaattcctctgggcgagatgacgcgtcagattccggaggtggacagggatgactaagcttttccggcctcgctcggacggaagcacacactctgatatagcaacgccatcacataatatttgagggtgcaacgccgaaagatctgcatactgttctcttagtcaagactgttcgagtactagtatgaatggtcatcgtctacatcatattcattttattctgtgtcccattcatccgactcgtccgactcatgccagtactccatatatccgtctagatcgtgcgtcgattcttcctcgtctgccgaaaggatgatgttatgtcgatatgagcagaattgaaatgccggttgtgtcgacagatacatcgcctccggatcgatcacacctaacctgcatgagtccagaaaccgctctgccagaagaggatcgtcctcgatcgcttctccaagcaagaccgacccttttggagggttaccactccgagggaatcctgatagagggaatcctccgaaatccttcagttttgcaaactgccagtccttccgctcggatcctgaaagatcttttcgaatccggggcgcaacagctaatgaagatagttcaggcagcgccctggataacgaacgcagatcagagtagccttgactcgggacaaaaatcgccaagattttcagtttggttagattcacctcaatggttcgcagtaattcctgggagaatttaagctgagagtgatagatctgcaaatcagagagttgggtccattttggtacaagacgagcaaataatgtactataagtactgttgaatgtgtcgtctctcggacaacacctcgttttgtccagaatccgaaattgttcgaggcgggggaatttatcatccaacgtactctccagcagtcggacatccatcgtactcgaccgaaagtttggtctgatcagggtgatagatgtcaacgtattcggcatgagaccgaggatgcttgctatgtcctcgcatccggggtctttgatcgagattgatcgcacggagggaagagtaaacggttcggatttagtggcacttccagatatctctaagggaggacattggaattggatcacaggtgcctcgatctcgagtgagcgcagtgatgtgaagtctatcaactcgacaaaaccaccaagcaacaacggggtcgctgtatcgttgccagcgcggatagcaagagtatgtaggctacgagagagcggcttgagaagtttcaaaaacgatctaacgatgctcgtgacgacataatgcactcagctgatgtctacataggtttgagaccttgaaagaaaagaaaagcgcacatgaacttacgatgatgacctggggccgactgcaatgtctaactcagttatcgtcgagcagttctgagcgatgaaattgatagccgtaaagcttatcatcgaatggtcttggaaaagaaagaaaaaaacacaaagaagttcactgatcaaaaatgagcgttcgtatgcataggaagaacctacaagaacaaaggacaatacgaacagtgatcaaaaccccattcaaggtctgtttcattctcgtcatattcaatgacatcttctaacttctcattgttcaagtctagcaagactctcttcattttgggactacatgctggggctaacttcaataagatgtcatcattaattctaggttcacacctgtacacaaggaacaaaaaaaaggataaaacaacccaatattaggtctgataagcacagcacgtacattagagatagaaatcttgtcttactctagaatttcaaggttgggaaactgtatggagctcagcatggtaggacatgggctaaatagctcatacagtcgaagatgcttgatccacgatgcgtatcgctgcaccttctcgagatcttctcgagtaggaagccttgtaaaaattgcctgttctcgaatgccggtcaatcagctctttgatgcatacaacgatcaaagaaagtagtgggctttcttaccctctgagccaagacagagtcagagttttgcccctcaaagagtccaaaaccgaatgcgtgctcttgaagtgctccagatttcagaatgtcgacgacttcaagttgcacccagttcaggatcttgatcgcatgtcagaatatcgtaatcttacttgaccaaggcgagcaaaaaagtatgtagggaacatacgctgagaatacttgatcggtctattaccccatagagctgtcaaggccaggggagaccagtgcttacacactcgagcacatgtggcaagagtatcaggatctgcgagatcaaatatgttgaccagctgaatttgaccagaaagttttgtagaacgggcaataatcgaggacgatacagagaaagatcaaaagataaattcatcactttaacaggacgtgcatgatgtagatggtagaagctcgctgagctttatcagatgtacgtaccaactcgggaatgttcaatggagaatttggtatcgtatggtccatacttgagggtgtactcatagtcttgaacgaatgtatctgtgtgagttctgtgtgattgtgggtgcatatctgccatgaagggatgagacgaaacgatatgacgagtgttgaatgtgaaacaaggtttccatctgtgctactatcacccaaacaaccaacttttctttctaccatcgtgcagcgggatagaaaactcataccatggcacctcaaaatctaattgatggtgatgatgaagacgatcccttccaagatatcattcagtcgaaatcgaatcccaatgctcaggtttgtctcatcatgtttcatcctgcttcttcatcttgttgcttgcatacacgcgtcgctgaagctcgaaatgccgtttctgttgaacctcttccctatagcactcagatcccttctcggaccctaaacatccttttgggggtggagacgtggagaggaacgacagacgtttagagtgagtggcgattacgtttcaagttggatagaatgaaatcctctttcgttatacaaagttaacgatgcttatacttgctctgatcgatcatcatccttactcagtccgttcttgtaagatattctcctcgcctcttgcttctgaatatataaacacgcatgctgacatgatcaccctcgtctggtctgaattctcagtgatgatgaagacgatgatccctatcaaccctcggcctcacctctctctttcaacataaatccctcgggctatctagctcccgctcctacgtcctcaggtcgttttggaacgaatctgccatccaaatctatcgaatcagaccttcctctcgcacgatcagccgctcctattgcaggggcacccaattctcatgcttctgacgagcaagactaccattttagcgaccgaccagtctcgggcagatcgtccagacggcggaaatggattccagaggttgacctgggcaattgggacatcaggtcgttatggggaaacgggccaggaagagtcgtcgaaggagaaacgagaaggatcaccctcaacgatgaggcgagtaacgcagtcgggaacaatggaagtcggtttgagaggaacagcgtgagcacaggaaaatacaacgtcttcactttcttgttcttgttcttgtacggtaagtctatcttcttgatgaatcatgctaagacattaacaaaaagcaggctctcgtatttaattctcgatgttctccatttcatacttcgtcactcgacaatatagaacaattctcgaaagcggccaacctgttctttctgttcaccggtgcgcggtcgttgtttatgcaacattccgagtgtagatataaattgatcatctttcttttctaatggtgcagcttgtattcaacaagtgccaggcgtctcccctactggtcactataccactatccttcctctcggcgttgtcttgattgcatctgccttcaaagaagccaaagaagatttagtctgtcttcgcctcgaatcattcatcattatgccgatttaaggatactgactaattccttttctcacacatttagaaacgacacgccatggaccggtcactcaattcgcgcttaacaaaaattcttgctggaaccacttttgtgccattgtcctggaaaaatatcaaagtcggggatatcatccggcttgaaaaagacgacttcatcccggctgattgcatcctgatcagctcgagtgaaccggaaggtctctgttatgtcgagacaagtaatctagatgggtgagtcccctttcctcactactattgatacgatttttgctgatgaaacatcttcatttctgttttaccttttttcgttccagagagacaaatttgaaaatcaaacaggccaatccgtctctttctagcttgaccagtccttctttggtcgcctcgatcaaagggcatgtactatccgaagctcccaatgcgtcactctacacctacaccggttcaatgcatctcaaccagccccttcaacatccgcccggtcggcaatcatcgacaacgattcctcttgggccggatcagatgctattgagaggagcacaattgagaaatactgcctgggtctatggtttagttgtggttggaggaaaagaaacgaaagtgatgagaaacgcaacgttcgtccccttcacctcttctatagcgatgtgtcccgaatcagcagctatggtcctcatttattgtctttctggtgacatcagtgcacctcccatcaagagaactgctgtggagaggcaggtcaataaacaaatcttctttttgttcattgctctgatcgcgctgtctctagcttctaccatcggaagtagtgtccgatcagttcgtgcttgtctccattattgtcttccgttcttcgcctctggcagcgatgtttgttgactctggtatgctttaatggtttaatggagtacagtggattttttcgagcaaacagtggtacttggctggaaactacacaggaaacaaaagtatgtgcttgccacatttggtatgttttgtcccgtttcataattagacactgactggacctcttcaatatctttacaatctcaccagtcagacaattcatcgaaggtaagacaacatgtgaattcatttgagagtagaccaacagctgatctctatatatcaatcctgaatattcagatatcctgacctttatcatcttgtacaacaatctgattccaatctcgtgagttctggtaccccgccgcctgctcgtttcattctgactaacgtctttcggtctcttctgacgaaagactcatcgtcaccatcgaagtggttcggtatcaacaagctcaactgataaactctgatctcgacatgtgagttcgagttgttgttgaaacctgtgttgaagaattcgctgtagctcatgaattatctataggtactatgcgaaaaccgatactcccgctgtgtgccgcacatcctctcttgtcgaggagctaggccagattgagtacatattttcagacaagaccggtaccttgacctgtaacgagatggaatttcaacagtgtagtattgctggagttgagtacgccgaagtcgtagaggattccaagcgaggcgaacgaggtccagatggcggctataccaatgggcaacagactttcgatgaactccgtcgtcggttggctcagcgcgatggcgaaaatgcagagatcatcaacgagttcgtcactttgttggcggtatgccacaccgtaattccagaggtcaaggacgagaaagtcatctaccaggccagcagtccggacgaagctgccttggtttctggagctgagttattaggatttcaattccacgtacgcctctttgaccttcttgcttgcacagaagaaatctgcaaagctcacctgatcctcgatatggatcatagactagaaaaccgaaatctatcttcattgatgctcttggagaaactttagagtatcaaattctcaatgtctgcgagttcaactccactcgaaagagaatgtcgaccatagttcgagaccctcgtggtcggatcaaactcttctgcaaaggtgcggatactgtgattttcgagagactctctacctcgggaacacccttcctcgatactactttgacgcatcttgaagtaagacctatttcacacgtgtcatacaaacaaccggaatgactctgtctgacatttaggtttatcatgcttaggactatgcgacggaaggtttgcgaactctctgcttggcatctcgagatatttcctctgaggaatatcgagaatggtctcagatgtatgataaagcagcatctcagattgttggccgaggagaggctttggatagtgtagctgaattgattgagagggatttgaacctgttgggagccacggccattgaggacaagcttcaagagggtgtcccggagacgatccatacccttcagcaatgcggaattaaggttaacatatcttcaaaactacaaacgtcaaccgcttctttcactgatctggttgttcaaatatgtgcaggtttgggtcttgactggagatcgacaagagactgctatcaacattggtctctcctgtcggttgattacggaatcaatggacttggtgtgtaccctatctggtctgatcagtcgtagagtcgttccggtcactaatctgaagttttatgtcgcaggtcatcatcaatgaggaaacagccatggaaactcaggaattcatcatcaaacgacttcaggctatcaagaatcagcgaagtacaggagatatggaggatctcgccttggtgattggtgagaatatgttcttcttacgaattggaatgttccgtttgaaagtaacatggcttgctcttgtacagatggaaagagcttgacgtttgccttggagaaggagatttcaaggacctttttggagctcgcaatgatgtgcaaggtgtgtccaattcttatctttgcacatataggcactgtgacttacgaagcgtctgtttgtatgcgtattgtaggcggttgtttgctgttagttgtatctacaatcaaagttatattgcatgcaacgccggctgatgccatttgtaatcttttcacaggccgcgtctcaccactccaaaaggcgcttgtagtaaagcttgtcaagacgaacacatcttccatcttacttgctatcggagacggcgccaacgacgtacccatgatccaagctgctcatatcggtgttggtatctctggtttagaagtcagttatgcttcttctgtcaaaatcaaaatcctttgagacttgcctaattgagtattacttgtcgtgcgttgaacagggtttgcaagccgctcgttcgtctgatgtggctatctcacagtttagatacctcaaaaaactcctgcttgtacatggctcttggagttatcagcgtctttccaaattgattctctgtacgttcctgtctggttgacttctaaaacacgatgcctgtttcaataactgacaagctaactcacgaatgccatttaaagtctcattctacaagaacatcgtgctttacatcacccagttctatgtgagtttaaaccttgatctttggctcaataaaattcccttgtttacatatctacctggctggatgttctgctttacagtattcgttcttcaacaacttttctggacaaattgcgtatgagggctggactctgtctttctacaacgttctcttcactttattgccacctttggtcatcggtattttcgatcagtttgtgagtgcacgaatgttggatcgataccctcaactctaccggttgggacaaagcaattatttcttctcggcaaagtctttctggatgtggatcatcaacgctatctaccacagcttggtaagccttgattctatgctagtcgtaaggtattagctaagtgttcacaacgaatgtgtttcatgatttcacttcacagctgctgtttatactctccttgcttgtcttttggggcggtttgatcgctggagatggaaaggacaacggccactgggtttggggtactacgttgtatctagctgtgctgctgacggtgcttgggaaagcagctctggtttcagagtacgcatgtccttttttgttttcttcttttattggtaatctgcgtgtggcaagctttttgacgcaaagttctgttgttccttacttccccccctttcaccagcctctggacaaaatacactcttgctggttagttcgacttgatgtagccaatatcgctgtcccgatcttaaaagttctgcttgtctgtgccttcgtccatcagctattccggggtcctttgtgttcaccatggtgttcctccctctgtacgcgcttattgcacctctaaccaacgtatcgctggattatgacggaatcgttccgagattatggggagatgggatcgtctatctttgccttcttcttttccctgtcatctgcctgagccgagactatgtgtggaagtagtaagtgaatgtttgttcatgttatgatcagaatgaaacgctaactttactatttgtaaatgtaccgtctgtgttctcaagctacgcgcgtacttacgatcctcaatcgtaccacatcgttcaagagatcgttagtcatgaccgatgtgagattacatgtcttcgtcaaaaacgctgacttttttcttcctattgaactacagcaaaaatacaacttgagcgactatcgtccaagagaagagcagtcagtccctttttctcctcgagaacttattgatccttttcctcaagctcgcgttccttttgctacttcaacagatttcaaaaggcaatcaaaaaggttcgagcgactcaacgattgcgacgaaacagagggttcgctttcagtcaatctgagggtggacctcaggatcaaactaagatgatcagagcctacgacacgactcaacaagtgagcttctcttctttctcttctccctcccgattgctcctatctttcgtctcgaaatgatgttatgaccaggtgttgacgttgatctatttcaatatcatccttgatggtatctgaaccaggctccatcggggttatgaggcatcgagatattttgtataggtggaggggatataagggtttgctcaaagttttccaagtgctatatgtctatcatctttgttttgttcttcttttcctatgcggatgtcgcaatcttctctcgacttgttcgtctcaatgaagacaaccgatgaacgtaaaaggataggcatgaggaacataaaaactgagaaggttgtaagaataagaaactgggtataaatctagaccatcagatgaaaagtacaagattggcggaacactcgtaagtgatatgaaggaatcggaatgataggacaaacaagcagagataaaaccgaaaaagaacagaggagaggagaagaaagtatggaggaagagaaaacataatgtccagagaaagttgcatggcaaaacgatttgtatatattaaatatatatgtgtgttctgtccggttaaatcaaaattgacaaaccccacaactcgtcactgtcgttgtcgagtttccttttactgtagtcgtcgtgaccgatcccgttaattttgttcccgacacgtcgcatatcgacaacgccccactgccacaaagatcgctcggaagctggcccgcaagaccagtattatccttcatagacaaactttggattgatgttgggaaggaagttggaatagtcgtcagggaattagaagacagcaggagagtgcggacagaaggaaggatagttgacagggaggagggaaggacggaaagtgaattgaaagatagatcaaggtatgcaagagatgatggaagattcgtgatttggtctccgctcaacgcttgacctgtagcgattctacaattcgcaaaagtaaatcaaatgtggaatacgatatcagaatcttggctcaacaaaatgaaaaagggactaaggcttacaaagaggtcaaattgagagctcccaaaccagtgggcaagctacccccaagtccctggttgtcgatcagagtcaaactcttgagtacaccggtttgaccaaaggcagtgttgggaattgcctggtcgagcgcggtggatgtcaaggagagagaggttaggttggagagcgcgtaaatggatgacggaagggagcccgctgtttacgtgtcgtgtcagaatttgaatggtaaattgaatatgggtcaacaatgctgtattcaaaattgaaaggcagcaaagatctctgacgtacagggaatggaggcaaccgtattcccagtaatcgtcaacgtttggagagtcacgatattccccaaagagcttggaatgacagacggaacagctgggtaggtcaagtttctataagaacgaaagaaatattaaccaggacagaccacttagcaatgaaaaggacagagaaagggaacgagaagggacgaacaattgaactaatcgtccgtcctcatcacaattgactccttgccagccttcacatacagcaccatttccactcgagggaaaccaaccttgcgatcccagggctccaccaacgacatcagttgtcgccccagttgagtctctggtcgtagcttcgaagatggagcgaaggacacaccactggagggcttttcctacgcctgatgttccagtattggagacaaaatcgttcgaggcggttgataggaacggatagcaatcggagcaatatgttgtttggttcgacggaggaaaggaggagagacaggtctgaaggttgatcactggtgcggctgaggcactgggtgcggaggatgagctagaggttgaggttgaagatgaggatgaggtcgaactcggtttgacagatcctgaagaagtaagagattgcgttgagattccggtggaaggtgaagcgatagtagcagtggaggtggaagtgagggtggaaaggtatgatacggtcccggagacaacgacggatgtgattgtttggatggatgcaggtgcaacggaaagatcggaagtgctcgacttgggtttcaatagaaaatacaagagtagggcaagccctacgataaacgcgataacaatcaagacgagaacaatcttttattttgtttttgaggaaaacgaaggacaattgaggtcagtaaccgaaaaccggagttgaacaaaagagggcaagatataagcggaaagcagtaatcaccattcttcttctatcatctcctcgcttctgctttggatccctatttctttgcttgccgctcatgattccgcaggtatccatgatcgcattcgtccagctcttcttctcaactcggagaggactccactctcgaagacctacgttatgccaatccgcgttctcctcatcttcatttgacccttttctctcggtatcataatcaaccattctttgccaggcctcttggttctctctgtctttctccattcggtttagctccttgtcgacccgtttttgagctttccacatgtctctatcctgaaggatccccagatgcgtagacagcctagcaatcacagaccgaggtgtttccttatgaccttgcgccctcgttgataaggaggcaggcgtgctgagcgccgatccgtacgatctgaactgcggagattgcctttgacgaaaccgagcggcctctggtgaaggtgtgaatgataggactggcatatcatctctgggcatggactgaagtttgtgaatcaatgtgaaatccaacgggggtggtcttgagctgaggttcgtagcagatggcgaacgttcgttccgaggcgtcgagagagattgatgggagttttccggccgaagaaaagagggcagactggggacaggagggagttcatctacacagccagcagcacagggagtctccggatatacagatacaggagagtatgttgtggttatcgtggtagtgacacttgaagtggactgtctcgagtgatcgttcgtaccatacgaggggatcagctgaggacttccgatgattggtctcaccctagaaggcatagcgaatattcgaaatgagaaagaggaaagagtttgatgaacaagaatgacgaggttggttcaagcctcttcctttggtcagtcttcgacaaatatacacaacaggaagagagagaagacgaaaaggtgaggaaagataaaagaagaagaaagcaaaggtgggttagaataaaagaatcattcatccagaacaacgattgagatgtgagtgtttatcaagcgagaaccaaagggatctcatcaggtcagcttcagctggatccccatcaaagggattccattcaaaacaggcaaagaaacaaagtcggatggaaggtgagaacaaaagaaacgaaagaaaggcgagaaccgaacaaaaggttgttgtaccccgtgtttcagatcttacaaggctgtgtagtctcacgtgatcgttcacacactctcgtaaccaccttctatctcgtatgctcaggatcagcttgagtctcatcccatcagcatctatcgggcttcctcaactgccattcacttgtcttcgttatgtctgtttcaatccccatccttgtaagtgctgcagcttggatattcttgggctttgatcggcttacttggaggctgatggctagttttgtaacttgtcgatgtatcgataaatcgttgtctcactctcttctttcatcttgttcaggacaagtccgacccgaaggagaacatcgcagctgtccctttccatatgccccagcaggatcctttttggactggctcaccagattatctctcaacactggctatgtctatggctggaggagctatgttcgtatatcgtcatgtgttcttcttctttctcgtcggataatgtggtgttgttgcaagcgattccctcgactaacaatcgtggctcaccatcctttcctcattcttgctgtaggttcaccaagaaccggtacttcgcctggccagccttcttcttgtcctccactgcatacctcaatgcgacacctcttcgagcgaccgaaacttcctctggtagctcacttcaaggattagggtacggtttcatctattcttgctcttctgctcctgctttaatctattggccgtctgttgtataactagaattctacttcagaaatcacacaatctgacaatcatcctccttttgttcctttttcaatgttgtttcgccgttgaccgaccttcagatttgcaattgtcggtctcctttcggtctaccttcccactcttgtccttctccccgatggaccatccaaagctcctgctgtttagatacgccaaagaacgtgaaagaccaggcacagtgtcggatttatcacaaaaaaaaaggatcgttcatctacccatttctgtttctttcaataccttctccagttcttttcctcgttaccctctccgttctcctttcggctttcgggttgtacgcatatatcttctttaatcaaatccatgacaatttggaactagttttttgcacgctcgctcgcatctctcatgaaccttccgacctgaggcaaaaccagtcatttcatctctcgagagaaaactttcctcaactctggaagctcgatcagaaatctaacatggatccagcaaagaacaacagccaaaaaagaaaatcgaactagaagagaacgtagagcaaagttaagacaacagatgcgctgaagaaaataaatatatcatcccaaagatgagaaagaaggaaaagatcaaatcggaagaaaaggggtgaatgaaagctgaagagaaagaatacaggaagagtttttccatcacgcaacgatactcaacctatattaaacctcctcaaacccatcctcctcgtccccgtgtccgtacatgttgaaagatctaaactcgtcttcctccccccctcctgcgccgtccgaagccagctgcgtttttcttttcactcgggcatgatcgtctcctccatctgattcatcgtctgatacatcaggtcggattcgttttgggccgttttgtttctgtgagaaaaaaaggaataagtacgataagaatagggaaaggggaacagaagagaagacagatggaaaaagggaacgtacaggatcgtctacttcttcgaagacggattcaaagacaatatctccaggctctagatgaccacggagagttaaccaatagagtttatcaatccgaacttatgttgctcgcaaacaaaaaggaaagaaaaacaaattagaaacaaagcttacggtctgtcttgtccacttcatacaccttcccgccatcgttcacacccagaacggcctcgatctccatcggctgctcactctctctcaactgtcgttcactcattcgctgagggagatcttcattatcaaatagcgcatcgaaagctttgtaattgatctttcgagaaaactttcgttgtacaaggttcttggcagagtcggcggctgtcgcacctcgttccgatccaggaattttctttttccgaggctagaataagatgagggaaacaagatgaggtttggtgcaaaataacaggattgatagctcaaccgagacgcaaaaagaggtaccaactttgcgaactgtagaaccggccgcatcggtgagtactttggattctttcactgatcgagacagaattcatcaatagaatcaaatcagttaaaaagaacgcgttgtgcaaataaagtgctttaaaaaaggcatcgaaacagattgaactcacgagctaacttctccagataatctttgttgaattcaacccaaagtctagtcttgatcgttgcttcttcgtctgtcagaatgaactgatcaagctcgtcatcatccaatccatctaaatcaagctctccactctcggcggctcgtcgttcggccgcttttcgctcgctctcattcaattcggttgtcagttgaatgccctggttagaatccaaataggatgtcacctcatgcgcaatgatcgggtcgaacgtttcgtctgtcttatcgaatccgccgatggacgagcctggagtcgagggtatgtcctccccgcctggagtccaagggtcatccgtcttgttagaatccagagggagagactctagatgtgtgaatgatggagcgggagaaggggatgggtagttagatagtgaagggaggaactgggatgttgccgaaggtgtctcgctagattgccggctaaatgaggaaggcacaggggtgacacttgatcgacccccgcgttcaccttcggccacacctttaccttttccactgccattactgctatggccggcaccgtttgttgtcagaggaggaggcatcagagaagtttctctgattaatctcttatcgtcactgtctccgaactcgctcccatcttcagtctctccatcggccgacagtagatgagccttcttctttttcaacccttttgtatacgccggtggatctgcgccttcctccagccaagtcgtccggaacgcctcaatcgtcagctctgaggaagctgtgccctgaaactcttcaagccgtttccggagtgttgtatctgcaatcttcacgacttgaactatttcctccacacttcgtctaaaattattcattcgcgcggccaacagaagacaagcaccacaaatcccggccggtcgtcgaccagtatccatccagtctcgtttgaaccgttggaccagacggacagcatcggtcgcgactttctgagtttcatctccgaactcaaggagggaagcgaatcgtgaaatgtagagtgagggatccataaccggcagatgcaaattgagagccttgaccaatcgaagatagacggcacctgagaacgtgaaacaagtccaaacttgtctttagcgtcggacccatgactcagataaactcgccttcattctaccaagttcttacctaggttgaagacgttgacctaatatcgagaagaatagaataggttgaacgtcagaagagcaaacgtgaaccaagtatgggaaaatgcaggtgaaaacaagtgcgcacctggaggagatcgctgaaatcgatgagcatatgatgcgtcttttgcattcgacaggtcacatacagacaacaagccacaacatgtcctgtctttcggcctttggtaaagttggtcgacacggctaggttgaaccaccggatggcagcgtctgaaattcgttcggacagcttgagaccttgggcaacctgtttgattcgaatccggcctgaattgagagggagaaaacacgtgagcacgattgccggaaagagcgaggaggtgaataatcagagaaagggtaggagcaacggatggggaacctttactgaccattgtagagcgtattctctctagactcttgagagcctcctccgcgttgaccgccaggcccttggactcgtgctcgaactgatgggagaacgagaggagaaacgtcaagtcaacaatcggagctcatcatacttgtttattgagatcagctgtttcagatcaggctagaaaaatcagaatagaaatgcacgaaccagcgtcggctcccacgtaactaccctgaaggacggcagctcccgagctagattctccgaatgtgacctcggacacaatcgtgttctcttcgaggacgataccacatcctgcacaataagtttgaccctgtgcttggtcgatctcgaccacggtggacagacaagcagcgcactttggctaaagagagacaacgagagagggcaaagaaagaatcgcgtcggtacggcgtggattgccagagaaaggagacttgcaacagatgcctatagcgaataggagaatgctcaccatatctgctaatacaaatgtctgtgtatatatgtgaaagcgttgctctttcttctcttcttatatagaaagaacctagggatgtatgtgtgctcactagcaagagcggatgagggttgagaggagagaagagaaagagaagaacagtaccaagccgtgcgaattgtaaatgtggcgtgtctcattacaaaagagactacagaaacgtgtagctaatttgacagtaatcttcagagtcacgtgattacattctagcacagcctcaaccctatccttgcctcgccttacatctcgctctttgatctgctcattgcgtcgcttcttccatctactacaaacaccagcatcgatctacaacactcatggcatctgtcttcacagccggcttggttcaagccaaggcaactgtgtctaccggcgaggtagatgatacgcagctggtgtcaaaggccgaacaggcagcttccatagctccaggtcggacttcgcacctcgagacgacatcatcagagcaacaacaatcacacctgccgtcaaacgaagaagtgggtccttatcaaattctgcttgagattcgtgtatcaacatgtctgtctgaccataactcgagtataacagatctccatccattcagcagcccaaagaggcgacgttcagaccatggaccggcttgtcaaatccggtaaagctagtgtgaatgagcgagacgaccaaaacgtcacttcattacattgggcagcgtgcgtacaattgtgctatcatgaaaaattcaattagccgaaatcttaagccactaactggttgcgtttttccctcctctcaggatcaacgcacaggtaaatccacttgcatcgtgttcatatcgagtatcaaacgcgagagcaagcgctgatcaggtctttctatatagcttggagtgtgtagatacttactcgaaaatggagcggatgttgacccgataggcggagatttactggctacccctctccagtgggctgcccggtatgttatcactattcagtgcaaaactgtgacacgggagactaattattataaaccctctctc

SEQ ID NO: 364 - DNA, 44357 bp, Xanthophyllomyces dendrorhous
ctcattgttcatcatcatattgctggtagaaacggacatctttatgttctccacctgctaatttcttacggagcggatcccgcgctttcagattcccaaggatttaatacacttcacctcgtcacccattcaagcatggtcggttgtatcatctctatcacaagccagggcacctgacaaattactcattcttgttcgagcacatcgttcgatacaggtcatgccgcttcttttcattttacatcagccgttggcagttgatgccaaagattctgatggacacaccgcgctaatgtgggccgcttatcaaggtatgccttcatcgcgcgtcaattagagatacttgtcctcgtttctgtttcatgtatatgtgtgtgtatttttggaagcatctctcaagatcatctccctctcgcgtcttcttatttttacaggcgatgcaatttcagtcgatcttcttctccggcattccgcctctccgttaaccaaagacaacaacgggctgagcccacttcactgggccgtagtcaagggtaacaaagtgtgtataaaacgattggtagaggcgggcgctgatgtggacgcgaaggatgagcaggggaaaacgccgagagacatggcggttgagttgaaaagtataggcgcatggaaggtgggattggaagaggcaggtagagaggagagtggaatcttgaagcaaaagagatttagtctggttggtagctttatctttcgtcgtcaatcgcgtcgttggctttcatacctaacacacttgtgctatttcattgatggtcgcaaactgtagcgcactacacggatagtcatcttcctccttcctctattgtttttctggttgatagctggcacggtttcgatatcgccctggtatctcggcttcccgttgtcaatagcagagttctactcgatgcactacgtacgtaaaaatctctcttcgcccatgagcttacaccgttatgctgtgactccgtttctcggattgaactatcaatgttgattgagtgtttcgctttgaaactttagttgatcaccaaaacagtattagactaccgaggatttggagactcattagccaaatcgccctactttgcttcaataagtaagtcgttctcaacgagttaatgcgcggtttgccatcaagtattgatcatacgatatccatctaaagtcacgagtagcatattctatgttggacaatgctgggtgtcgaggatagtgactggtacgatgaccttgtaccctctctgatccgtggaattctttcatatcaacatgcttcttgtacagcgcgatcactgaacaatttcttctcgttcttgactgtcttcttaaataggtgtcccgggtcacgagattcttaatctcctcttctttgtggcatacattctttgcgcgtacaacttctaccgggcaattagtttagacccgggaaccacgccccaactagaaagtgatgcggagattaaggaggtccgtctggattgatttcccgtcgtctccagaattgttgtttgttgcttgaataactgccgctgaatgctgatgtgacataactttcttctggttggacctctctattgatcaggttgtcgaggaattgactaatcaaggcaaatttaacggaaccaacttttgcataatctgcatggtatgctctgtcaattttcattgttgcgttccacgtcaatacgaggttgatctggcattaagcacggctgacagaattccatcactctgcatacttaggcacgcaagccactccgatcgaaacacgatcgaatcacagatcgatgtatagccagatttgaccagtcagtccttcctttactcgtccttttcttcctgactgaatcttcagctatttgattaacttttattgcactcacggctgttgaaccttactgaaaatgtagttactgcccttggatttggaatgctggttagtctgtgacattaacacttggccatgaagccagaatccttagtctaaccgactttcttcgttttcaatctaccgttctagttggatcgaacaaccaccggcaattcttgctgtttgtaatctttctcgtatgcggaatctcgtctttcatcttgttgtctttctactgtatgttcccaatacttttaacctcccacgtctctaagatggtcatctcctcaaaattttggtttgaaacttgaatgacgatcagacttcatggagaattctccgacctggacacccgagaccggtgctccttgtgtccttccttccgtgctttgcaccgccactggatatgattcctaccttgccctcgttaccttttgggcgatgctacaactgtcgtggacgattatcctccttgtctcgcaagtctggcaagtctcgaggcaaatgacaacacttgaggtaacaaacctaggcaggtacggtttcatgggcggtcgaggcggcagttcgctgcgagatcaaagtggagctgtaggcgttggattagggggtaggacgggcggaccagaaggattaggtggacctggagatcttggaatgggaatcgatcctacaggagttgatgaacccacggtttcaggtgaagagacaggagatgggtcaacactccctcatgttcatgcccatgcacacgggcacgcgcatgggcatcggcatggtatcctaggctgtatgggaggaggctggaggttcatgctccagattttaggtctggataggttcactaagggaaaagcggcgaaaggattaaggatggcaggcagggacgctaacccattcgaccagggaatcataggggtttgtctccattctctcggtcgaacatactcttttttccttccgaactcatacccatttatatttttatattctgcttcgtccaccgtgtacctaccttcggtctgttctttgataatgataaacaacaataaaaaatcaaacagaactgcatggatttctggacagtcggagggacgctaggagttgattacagacaattatatgatattccgcttggaggattttcttcgtgagcgcttcatcattcaaaaaagtctgactgccgtgacactgtcaaactaatgtcatgcaattttcgatatcagacaaagacaaagacaacaaagttatattcagatgattcttcctaatctaggtggatcaacaagtggagaatctagtcaacgacctgggtacgaacttgtcaggtccagcgaggaagtttgagtttgagtcttgagaggtgttccgatgtcttcttgttcatctcatttgaggtgggcgaccgaatagataaatgtgatttctcatcattcgtgatttctgaacacatcgtcttgctccagaaaggcatgaatgtctctttctcaacattcctcttttctttccttgtatgacgcgtagtttgttcagatatctacgaaagacgaactacacgggtattatcctcccggctacctgcaaggaggatgaacatatacatatatagttttatttcagtagccagagagaaggtctagaatgagcttgtaagaagtcgttggcacgagcgcatgcttgaatgcatatgtacgactacagatgcggatatgtgtgtttgttcgagtacgtgtttctgaaggctatacatctacatgcgcgctcgaaagtgggaacacagcagaggagaacgaagaaggatcaaagatgtttctttgcagaggcacgtactttcccatcaaatactgggttgtcgatcgtcgtgttcgatgtatggaacgggttcaatacgatctgtttcggatattgttcggaaggagaaaatcacataaatcagttcttgatcatcctcgtttgttcatcaagtacaagtctagaggaagaatataccttcacgtaagcctcccagacttcaagaaagaacaatctaataccttcatcgttcttttgctcgtgaagaaggataaatttgactagaaggtgcgatgcaatcataagtttagtacatacagatggagtgcaagctgagaacgtactgtttggtgctacaaaagcagaaacggtccattcattatatcgatcgatattcttgtaatacctttgtgggtcaattcaaaaatatggtaaagaatggaacaagcaagatagaagacttgtcaaaatctaccttttctataactcctttcttgaaaggctttgagataatgtacgaacatgcttcctccacccatcgcgttctcaatcaggtccaaactactgtgcgcaaccatttgcctgagatgaccatcgtcatacccaccctgaccagtgcccatctttctgccaagctccttaacaccagcaagactagcggcattggcaccaaaaggagaagtaatgggagagacagtagatgcttgagaggaccatgaggggaatgccgaagaggatggcaaggatgaagtagatgaattagtggacgaggttgggagaggtgaagatcggtttgatggaaaggtatgctccgagaggggattgtcaagtggtctaacgtcgagagaagattaaaaggtttggtttctaatactttcctgaatctcaaaacaactacacggtgaacgcttacccgacgaggacaagataggatgccatgactgcagattgatagttgaagactgatggatggaaggtacttatcatgttgtcggtcgagatggagaagtcaaggcagaaacaaagttagggttgcatatcacgtgagcgctggaaatacacctctttcaacattgacctcaagatcgaaagtacgaaggacatgaaaagacttcggacggtcgtctataggccgatcaaagaatacatggtttcccttggacactgatgaccaccgatctttcttcggatcgctcatatcttcattgtccttcaataccctcttgttcaacaaatagatgcgtccaagtgctttcttcattgagacttagatacgccactacacattgatcaatctcatttcgattctaaattatactcgtattttactcatcttctcttctcctttttatgcagactattcacaaggctggctcggaggattgctctcagattattttcaagaagccctttcacgattttgattcagtgtttgttctcatctttcattctgtttctctaaatgggaacaattgaatacctatactttccaaaagtcttggtgacttctcaaagtttacaagggctggaaggcatagtcctacatcgactgagtcgaaattatatatacgaatcttccgggagtatcatgcactgttcatagatctttcttacttgaagggatcgaactgagcgtaagctttcttgaaagcaactgcatctgccttttcctcagcatccgtctgagcacatgctttccagtctactcggtgtggaatctccaagagttttgcaagaacagttctgtatgatacataagtttagaaagaatattatttcagagtttggattggcgcaaaagcgatcaaaatgatgacatatagagaaaaatgcaggaaaagaaacgtaccggccaaactgtagattgaatccggtcccacgtatcaaatgaatgagttttccgtttgggaaatctaccctgaaatagctgtctctaccgcccgtcccgatagagttcaaggcgacatcggcgtcggactcaaaattgattcctagcttagctccttcttctctaaagacagattcgatctgtgaaacggctgtcaacggtaccgggacgatttgcagatgggcgtgccctccccttccgctgttgtatatcaaagcacaaattgacgatcagcaaccgctaacaaacaggttttctagatgtcaaaaagatggatatctccagacctaccccgatcgaccgacttcgaatacaactggcacagaattgtagaccttgtaacattttgcaagggccgccttggttttttcgatctccgactcgatcccaacagcatcctccttggggatggataacactgtaggataatgcgatatcggaataatctatcaaaacattctcatacaggtgagtccagcatcagagaatggcgacaaagtcgattcaggaagacggcgctagcaaattaaaagacaacttacaagaacgtggccacctccaggaactaggccaggctgttcagacccagcaggcatctcgggcaaaccagtgaccttgttttggaccatttttgtagcggatgccgtaggagggagctggcctttaggaagggtgacgtaagtttccgtgccgatggagacaatgaggtgttttctggagtcagatttgaaaagatgatcagtctcaatcttctctctctgataaagaggtaagtccactcacgttactttaggattactcaaacagactgtgaaaagtagaaatacaccaaatggaaaggaacacatgtcaattcgctatcaacgctcatgcagaagacaccgaatggaaaaggactcacaccagcactccgcgggactaagctcaggtcgcttaggaattcctgtgacagcaccactgttctgccgatcagcgctagaatcagagttgtttgtcttctgaggacagtcgcgaatgtagtgctattggtcacaatcgggataaaacaaataagaagtgtgatcagtcaacattccctttcacatggaatatattgtagacaaactcaccccaggcaacttgcatattcggcagacgtaattagcaggggggccatctgtaagagaaattcgacaggggatgttatcgatcttgtgtacttcatgtcaatttttataattcatactaacctccctgggtaacttgcttctcagcgttatgcgcgtcttttcgagggcaagcttgaatccaatgctgatataaagagtatgcgtttttagtgaatggattacatatgaaaaccaaacgaatgaaaggactcactccaggctcgttacagattctacatgtatagctaggcggaggaggaccctctgttcaaaatagagacaaaatcgatcagtatcatcacctaatcaattcgacgcctgcttcctgtatgatactttgtaacactaacctccgcgagctttctttccgcccggtccagactgtccccagatgaagttttcacccccttcaggtgcctctcttttcgtcccgcgtccagtagaagaaggtggtagcgcgaacgggttgggcgtcgcattggccggtttcacagggaaaggaggagccaaaggagctaacgaaaacgcgtagaaagactacatatcgaatgatagagtaagagttaaacatgtaattgtgagaacaaacatccggtacgaattgaacaggagaagaaagaacgtactctagcctttttctgtccgtcaagaggaggaggacccccaaaccttcccatcctgatacatctcgtatatctcccttctgagccagctccatcccacccgaacggctccctctcccagaatccgtcctctccatctctcccgcccatgaaaaacacatatctcggcttggctcttcggatgatttctactaacggtgtagctccttgcccgacattaaattccaacccgttgaacgagggtgagaggagagaaagtgatggtggaggagtttggaggagcaggatatccaatccggttggaacgatagctttttgagaagcaagtgttaagtttgaaccagtcaaggctgacggagcattggcctcgggaaagatgtgaggagaggccagaacaggagcaaggagggaaggagtgagattaactgtgctggtaggtgtaggctcagctgcttctgactcagctgcttcggacgaggagttggtcgcggcatcccaaagaacaggatcatagtttccaccgatagctccaatctttatcccttcagacgtattcaacacgttactctggcctttcagaaacccgaagcaatcaaaagtatcctcatcaaccctactatctttttgctaatcatctgaagaatcgaagggctcaccgacgaagaacaaattagtacatatctctcctcctgtttctataatcttcgcctgaaccttctcaggcagagcgtgtgaccccaacatgatgtatgttgtcaaagggactaccgatgttcaaaacttgtgtcagcttactatcaagcctggcttgtctgatttacgcgtcgattaagcaaggaaggatctcaaacacatatttcagtgatatgtaactcgcttaccgttcaggcttcctcttagaaggtcatccacctcatcagggttttctccttccgggccgaaaaagtcacctacgcacacacatagattaaaatggtgtttcgactggagagctcgttgcttctcgatgaaagctcgaagagatcctaaggctggaccaagggctagtctggaaaagggggggggacaaggcatgcacacaacatcagcttagataaaaaacatgttctttgaacaagacagaaatttgctgacatcttgttggacatcttggtgaacagacacgatctcgagatgattgatatgaaagaaagcagccagacaagtatcaatgagattttatgattagcccccgatctgcccaaacatcaaggctaatctggggtcaatctggggtcatcacaaagtccaacagctcatttcttacttgtttttgttaaggattaggtgatatgaaacaagccacttttataaaaaaaaatacaaggtcagagagacagagatgggaagagaaaacacaaagatattgaaggagactgggagatcgaggaaggacttgagtaaaagtaacaggagaaaactacagatgatgaagagaaaaccgtaacgagaacgctgtcaacagattcgttatatgaaaagctgagaaaaggaagcttgagaataggacgggcagaagagaacaacacatggaaggagaagtaacgatgagagaaaaagtaaaacaactagaaaagtagccagacgcgtaaagaagtagatgggcacatatagctatgatactaaaaaaacgcgatgcaagcaggttacttcttcgcgtatggattgacagcgtacaccttgataacggggggcgatttctcaatgtcggcagtaacaatgacctgcaagtgatagacaaagcccatatcagtatgggggttttgtccatgaaatcatcctccttggaaaaaacttactggaacggtcatcagctctttaatctcctgaatgtggtgctttccatccgacgacgttcgaagacctttgaacacaggtgcgtcttgggctaccgactttgattgttgaatggagtctgtgattgaaaatttcttatccttggcaacggactcctcagatgcttccgcttcatctttcggtacgttcttctcttcgtcgattttgccggaggactcgatctcggcttgagcatagtgatcaccaaacttcttgactttgttaaggtgctcgtcgtcgtcacctttgaacgatacaacaaacatggtatcatactgttagaattgagaaagcaatcaacatcaaatgaaagaaaactcacgttcagcgagatacgaaataacatcacctaaaattaagaaagcagtgataaagttaactagggccagaatgaagaaccaaaaaaggatgtataactcacgctcgctccagtacaactgtagggaagagttgtgttcttcgtacacgatattctgtaagagtagatgcatataaacatcacaatcagtggtgccattcaaacgcaagggattatgtcaaggaaaatatctacctcaagcggcatttggtcggcatgcactcgtttctcaattccaaactcagggatgaccacctgcaaagggaacgatgtcaggattatatgcttgacaagctacacttttgaatatatactactcacatcaaaggcttgatcaagaacattgacaacactagcgaacctaatgacaggaccatatcggatggtgagatcctgcaagaataagaactgagatcaggtttgaaagaacattgcgatccagaaaaaaagattggcacgaacgttgataagaagacatagataaagatgagtggactgctcttgggcgagctgagcggattccttcttcatgttacagttctgagccatcttggccacagtatctcggtccatttggaacttgctttcaatagctggaaaaaaccaaaaagacaacaacgacgtcagtatccaaaattcatatgaaatgcgctcgacagactcacgtccgtcctccaaacaggctgcaagctgccgatgagcaacgatgtcgacgtatcgtctacacgagccaatgatgataccaaactatttagtgcaaatcgaagcgatatgggagtgcaaatactttcttaccgaatgggactcgtctattggtggtataagcatgacgttcagtcagtgaagatcatcgaaagacataaaagaagcgagactgatgcgttcttacaaaatgggtatagagaggaacactcagcgcataatgagcgtactagaaagagaatatagaaacagaaacatgtatttagaacgagtttataacagatagtaagacgaggatggaacactcaccttagcgatatcgagcatacctacgatgagtttcactaaatttcagcacagatatcataacgacccataacgtcttgaaaagactgaccagaacagaaatatctagctttttgcatggcttttctagacatgagctccaaaagcttcttgatgttctcgtccttgatgtccaagaacgatctctcaagcgcaccactgctagtgacatctagctcgattccgaaacgcttggcccgtttagcgagaccttctagacgtctggcgagaggaatctcgtgccgacgaagaatggcctgctcagggaagtttgccgcaatcatggtagccaccgttgtgttggcgagaatcataaactagttggttgaaccatgtcagtcaacaatccaatcacgttatataacgatgtttccgacacaaatatatgtcacaaagcgaaacgacctacttcctgaacaagagagttggactctcgctgtgtgtacactgaacaatcaacaggcttgccatcatcatcaagcttgaaagtgagcttgagactgtttattccaagcgctccgttctttattcgtctatccaaaagcttcttggcgagattctaagaatgtaagagatataagatatgaggctcatgacgtgaaagcaagacaaacgtgtcgtttttgtacgtacttgcatgtttcggatgtctgtttcgatatcctcggccttgtgtccttctgaaatctctgcttcttccaaagattgctgctcgataaccctctgtgcctgcccataagaaagctttgcacatgatcttgaaagagagaatatatatcatcaaggtcagatgatattgacgttcaagaaaaacatcaaatggtaaacgtactttatgattgatttggcaaagctcgtcttgatgacacgtgcatcagaagtcatggtaaagaatgcggagaaagctagccgttcgacgccaggcaccaaactgcagagctcttccgagagaacaggcggaagcataggaactgctcgctgaacgaggtatacactagttgcacgttttcgtgcgtcacctatatatcaagatacctcacgtcaattatcgatcatactttcgggtaaaaacaaagagaagaaacttacgatcaagtgcagtgttgggtttgacctacatacaacgcgaacagaaccgcatctcagtacaaaagcaaccggatcaaatagagaaaagcgttggaactaacaaagtgtccaacgtcagcaatgtgaactccaacttcaaaggtgccgtcctcattagtcgagatggacagcgcgtcatctagatccttggccgtatcctaatgattattgatagggggagacaaagatgaatggtctgtgacaacatcgaactgtggacgataagacgtacaggatcaatcgtgaagatcctagactctcgaagatcttttcggacctcatattctctctcagggatagtctagacaggaggcgcgaacgtagtcagccatacctgtacagtgaatagaagcattgcgcagaaacttacccagggaagagggggaaggcacttgagaacgctctcggtgaaatcttctgttgggaaactatgtgaaagcaagaaacatttgacgaaactaagtataatgtttgatcagatcgaaaatcgtcaaattcatacgtacttgcagtccttgagcaatgcagaggtttccacttcaacctcgccaataggaccgatttcttccacaagggtaccaaagggatgaagagaactaaatgcatcatgtgagcccccatcaaatgcgatgtcaggatgagacgtgatttttatcaaagcagggatgaaaggagattgagaaaggaaagagaaaaaaagggggggggacgcacgtgataggccatctcttgatgcaagcacagaagaggacattagcataagcttcggatcgctccaagaagtcggtaggggcttgctcagtcggaatcgcgatcaacggtactcgcttgtcggtgggctatggacgttccaaatgagtatcaactcagattagtcaagagtcgagaagtgcgggtcgagtcacaaggccaatgtaggtcatgaaccaaacgaaccttgaaccaaacgattttgggccgttcggctgctcgaggctcggaccgagctccaggtccctcccgctctcgtcgctcggcctcttgcttctccttagtagcagcagaagatggccgaagcagaccgagagtaccagagaataattgaccaggcattctctccacaacggcaacgacatgcccggcatattctaattaatcaaaaagattgataagaataaacatggtcgaaaaaattgaatgaaagaacaggagatccttacggggtttgatatcatccgtgacctcctcgtcttcgaagagcatcaatccttgtccctgttataatacgaataacagaattagcggttgtatccagaaatatacatgattctagactccgcaaaccgtacctctacctcaacatcgtccttcttcttctctgtctttcgctgagccgcttgcgaatttccccgtatgtcattgtagacagaattctcctccttctttcgcttcttgtcctctttctcttttttcgaggcccagacctcgtcgacctgagatgagatacaacaatcagtcaacgtagctaagcatacacagccgaatacagtggttgttcagaaaaatagctcacatcaagaagctcgacagcaacggtgtctccatcaagagctcggtttcgatctcgggacccagagatctaaacgcagaacggacgaaacatattgtaaacaagagaaccgaactgcgtgcgtcttatgaaaaacacgagcttacgtaaatgtcggcgtccaaaacctcagtagcaatataggcgtcagatcgattctattgagaagaatatgaaacgagttcaaaatcttgactcttttatatatgtaaggtaagttggtaaaataagaatgaaaacaacgaacacgcttattgactcggagaatgccgataaccagcttgccagcggcaagaagaggaggcagggacgcagcgggcaggtagggagaaaacagcgactttctctgtggctgttgagcttgttgttgaatttgtagctattgtaaggaaagaagggtagacccatgtcacagtcagctaacagaagaccgaagaagataaatgaccatctcgctctcacttggaaggcctgcatctgctgaggaatgttgaagtaaggagtattgtttgcatacaacatgttaggaagcatgttaggcaaagcaaatgaagccatcttggaatgtccacctccggcagcagctcgaaaggaagcgatggactgaagttgggcttgtgcttgagcaagatccccacttatggcattaccttgctgaacagagccaacgcctccatctaagttttgagagagggagcacatgtttagtaaacaaaaggaccgttaagcaactagaagtcttaaagaagttatatagaggagggagagaaaacgaaacacgcactgatcctccagcttccgtccaatgttctgctattctgtcttgagtgggtccccccaccagcaccggccccagcattcccgaaagatgtgggatttccaaacgcgttgaacgtgtcctctgcccagtcggctggtccagagaaactcggttgggaagctttgtggctcatgccggcagattgtcttcgtgcatgcacaatcgggttaccagatgcagacgaatcgccaaggccaaaacctccaccgctcataggtccagcaaacgaggctcgcgactgatggcgagatggaattgactgttgttgttgttgctgttgctggccgggttgagctccgaactgactgagactattttggaactgattagatcggctgataccggagagatctccaaaagtattagaggttgaagtcggcgcaaccgactggattcgtctgtgccgatggagatcgccggatgattgagcaaaggccaagggcatcaccgggacggactgatagccgctttgctgttgggactgcataagaagctctcgctgttgtcgcttgagttcatcaatctgttgttgaagctgatattgagcggcgagagcgggcgtcatctcgctaccggttctccgatgagcgctagcggccaaggagagtagcgcgctcatgccgggattaacattaggcgtcgctgcttgctgaccgagcccagaaaagatggggttggaatgaaagtcgtcttcactgccgaatccaatggaagacatctcctgaggtcgaggcttggctccgaacgtaaaggtgggagctagaacgggccggccattggcattgacagtttcctgtggttcgttcgcagccgcaagcgcagcaaatcgaggggcaatataatttccaggagcaaacctagactgagcttggagttgttgttgagcctgttgctgctgctgttgaacttgttgctgttgttgctggtaaaattgttgctgttgctgttgaatttgagcagcgagagtgcgagggttggcgttggaaacaggaacgggcagaggagcaaatgcatcatgatcttccgaaagttgctccaaagtttggcgagaaggttgaaaagcaggagcattagggttagggaccttggaaggaacatatgttcctggggagacgatgggtaccgcagccgatctcggggatttttccataacatttccacctcgagacgaagttgccactttgagtgcaggtgacccctcgacaggcggcgaggttgcggtggagagtgcactgttgttaatcggaggaattgatctgagatcggtgatcattctctgaagcgagttcatggcgtctccactctggccttggtcggaggaagccgagttagagcttgatcgactaagtttgggagccggaatagagacagacgacctgtgctgacgatttccgtggccagaggatggagcctcaggagctggaggcttagtgccggctgaagatgaatacgatcttccagacacccggccattggatggagctccagcagtggaagaagatccggtgcctgacaaggcgttagaatgtcgtcgtccgttgtttgtggatcggttgcctgttccggaaagaggaggaggcggaattgtcgagggcggtatgttctctcgtttaccgctagtcggtttcagtcggttagatgaggtggaagtggtgcgctgtttggatcgagcgggggccgaggtactggccttggtgggtttctcactctcagtgatgttggaagggggtgtgggtgccagtttagcggcctgtcgtggttgatcagcagacatcatcaactggactgtatgaagataatcgagaaaattcaagaatgatgatatgttcggaagaaacaaatcagatcatggtggacgaaacgtttgaaagatgagacatttaggtcagtggcggatctgatatcccttgagatcaagagtattatgcttacaagtggatgagatcaaagcaaaaggtgaaagggagatagacaggagggtgtaaggccggaagtaagacaactgagttcaagaacggatagtcgtgagatgaagggtgtgtggggacctatagggtgagcagagtatgatgaaaggggggagtgcagggtcagcacatgggatgtataccttggcagcatacaacaagtaaggtggtaaatgtccacatgaaagccctgcccggccgctatcaatgcggctgaagaaatcgctcccttcttttttctctattctttctccttccaaaaactgtatgtgtacggacccaggcacatactggccaggcacagagaaagctgacaatttggcatgccccttctgagcaagacacatctcctcatacaaaacggtttgtcaaacagatgcacgtacgttgcacaggatatcaatagaccgagtgattgaaagtgttgttcaagtctagagtcggcaaaaaaaggaagatgacaaggaacaagcaaactcagtcacttcgtttggcttttcgaaagatcacgattgctgagaaggttgtcaaggtggaggtcgttgagaacagagcgagcccttgagctacgagcggtcaaagagtagatgatgattcttctcgatatagaagacagaggaaaaggaggagaataagagaagaaaaagactgggttgacaggtatccgtcgagaaggtccaagcgtcagaactgcggccatcgcatctccgacttcacctttgttggcaatgtgtattcgagcaaagatcggatagttgacagcaaggatggtgaaagataggagtgtacgcacttgtgagatagttcgtcgatttgcagaggaagaaaatcaagaatcagacaaggaagaaagattgctgtatttgggatgcaaagtcgagaggtcgagagattgaagaatcaaagaaggacgaagttgatggtcgatcgacgagtgtgggtttggtattgctgtgatcttttttgtgtttttttttggtcgtttcttcagtcggtttgatatttgactcaaggaaggtaaggattactctttcctcctatccttgaagatcgaaaggaatgatcgatgttactggtcgagagaaactgagggaagtagaaggactgaaggaatctcttatcccttgctacatacacactgaattaatcagcgctcaacacgcagtctttttgtttccttccaaccccaagcggtgcatccgtttgatctatttcacactctgagtccaggtgtatgcgtgcttgtatatcctggactgcgagagtggtctctgtgcgtgctttttaaacctcagtcagtttcgttcgatgaaaccagcggccgtgggcaatacgagacaaagcaagtgaggaatgtatggtcccttttgcttctcttctttgctcttctccagtttcactgctcaaagtacttttgacccttcatactctctttctaaacacatataccctcctttcctctcctcatcctcttacttggatccatttctgtttctcttcttgttactatgagaccattgagaggaaataaaagggcagcatattgtgtctctctcttcttgtagagcatcatcgaaatgacaatcaactgacaaaaaaaagaaaacaaaacaaaaaacatatagaaaaaaaagagaagacaacaaccaccacccgtcctgtgctacatctcgacccaagcgatcttcccaatcactttcccttttgttctcattcttccttgattgcctagacaccagacatgcaatcgattaaatgtgagccttaatacgtttctaccccaaatctgccagttacgattcactagaaatacgacatctcaccatctgtatcttcaaacgtgtcgtgaaacttaggtgtaagcgagtcgtctttcaccagttgatctcttatgtcgtattatccagctctctatctgacactcggtcttctgaatatgaattatcgccacatatattcaggtcgttgtcggtgacggagctgtaggcaaagtaagtcttcttttccaactttcagataatctgtctcggaacaagtagagagaagagagaaaaggcaaaacaaagggggcgagcctactcaatcatacacgtcgttaggaactgaactgattcgttctgttcgtctgcatggtgtttgactgtgctcagacttgtcttctgatttcctacaccaccaatgtatgtccatcatttcgcatacaaatgcttcctaaaaggtcttccttaaagaaaattaagagaaaactctgattccttgctttcacctccctcttgataggcttttcccgttagacctttctctccgatctaggctcaactatctttcttcgtcatccagactctacgatgcgctattctaatcacattttctctctcctttccatatctgttgacgtgtttccgatgcttaacagggagaatatatacctactgtgttcgacaactacagcgcaaacgtatgtctccctgactccctcgcaccctacatacctcggggctgactctctgttcaaactcttcctctgagcaggtcttggtggatggaaagccagttaacctgggactctgggataccgctggacaggaagactacgagtatgaccagacatatgtccttgccggataagaccacgagatactgaattgtgattcgttttcttatcaatcacttaatcctatagccgactacggccgctaagctatcctcagaccgatatcttccttgtttgtttctcccttgtttccccgcctagtttcgaaaacgtcaggttcgtgaatatttgtatttggttctgcttccttcaacaatactcgtaagactgagccgagtttctttaccctgtttcttccttgacagaacaaaatggtatccagaggtttcccaccacgcgcctggtattcgtaagtcctgataatgataattacacatataaaacatcctacatgtctgtgcactttgcttatctatctatggtttctctctcaaagctataatccttgtgggaacaaaactgggtttgtattttaatcttatctttcattggttttgtctgatcggaaccaacactcccccaatctcaatgctaattcacgttttcatttttcgttttcgggtcttttctttcttgattgtttgaatagatatacgtgaagagcctagcacagttgctaagctcagagaacgacggatggcacccattggttatcctgcaggcgtccaatgcgcgaaagagatcggagctgtccgatatctcgagtgctctgcattgacacaaaaaggattaaaggtgaatctcttctctctttttcgtcttctccttctctctgaagatgttcctgcgctcttgtttgatcttaatgcttatctacctggctcaattaccgatatttgctacagggcgtgttcgacgaggctatccgcgcatgtctatctcctcagaccaagtcttcgagaaagtcaaagaagaagtcttgtgtgatcttataaagcgagaaaaacgatggcgagaggaggatttctttatttcttccaagacatacaacctttgtaccgacttttcatcccactcattcagtcttcgatctattctcctttcttctttttttcttctctttttttccctttccctctctttctgccacccttgcgtgctcttcttcttcttctccctcctttcccttctctctttcgtcttggtcttaatcttttaactttgttgtctttgtcctgcccccttcttggtccccgatttgtggttcatattctttgcttggctcatcgtgcttcgctgaaaataatctttcttgatacttccccctctttccccttctccttgtcctgacaatcatctcaaaaacataggtggcggagcctttcttatttccgcgacttcaccaagattgagcatcacttcaattctagatcatgctttgcagagatagtatgtcagtgaagatgataattatacctgctatattcaagacgacatgcatgaagagcgtattgaattgctgggtttttcaagaatcaattaaaagctaccttatacataagtaactcaaccttgacagattcactgcctaatcgtcatcagtccttataatcttcttaagatccagttcacttccattgatcattttctactgaggatgagcgacaatataggccatgaggataggattcaacctcacagacgtgatcctcgccaccaggctcagaaagccttcccacccccagagttcacagaacgtgagaacacatcaagacatcccatcaggttcaaccgtcctccgaacgttattggcgcaagcgataaccacaccgtcaagattgagcctagcatcggtctaaatcccaacaaatcttttgttaaacacaacaaacggcctttcatatctacagaaccctcaacgagatccacgatggacgaaaaagcgtcgtcgaatatgaacatggggtatagaaatcctaaacgagctcgagtcgaacaacctccgcctgtttctaatcctagcctgaatgttgtgaaggacctgaagccattatcggaagcgccttcactgaatttagacaaggcttcttctctcctgtcttcatacatggttgtactcagtcgacggccaaatctgtctttgggaacgaagaagaaagcgcctggaccgacgttctcgtatacgacgcttcaagctcccaaacacggttcaggtgaggaaccggtagtgatagctcatgtcatgttgcctcctcactgtccgtgtccgaacaagttagccgaatctgacccgaatgggaaggtcaaatccgaagcaaagaaggaagcctgtggaaagttgatgagagaactatggaggtgtggggaagtaggggatgattatacaccaaaggatttgtccgttcgtcaagagttcatccagagtcaggtgttgcagaatacgctccaagagggaatatcttccattctttgcaaagaaccaatattctggaaagcctgtcttgaagcagccaattcatcgtcatctttacatggggaccaatctcttcaattttttcccacggtaatatcttttccacgggtgccagtatgctcttcaaactcgaacgaccctatcgaacctctccaaacatggcagccgagaccgattttgattcttactcgactggcacttcctcgacttcctgccgtcaacttactcataacccaacaattcaccactctctctatcatcactcatgctgccatacagttcaaaagcatggacgagaagaaacttctcgaagcgtacacattaaaggtgatgaggacgataacaaacaaaaatataacaattgaggcaggtcaggccgaaccaaattatttgctggctccaatgatatgggacgactctgctaaatccactgaaagcgaaaccgaaaaggaacggcagagcatgtatgattctcaaacattactctcatcttcctcgtctcccgacagcccttttaaggtgtccagggctggcatccgaccgaaagctgccacagcggttcctgtactcctaccgacgagctcgcctgaaatcgactggaacgaagtaagagagacgacagagcctgttacaacccatccgttcgaaaaggatatagacaggttaaagggacaaataaaggatggaattgcaaccaacaacacagaatttggaaggagatacgagatcttgaaactcagaacggatctgtcaccgatgagtaagcttgtggatagtccagttcgtatatgcagtattcattttctgtgcttggttcagtcttcttgaggtcaaaaaccaaatgtgctgattctgtcaacacacattcttatcaaatattcgatagagagaagcagcttacagctcactttacgagtacctaaaatctagaagtagattcaacggtacaatcaacctggaacaacctcttttggaagttcgccggattcgaccagtcatgggttacctcaggtatctcgataaagaggaagcaggaatggaggcttctgctaatggtgcgcacgagaagaaaggggaagagatgaaatgtaagtctcttcttgatcatcgttctaacttgagtcgcacgcgcgcgtgtgtttcgttcgtccctcatctcggacatccttctctggactttagaaaggtgtcttatcgagacatgacaagctgatcatgaaccaccaatcatttttggcttccttgtttccttctccacagacatgataccaggaattttgcacaaatcagtggttcgagcgaggtacgtcaatcttgccgattttatatatatacatatacacttatacccaatctcctcgcgtttccgtttttttgccttgtctctactatcgtttccgtgaacagtacatataaatcagcggttttcctaccatccgttgttttccgaatcgatgcgcttctatgtacaaaagaagttaactcaatgattcttcaaaacctggttgatgagaatctccttacgttggcgttgagcagtccgacgctttgtagtttggatggagattctgacatattggaatttcaaggtgtgtagttcgattcttctctcaaaagtatttgaaaactgaatgtgtttcctgtatctatccaactaccacaaggggatgctgttcttaaacttatctcgaccgtctacctgtatgcaactcattagatttttgtttgaatggcagctcaacctctaattatctgagatatcctgttatgtttcatcttttaggtttgcgaccaacccaacctctcgacaaggtgatcttcacagtctgcgtagagccattatcgccaactccgcacttcgcatacaatgtatcaactccgggctagccccatatctacaggcaaggatcttcgcagcaaagacctgggtgccgcatggaatgatcgcctctgacacaaatggttcaaagctgttgacagctcagcgaaggatggatatcggagataaggtttgttgggtcttcttcaatgcacgatagaatttaggggcgcgagttaagtgtttgaaaatctctttcgaatcgtacacagcaactggccgatatggttgaggccatcttaggagcagcttggatcactggagatcttcccgtcgcatggcgagtggccaaagtgctcaacatcggcccatttccagccattcatgaatgggctgatttttctaggtactccgagattcctccgctggtccccccaatgatgcagaagactgtggagatcgtatcaagggatatccttggttatcaattccagaatcagggatttctgagtagtgctttggtaagtccatgcatttagttcttcttgctttcaaagacaagttcagaatatccaaacagacttgatttttgcgtttgatggggctgcgatagtgtcatacatctgcaaatcatgactttttccaacggttggaatttttgggtgatgctattctggatctgagtacgaatcaaacatcattgctttcatttactcgtacagtattttaattgacgaaaaatgtttggttttcttgttttttcttctcttttaaaacctatagtggtcatgcagcatatcaaagaaagatggccgcttatacggccggagtatattgtgatgttcaaggcaagttccatcttttttcccctttactgatagtctttgagagatcgagagctcatcttcgtttttgcgctattatgcagtcacacatggtgtcgaacaatgccatcagcgcgttctgtgtcgaatccggcttgtacaaaggtctcctgcaggaatcaggtcggatcgacaaggaaattcacaattacgcctcacgagctcaggccgcacgacaacgcgaagaacacgaggcaaaagtagaagatagaatgccaagaatctattgggcggatgaggaagctccgaaggtacattatagtcccggtcactacgcgcacagaaaggggtcaatactgaagatcttttctgtcgtttcgttctggatcaggtcacgagtgatgtagtagaagccttattgggagccttgatgcttgaagcaaaattcgactatcataccgtccaaaaaatattcttctttggagtcttccgaccgttcttagataaatatatccatgggtttgaatctttaccaattcgtacgtctcagaatgaagactttaggggtttactctccttgagactgacgagtcttgacttgtatgcaatggaacagaacccgctgcgatacttacgtcaatgcttcagcaaaaggttggttttccattgttatatttttgttttgtcatcaacctcgtcattctcacagttttgcacctcctattttctcttcaaacgatactaattggtaattcagggttgcaaagcttgggaattacgcaagacgttacttgatacaagtaatgcatctcctacgaaaaccgaaggcacgtttttctcttcctctttctcttcttggtctgctcacgaaacgttttatttacaccctctcttcctccgttctgactcgactgttatttgtagtgttcatccacgagacgatagtggcatgggcaatttgtgcgacaccccaaatgtctaatcggaaagcatgcgaacaagctctgaaagccatctcaaacgagatcagaggaattgatgttctatgtgattgttctcgagcaggcagttctaagagtaagtcgtctcctttcccaccacatatgttcaaaccctacctttcactggggaccagtagtgctgactactagacttcaaccgtttgaaaagaaccgggttcataaaacaccgtcaaagtcttcaattgacacgcatgaatatcaagcatagtcgcaatcatcatctatatctatgtctcactcgttgtctcattcgaatcgcgccgatgaatgcttttccatcttttagatatctacgtcttgagcctttcggttcatatgagatgcaacccctcatatctttgtccgaggatagtgtaaagaaagattgatcattgaagaatgaacaattcatcatcataaaaagaagtaaaagagaaggaaatccatctgcaaacaatattcacttataaaatttagctgaaaaagaaaactagttctgaaaactagcttcgaacggtatgataaaaagggaagagaatcgaaggagttgaacgccagaggaaaaattggatgaaacttgaagatgaattgtatgtagacattgaaggacatggtaaagagacgaagagaacatacgacgggacaatacaggggaggagttggcgcaagaagttgttggaagagggaacaaattcccagtagaagataaaaagaatacttgaacacggcggaggaaagatagaaggctgagacttatcgtcttactcccaatcactatcctcgctgtcgtcctccttccgctcagcagcagttgaagcaggagatgttggtgctctcacattcccgctcggctgactgacgatatcgtaactctcctctgagattctaggtgacgtgttcgtcgtactgggcgttgcttcctccttcctttgttcgaccgtttcagggacggaagcttgtgtaatgatggaaggggtcgaaggtccgggcgtggaagagttcgtgagttcaggggcaggaacaagagtggtatcggaaccagtggaaatggtggtgggggcagtgccggttgtgacttcctcgtcgtcccaggagaacgcttcgtcttcggcaggggtaacagcggtctcaagaacagtctttcggcgctcggcttcaacttcgatctaaacacataattataaagcggaagaggtaagcagatggcaaaacaaagttcgtatctacgtgggggtcagttgatatgacatacctggtgcactcggaagaagtatcgagtccagaaagcctctttgtccatgacagagggtactgtttcaaagttcgtcgaaggagagggtgtaagcgacagcacgttcgttcttgaaatgtactcgcgaataagaacagacgtacccaacgcatcccgagtggctttcagttcctctacgccttcttttttagtgggaccaagttctctccagatcagctctgtccaataatccccctcaataccaccttttacctcaacttcatctttcaaccaggccagccaagcctctcgaatgtccttcccagtctcttcacttccagcagggtcgatctgcaggagatccttgttggatctcaaagccttgagcagcgcttcttgcctcctagcccgcacatcggcaatcgacttgcccgtcagtttggaaacctgatcgtcggtctgagagtagaccggagtatgacccccatcgtaagtcgctatagtccacatgtcggatccatcccaagagacgccagcttggccatcgttcgtcggtgggacgatcttgacagcttcctggaagaacttccctgcgtcttgtaacaagttttccgattttttcagataatcttccgcgagcttctcagcatcggcaaggtgaagatcagactgaagcttttgaaacgaatttgtcaagttctgtcgaagggccggtagatcgagctgattcagtttcaagttcgggttagatgacagagtgtgggaaagagattgttgaaacgaagccaaggaaggtaacgatgtatgagtgactgttgtgccatccgggttggtctccgtagtagtcggcaaggaagactgcagttttgcaaacaacgattggaaagctacatttgcttggtgaccaaccgcatcgaccgacgaagcaatagagttatccggaagctctcttccctttcctttcacatctggcttagtagaacccgccgcggcttcactgataccaaggccaccgaaacccataccgatatcgcccatcatggcagacgaaacaaagtctgcgttgggatcaggtccaacggcggtatcgtttcgggcccgagcttccgactgaagccgttccatctctgcccttgcctgtgtcgccgcagagttgagatcctttcgaacagcactgatggtaggtgcaacctatcgttcccccaaagacaaagatcaaacgaagaatttgaacgtagaacgtgatgtcacatatgtaagcaaggaggaccctgtgaatgatcggcgtatgtacatgaagacaatgaagagaacagagggaaaaaaaggaattcgaacctgtttctgaacacctccccagaaagacttccaactacccataacctggcctacttcgttctccaatccttccttaaacgattccttctttcttggctcgttcaagaactgatcggtctctttcgttgatctcgccgagtcgtcctcggctccctttaaagaaggagaagagccagcaggggtggaagactcaacagctgctgatgcatcgtcagatacgctgtctattccggtagctgtggtaacgagagtgggatctgaaatggatgtagaattagatcctgttgaaagatctggggcggatgaatccatcttgtgagtcgtgtaaacaagtcgtgatgccgataacgatgatgatgctgatgatggtgatgatgatgggcgaaggagatgaacgattaggcgaaaaccggcggattcacaaaaaccgattaaaaggtgtttgttctacccacccgctcttctcgatatcacccttggctttgtcccgttgaagtactttccggtttccaatgctagctccttccttttcgtctgccttgcgatagagaatgagacttgtcattattattgcagaccatgagtaagaatgcagacataaaacatggcacgagaggaagaagctttaaatatgttgcttcagaccgagaccgatgagtgagagaagaaagtataaatgttgaaagcagagagaacggaagagaatatagaaaagaaagagagagtacgtgatgagacaaatgtaagagggggtatgaaaacatgttgtttggacgaggacaaccgaaggaaacaggaataccaagaaagaagaaagtgtatatttatatacggagacaaagtcccagtttgatagggcggagcgagcgatgcagatcaacaatggagagagaaaagaacacaaacgaaagaagcgaaaagacgaaagaggtggaacaaacagaacacacaacccaatgaggggaggcagaaaacatggcagctcaatgcgtcagagaagaggtcgataagaagaaagtgaattgaaaaagagaaagcgaaggaggtctccttcttttttgtttatttaggcagactcctcctcctcctcctttgtcttcgcgaactccttcttgagcttatccgcaggggccaccatcggttctccctctacgttgatcttcttggccacgtcctcgacatcgtcgtcgttgaacgccatggcggcaagcaactgagcgaatgacgaatacacctggggaatatccaccgcaaagtcatcaaggaactcggccgaggactccaggccagccttgaaagtgtccttcgagaccactgaatcggcagacaacttcttgaacaacttgatggtcaactcaaggtcggccttcttggcgtcaagggcgtaggtcacaatcttctcaacaaacgtcttggtatgttgcgagggcagctcggtaaactgcaaaacagcctcagagacgtcctgtttgagtaaatacagaaaaacaaaggagaggaacagatcagcatggactggagctgtgacaaccaagaaatgagacaaccaaaacgaaccttgatgtgatagaactcgtccatgttggacttgatcttctcggcagcagccttctcatccatctcgacagaagcagcggaggcagaagtctcctcgtccttgtcctccttcgaggcggatagctcggcatcggtcggtacagtcctgggggcgaggttcagtcgctttcgctgagatgtgggctcagcagcgggctcagtcgatccaacttcgtccttgctggttcgcctcaagaacggattcgggggcaaaccggcagggccaggggtggtggcagcagggtccatcgaagaatcctgagaaagcatagaaaacatgttgacgttgctgctcgacgagtttctcgacaatggcggggtctctcccatcttgggtcctcctcgcttgttgaacacagagccggtcgggccgaacgtcggtgcgcctccacctcgcttctcgatctttccaaagtttccaagatcgccgaccttacccaagtttctgggtggggcaacggtccaaccatcctgctgggggttgttaaaatcagttcggttctgtcctcgtcgagatccacctcgggaagagtttcctggcccgctcgacgatcgagccaacgaatcctgagcagccctcgcctgatccttggcggctttctctcgaatttgagcaagcgtctgaacaccctcggtagcgtttcgctcctgccagtgtcgatgtcggagctctccgacatcgagcaacatgaactgcattcgagacgaggtcgagctgctctgactgatgtgttgcattcgggcaaagtacaagtccatcgcgttcttcgccttgggggtgtcgagctgggacccaacggtggtcaacagcctgcagagggactccacatcctcctcctccgggttggcgacgttgttgaggagttgcttgatgcagacgtgcatgattctctcggtcaacatctccaacttgaaaagctctccgataagtcggacgagaccaagaccctgtcgcttggccttctgagcggcgtagtactcgtcagacatcaacgcagcctcctccttgggcttctccgaggcggccgtacccgtcttctcggcgttctcagcagcagcggcagcagaggcctcggcctcgtcgttcttatccttgatggccttgtcgtcgtcggccttggaggcggcggcagcagaggtgctctccctggcagcccaacctcgctcgaagtcctcctgacatcggttgaggaggtactttcggaacaacgttccaccaatcacgcactcgccctttgcgtccaacaccttctcatccgagatctcggaagacaagttgtccatcatctttcggcaaagtcgggcatacatgttcgaccagtgagcctcatcggtggccttctcgaacaccaacctgatgacctgtcggagcgttcggccgtcagtctcggtagaagacttgttggcccattcaatgatctgaccagaaatcgaagggaagttctccatcgtcaacttgttgagaagagccttgacctttcggtcgaccaaatcgggagtcatcgcctcagcacccttcttggatccagggatccatcggttagcagactcgacaagaggagcaacaggagtctctggaacggccgagataacaggggcagacgggaaactgggcatgtcgcttctgtttcgacctctctccgatcggactcgaccacccttcatcgaagggctagaaggcatcccaccggggaaaccaccgggaccaccagtgctcggctgcctcgacatcggagctcggaacgagtttccaccaacgagaggctggctgctcgcggcaaacctgtcggccgaggtcttgggaacaccaccgaatgaacccatacccatggagaatccagacgaaggagctcctctggtggtcgatgggaagttggcctgaggtcctgatcggacaccaggacctcgggaggatcgtcggtgacttccctggtcggtagcggcctccattccgatctgctcgagaggcgggagtgactcgggcttctccttgcagatctccatgaactggatgaggaactctcgatcgtatcggaacttaccggcgacgatggtggcgttgagagcctggttgggagatttgactccctcagggtaaatgatcgagctaggctcgctgatgaacttggcagcattgagagactgagcgacagcgacctgaggagcgacagaagcgtcctcagtgacgggctcggccttcgacttttcctcggtcgaagcatccaccggcttggaaggaagtccggcagaaggaggaggaacagagctcgaggaggcggaggtcgcgacagccttggattcctcgctcttggactcagcagcctgagcctgcttggactcctcagcggcctaagaggcacaacaacgtatgatacgtacaatgatacatgttagacagagaacaagaacgcgatgaaataaaaagcgaggcgactgaccttgtcctcagcggccttcgtctcggcagccttcttctcagcggcctccttctcttcggcggccttcttctcttcagcagccttcttctcctcggcagccttctcttcaatagccttttcttcggcctgcttcttctcctcggcctcttttgcggccttctcttcggcagccttcttctcttcggcagccttggcttcggcggccttatgctcttcagcctccttggctgccttctcctcagtctgcttcttctcttgctcagcggcctgagccttgagagactcttcctcagcagccttcttggcctcggcctcctagtttgatacaaaaggggagggggggggaagaggatgagatcgcggtgtcagaacgacggaacaaggaaacaagatgtacaacgatgcacactaaccttctgctcttgctccttcttctccttctcagcctgctccttggcggcggcggccttctttcgctcggctctctccttctcctcctgagcgtccatctgcttgaatttgttctcccgagcttcctcagccaaccgggcgttcctctgggactctgtctccaacctgacggtcactggaggtccaggcaacttggagatcgtgggggccggtgcggctggctttccttcggtagcagaggtcgaggatgaagatgaagatggcttgaccaaggatttgatatcagcggccgttccgtcggcgaacgcaaacttgaccgggttagtctttctgggtgcgaaagcaggggccattcctcgaagggagggcgagccaggaggtcctcccggtccaccgacaggcgacatgtgggaaccagaaggagagaacggggcggccgaagcagagaaggtggagttctgagctcggtggttaggtcccgagcctggggttccggaaccgttgttgttcacggcggcctgtcggatctgaggagtggaaggaccggagggagggagaccggaggcgttaggggaaggggacagaggcgcgttagcagcgccgtgaggagagtgaggcataggaggctgctgatgggggtggtagccgggccactgaggaggcataccctgataggagtttccgtactcgggcccaccatacatgtgttgagggtactgtgaatttgaaaaagaagggatgtatcagctacttgcgatctaacgaacagcgcatcttagaaccgacaaaaaaagaactgacgtagtatatcggggcctgtccagggtaggagcccatcatctggttctgttgaggaggaatctgagcgtttccgggtcgaggcgaagtgctatcgccagggggagctccaggtccgttaggtctgccattgttcggtcggttaccaccttggaacgatgggttttgctgcatgctaggcggtccaccggagatctgctggttcgaattcgaacctgacctagaggaagacgacgacgagtggtggatgtgaggaggtcggaggtgagagttttggttgggtccaccctgctgctgctgctgctggggatggtaagaagaaaacgagccagatgactgaggcaagctgttaagcggcggtcggttctggggctcgaacgaacctcgtcgggcatcagcagatccagaagatggggaagcggtgttgacagccgaggacgagtttgttgacgaaatagagggaggcgcggggctggacgcggtgggtgccgagctgggaggggctgctgaggaggaagacgagttttggaatagcttgtggatgtcaatcttggccttgggcttctgagcctcagtggaggcagaggcgggtgtcgaggcgggagccggagtggaagcggtggctggagtggtggctgaagtaggagtggcagtggaagcagaagcagatgtgtttgcaggagcagcagaaggagcagtcgacacaggagcagcaccagccacgggtttaggagcctgtctggcggcagccacggccgatccgttcggaggagcagtagcgacgacgctaccgaatgccttgaggctagctccgtttgtcagatgagaaccggtggcaggaggtttggccggagaagaactcaaaacggcggccgagtcgtcaatcgaaccaaagttgatacccgcactggggataccgactgaactggtagtggaggagcccttcttgttcacggcactggaagcggacactgatccgccagcggcggatggtgcttgaactcctctaccgacagacacaccttcactgatgggccgaccggatgcgaggagacttcctttcctagagtttgccgagccatttgactgttgagaattggcattgacaggagcggcttgcggtttgggagtggcagaaggggaggatgagggagaagactgggctgtggaagaggtggtggagatcggagggcctcgagaccaagctgactttattgcgggcgggggagctgacgatgaagggtttgaagatggtgctttgctcatttgatgagtggcgagtttggttttttgaaacgggagacagacagaggatgtgtgaggtgagggttttgacgaagaggaagagcgatctagattttcagattttccaattttcctcgggagaaaagtaagaaaagatcaagaggtcgtgttacagtaaagtagcccgactgaaggatcgaatagagtgatgtatgtctgttgaagagggaacgggaatgaaagacgaccagaagaaaaggtcaaggatgagaacgtttgtcaaatggcgagttccagttgggtggcaaaaacaagggagaaaaaaaatgagagaacgcgtaagatgtcaaaagatctctttgccatcattcttctcctctgccatcctctgtgatcgatcgaacgatggaaccaggctgtggtgtgtgggcaggaacaagtgtagttggaaacagagagaacggatagcaacagaacgaacctttataagagatctagatggaggccggagtgattagaaaagaaatataaaagatttctttttttttctttttttttcaagggcggaagagcaaagcaaaaaaaaaggattggttgattcgtttccagagtcgaaaaggcagaaagaacggaacaaacaagagaacgaagacgacaaagaaaaggatggagctactttctgtttgatatacgacgagctggagatcgattctcaatgtcggagagggatgtgtccgagtagaggggaactgggggttgggaggggaaagaggtggaatgaagaaaaaaaagaggaaaaagggcaggaacggcggaaagggtaatttttcttcccatcacttttcctattgtggtctgtagtgttgcttctattagttttcctaatgatcgtcctaatagcagttgttactcgtgccagatcgttctattacatattctctctaatcattttgcttgattatcatagtctgactctctattcaaaatcgagacagctcagactatatgctggttcccatatgttccgtccacatacattcgtatgctgaattcatccaaaagctacacatagtatctccataaggcctttgctcgtctcgtcagatcctggatcaacccaggctccttctgcatatctttgccagagtactgatccttgcggatgctctccaggatctctttgacgtcgtccatggaaccagatgcaacctcattcgtatgccacgatacgactagaggcgggcggaaagatgggatggatactttttccaaaggctcgctaagacgagcagagaccatgagacatatatgagttggccgtgggttggtttacaaggagaatccgtcgacagagagaacactcacctccagtcgactttgttcttcttgacttcatctgccacctttcctccacgctcagccaacgatctctctctttccttcttgattcggttacgctccttgatctcgagagcgttgatgatgctgcgtctctgggtttctgtcatacccatcggtggctcgatcacatcgagatcaaagtctgtcaagatcaagatagaatggtctttaaaatcgacgtagagcttctgagaattttggtgcaaaagaactcgagtgacacgctagtcgtgccactttcttactcacccacaggatatgggttgtccaccttgttgtacaattgagattttcgaagcatgatcaacgcctcgtacgaaattggtgcattcggattgtggcttttttttttttgtgttttcgattgttttgttttcgtatcccaaagccgcaagagttggcataagaaagacagtcatgttaaagtcgagacgtttcttgtgaactgagagcgccaccaagaaccagcagctacactcatagtaagagacaaaagaggcaaacatgagaacttacaacaatgtgatcacaaacctaggttttcgccagaacgccatgacgaatcaatctttttgtattttctttttcttattccttcggtttcacttcgtgatactgatgagttgatgctggattgaatcacgaactgccgacggtcaaatgtatgatgcgggttggatgtatgagtatgcgtttgtgtgtgtgtgtgtcagcgtgtgtatatataatcatgagacaacttgcaggcatggcaaacgaccggttagtcacctcacatcagacgtcggacttggcctaagatcatcaaccatctttgactatgtagtgacctctgccatgcgataaccctctctctctcactctctccgagcacctttacatagcccatcgatgacgtcctcgaactcctctacatatagtgccccctctacagagttccatatcatccacgcaacaaagccagaggatttcaagcgatgcatggatgtccgattgaaaggttcgtccccatctatccgtcgattatctcgtacccagccagagtcaaggaaaggctgaaaggactgctctgcttcgtttgatacagtctttgtcgatgaacaaggctatgatcccaagattgaacaggacgagtgattatttcgttattttccttttcttaattctgtacgagtcgtaactgtagatgatcgctcgctaagcttttctctctttcttgggctcgatcaaatagatacgatcatacttccgcccactttctcttggtccacacgcctacttcggaagcagtaggaaacgtcagattctatccaccttctaacaaggtgcgccatctcttgactttcttcccttctttcttcttcttctcaagatgcgtttcagcgctcgctgatagaaccactacggcttctttgaatctcaagctcggcaggctggccgtccttccagcattcagatcttacaaactaggagcaaagctcgtggatcacgttacactttacgcgatagaacaagctagacaaagaggcgagaaggaagcagtggtgatgtgtcattcgcaggtcagatcttgggaggtttaactatcaagtcaagctgagctgagccagactgtttttttcatttatccattcatcatctataggcacacgcgattgggttttacgagaaggtatttctcactttcttgggatcaaactgactcgctcatatttttctctctcccttctgacaacgctcttggtgcttcatcttcttctcttttgttttcttttttattttacctttctgggtatataaacagaaaggatatgtccctgtgggccctcggttttcagaggtatagcattgcttctttttcttcgtctcctcctcatcatcatatgcgctgtacacagcaagagactgactgaatcgagccaatttcttccccggctttctgcgtctttcctcgttcggtctctcccatcgaacttgatgcaggaggatacagagcatcaaaagatggttctcaccgttcgaatataaatctttgaatccccttgtatcatccttcctggttgagattcagaactgagagaaacaaaaccggccgctgtcgtcaatgcggacgagaacgtcatcttgaaataatgaacaatgaaatggcacgcaaggaaagagaacaagtcgtagtgaaagagatagaaagagtgtgaagatatcgaatgtcgtttaaaactggactgtaatcaaggttcaatgcataaaagaaagaaagggccgtaagggaaagagacaatgaagaaaagattgacgtccactcgcaagaggaacgagaagaaagagcagaagaggtaaagacgcatcaagccaaacctccctcatcaccgatcgtcttcttgatcctcaacaggatttccgtcttccagttgtcaagttttgtgacctggtcgtactcgaccacatgagcggtgaaggcttcgacatcgccgtcaccgtatgcgatcacgatgttgttgaggaaccgagcttctctagtagaggggaatgtgacatcttcaggagggacgtacacaacggaaacagagataaaacagtgttagaattgtatccttgtatttgcaatcagacaaaaggacaagatgggacaaaccttgttgggcaaacttatcgagcaggttacgagccagcacgacatcttcagctcccagcgcactggttgatcggaaacaaatagctcaattagcctgacgaatcgttcgcgatctctggtcgaaagggagctgaagggaaaacgaaccaaagaccagctttgagccagatctccttgacgctgtactttgtcagtgggctgcttaaactccagtttccgacctggacaaacgtatcgaccgcccgtttgtagtctccaagtgatccagagatctctgctgcttccttcagaatagcgtttcccgtgctgtgaatgacccaagaacgtacacaggaaagttcagcgtggtcaaacatggtgccaacaagtgatagagggagagacagagaactcacgcctgagcatcctccatctggtaccattctcccgccttttcgaacgcgtccctagcggcgggtagatccgactcttttaggatgttgccgacttctttctgtcgatcggcagcttgtcggaatcgtccttgctcagtgagaagggtgattgcttgagtcagcgcgttgacagcgtccgagacggaggatactgaggtggattgcttgaacctgaggaggatgagaaggggtagggtgacgtcaagataggaaggggggggacacaacatgccctcggaggaggttctagagtgatacggggaggagtaagaggaacatacgatttggatgcgttccagaaagctgctatagcgtcgtccttctcgttcgccttgagtctgcattctccctccctgagcgacagtaggatggattgggtcgataagcaaggagacgagaactgattagagcgacaagcacctgggctgatcatgattgtcaactcacttgtcgaaagctcgtccactagaatcccagtttttttcaagcttgaacgcgttggccgcttgttggaactgtggtgatgtttccgcgacgaaatcagattgatagaagttcaacgtcgaatcagctggacgaccgcttagggtcgagtcgaaagaaagaaagaaaaaaaaactccatgagaactaacaagatcggcggcttcctcgaactttgttgaagaagaagaaaaccagcctgtggaagaagaagccttcttgttggcctttgccaagagatctaccgaagagggagccatgctgtatgtgtatatgtatgatggagctgtgagatgtgtgagagctgatgcttgatggatgggtaggttgaaccagaagtaggagaaggacaaacttcgtcatagcatctttcttgcacagctttcgttgttttctctttccccccttggctttgagcgttcggactcttgactctcatctggtgtttgatatccgcatatccattctctgccaaggcatccgatacacacacacacacacacacacaatggctgatcaaccggtagcttcttcttctcgacttcctccagttctcatcccgttccaaccaccaggtgagatggtcgtgtgtcttgaacttgtatcagcgtactactgaccgttgatggttgtctgacgatctttcgatcttgttcattcgctatctcaactcgtatctcattccttgcagaccctgggccaccagctcatttgacaggctcggttgacctgctgacacatctgtcgctccggacgtcgtacgatacgttcgtccggccgtactttcgaaatcccaaaccgctggtcggccaacagctcgacgagaagggtaaatccaaagagtcggggctgacggcgaggaaggaggcggtgatggatttgaagaagatgaaggacaactatgaagatctcgtgccggagtgtgtcgttctcggtttgtctctttcttttttttgcttcttcttctttctatcggggagctcgagtttctcgttggatcacgcgtataggttcgagttgctgaggttttgagggtttccttcccgagggggttttgctttctctttgatgggggcgcttcggatcattctcaccacatctcaggtaatcacccgatcatccagatcccaccgtcgtcgtttcaccggctggtgtttgaatcaactgacgaccaagggaacgctctgcctacccaggagatcaagaagaggtcgaaagcagaattagaacaggctggttggtggttggctcctggggacctcgaagaggtacgcccaggctattcatcttttacatgtgtgagtccaagtagatcgttggactgatgttgatttggtatcttttctttttctttggtgtttgtcgaaacgttaaacaactcgaatcgaaacgggatgatcaggcaaaagacccagctttgttcgttcgacaacccagacctgagaagagaaaggtacgacggtcaccctttttgatgtatcacccagtgtcaaatctaaccttgactctacgcttttcttaatacacacacgcacacgaacgagcagaaagcgaaacgtcctagaccgatagacgacatcgggctgggtccatcgtccctcaacccactcctgtcgggggacgttccgtctccggctcattctcatctctcgcacgggcatggtcacggatcgggtgtctcgcctggccagggtggatctattaaacgaagacgggatgtaggtttttttttttttcttcttctttttcttcttcttctcatttgcgaagaaggaaatctttgactttcttgatttcccccctcagagtgtctgtgtttccttgcttgttctgacgatgacaacctttttgtttcattctgaccacccgacgaacctgcagtcaaccgctcctacgccaggaggcaagacgccttcgtcctcccagtcgcatccccactcgggctcacatccagatgggtacgggggatcaaacaaactccacgggtccgggaacgggaagcggacgccggtgcccgtcttgaacgggccgacacccggttcgacgaacgacgacgacggcaggacccccgggggtggctccggacggaccccgggctcgttcccggcagatcaccagtcaaactcgagcttccagtcttattcccgttcgtattcgaaccaatacggccgatgagatgggctttttttcgtcgttctctgcttgcagtgtgtgtgtgtgcgtgtgacggaagaaagatgaggaacaatggatcatataagcagtggcaaacgggggaaaagaaaaggcagacaaacaaaaagaagaaggaaaaaagaaaaagaaacagaagacaacacgacacgacacgacagataacaacacgacatggacgaaaagacaaaagaataggaaaaaagagagggagaaaacgatgtgtgtgtgagagagagagagagagcagagaaagttattttatgcgcattcgatggatgagtgatagaagcatagattagagaatgagagagaggtaagagggcgaagaggggagcgggatgatttaatagtcaaccaacacaagaagggggggtttattttcaagggttttcttttagaaagatgttttcagtttcaaagatgagggcaaaggaagaaaagaaaagacggatacagggggtgttgtgagagagaagaaagagagggaagaagaaaaagaaaggaagaaaaaaaaaagaaaaaaaaagagaaagagatataaaggattggaaggattcatagatttcaacgagacctcctcctttcctcgcttcccctccttctttacattggttggtttgcaaaagggcatcatccacagggccgggtgatattaaatgtgattatcttttcattctcttcgatccatccttcgacacaagcgcaaaacagagtctaattctcgacagcggcgagagcgtcgagatccttctttgcttgcaacgcggccaacgcggctccgacaccactaccgtccttggcgaggacgagtctgatcttgctggcgtattcctctccgagaagagcggcgaggtaagaattgacgcgctcctggaaatgggggtacaactcggccacactgcgagagggagggagggaggaaaggaggaaggaaagggatgagcaaccaggaacaaaaaaaggattgagctagattaatgatcacaaaacacagagcgaacgaaccttccatcgactccgacgtcgagaaggtcgacgttcttgacgtcctctgcggtctctccttgggtgtggaggacgatacaggcgatggcacaagcactcaaggcggcggctctgctaccgacggcctggacggcccagaggacaagttcgacatcctgctgggagatgtgctttgcctttacgccgagatactttgtgatgagttccttgatagcctgctgggctggggtgagatcggaggaggaggttgactcctttttgggggcaatatcagcggcggcctcgacaaaggagaggaaggatgtgtcgattccgtagtgggcgttcaactcgggggttgagtaacccgagaacaagagggacgagtcgataaagtggagcaagatgtttcgggtgatctctccgaggtacattccagagatgagcttttcgaacgcctgcttgtggctgtgggtaagtttgagagggatggggtgtcagaacgggatgggagagggaaggacaaggacgaggtcgaggtcaaggtcaaggtcaagaagaaagaaagaaagagaggacgtacgggttgatggacaatcggtcgagcgctccgtcaaagagagtgatgggcaagacggccctcgagttgtccaacgctccccactcggtgttgatgaccatcttgctgccgaccttggcggtctgttccttgatgtaggactctccgagctttgtgatcttggagaggtcctcgagataggctccgttcgttccggttccaaagattgctccgatgagggccggtccgtgctggtaggaagaggagagcatggttccgacggtctgtttgatggtaagtgagagggtgggagaggaaaagtttaagagggcaagagagcaggacggggaagaaaaacagaacaaggcaagagagcaggacgaccgatcagagatgatagagaagatgatcaaaacgagaggatactaacgtcgttcacaagagcactgcatcggacgtgaatgtgctttcggtcgagactgtcctggagaagtttgacgacgtcgtttccgatggcgttggtggcagagaaaccctttgtccaggtgaggatggttccggcatccagagcggtctgctcgacggggaaactggaggagggagaagaaagtaaagaggcaaaaagatcagaggggggagcgaacagagaaagcaagaccgccgggaaggaaacgtcaggcgatgggcagtttgatggaaacagagagaccaacctgaaggtgaaaccgagatgaaggaccttgccagagtcggattcggttccaatctctgtgaggaaggagtcgacggactcggcgatgtagtctgtgtgtgcgtgcaacatgtatcacctatcatcagcttggctttctcattcctcttggcaaacgaatgaatgaagaccgaccaaagagatcccgggcgtctccccgcttgagatcgtcggagaccttgtacttttgctgcttgatggtgaacttgtgggagccaagaagtctgacctcgcacactcgcctagggaagggaagggaagagggaagaaagaaagaaaaagaagaagaaaaaaaagagagcgtatctcattctcttcagtattcccggttcactcaacaagaaggtgagctcgaaaccgaccactcacaggttcgttcctccgaggtcgagagcgaggaatgttctgttcacaccaggggggcaaccaaacagacgggtgagtgagagtgaaccatacagacaagggggggggcaagcaagggaagagatgtgatggtcccaagcgggaggggggagcgggagggaggtgaagaagaagaaggaaaaaaaagaagaagggaaaaaaaggaggaaggaaaaaaaaaaaaagaacgacgaacccttcttcgtttccgtcgggaacaccggtgatgtaactggggatcatggcgacatccttgccgtatgatgtgaggcctgagaatgcccgggggggagaacaaacaggacgagcaagacggacgagagatggtcagtaccatccggcagaagaacaagaagaagaagaaaaaaaagcggcaatgcaaagaagagatggagagatcaagctcaagaacgatggcttgccgaacaacattcaaccacacagcacaccactgaacaacagactaaccttgggagaactctgctctgaaggccttgacgatctgttgaagcttgggggtctcgaggaagaacgaaggttccaatgcctgaacggcctgtggtaacctcggttttgtcgacacggcagcggaggcggcagtgggggccatggcgtgggggtcgagtgagctagtttaccgggggggaactggatggacgtgatagagaaagcgagggggactgttcgagagcaagagcaagagcaaggagattgtatg

SEQ ID NO: 365 - DNA, 4262 bp, Xanthophyllomyces dendrorhous
accatcaacatcatcagcatcaacagtgtcccccctcacagatgggatcgttcccgcccagctcgatagatatcccaccgccgtcaagaggaatcgcatcgctaacagtccagaccccatcgtcttcaccatcgttctttcccgagaatacagcccctcccaacagcgcatccacagctccctctccgaaacaccataccaaacccagtcgatggagctcggcagagttcatcgtgtatgagctcgccgtcgcagtcggcctggctctccttgtgtctgtcggagtcggtctaggatctggttggtagatcgtttctctcgactctattgcatgtgtcttttccttccttttctttcgttcttccctcactctttcctcccttgcccttctgtgtgaacgacggtcgatgcgagacctgggaaagaacgatacaagacatctcgttcagaaagctcactcacctccgtgtgcgcgccggctcaccgctgtctctcttcttcctttgttcttcccaccgcttgcgctcgacgttcttaaccccagccagtcatccgaactacggccaatactcctaccggttgaggaaaggatggatctttggtcggctcatggtccgtccttcttcctttgggccgctctgcattccactcgcttctcaaccagcttcccttgatgcgttcccttgtaggatatgtcggatcatcaatactcgacgttccactcaaacctacctgccctcctaggactctcctcgtccttcctcctcctccggtacatttccgtgttcctctcggccgaccgatcgaccttcctcaccctcttcgccctcggatcgctcaccgtgatgcatggtctgggtgtgctcaagatccttctcatcgtcctcgtcaactatgctctcagcctatcggtcgcaggcacaagatgggcggtctgggtggcctggctgtttgtcggtcttgtcctcgtggggaacgagtggtcagaaggttggagtcgtctttctctggtgaggccgttcaacattgctttttctctctgttttcttctttctctctctccctctctctctctccttctccctctctctctccttctcttctccttcaaggactcgtttgactgaaagcgcgatcaagaacggatacatgggcctgatccccagatggcatatctcgttcaacatcaccgcgctcagactcttgtctttcaacctcgaccaccactgggccctccagacgctccgtgagatcggaccgaccgaccgagccggatctctagaggcagaccaaacagaccaatcgtcctaccctacagaaagagagcgcgcgtcgagctcaagagagttgacggtctaccgatcggtcggtgcttatctggcctacgtgctatacactccgctttacatcgccggaccgatcatcacgttcaataacttccaataccaggtagcctcgttttctttgtgttcttgctcgtgctcctgcctgttgatcctggccgctgacagatagacacgcttcgatccttccagactcgtcggccgccggtgataccgagacggacgatctggagttatgctctccggtttgtgatcgcgttcctatcgatggaactcatcctccactggatatacgtcgtcgctctgaaagactcgaaagcgtggagagggctggggccaggtgaacttgtcacacttggtttttggaacctcatcatcgtctggctcaaggtgggtgccagccatgacaacctctctctggtcgagtcgggctcaggctgacggtcggttctttcggatttgtttgcattttgtttcgtctcgcctcgtctacacaaacaaagctcctgatcccgtggaggttcttccggttgtgggcgctgctggatgggatagacccaccggaaaacatggtgcgttgtatggcaaacaattattcgtgcgctggtttctggagaagttggcacaggagttacaacctctggatcgtccggttcgtcttttccttttcgtgtcttttccttattcttctcggggaagagcaggctcgatctctgctgaaatgtatctcgctcggaatatcatagatacatatacgtccctctaggaggaaagaaccgaccggtcagagcgacgcttatcgtctttacctttgtcgccctgtggcacgacttgtcgttcacccttctcacctggggttggttggtctccctggtcgtcatcccagagttggtcgccggtagggtcttgccttcttctttggtaagagtctagtctctctctctctctctctctctctctctctttcagtttctttttccttcttctcatccgtttgtctctctctttctctgtggttggacttgtgcactgtctcttggttactgtgatggggctcttgacaatctgaatcgaacacaacaacaacgacgaaaaagtacggcgagacccgttggtaccgacacctgaaagccctcggaggggtcctcaacatcctgacgatgacaagcgcgaacctgctcgggttcgtgctcggccccagcgggatccaagaactcctcttcggcatccggcagagcagctctggtctgggggccggtctggccggcctcgccggcgtgtttgccgccgtgcagctcatgatggagtacaggcaagaggagagaaggagagggatctggagaaagtattgatataatgtatcctttcctcttttcggggtgtagatggagacgtaaaaacgcaacagacggtcgtccttcatcatgtttgtttgtcttgctttgtttgtttttctttttccttcctaattcaccccctttctctcttcgggttttgtctggcgtgtgtcttgtccatcttttccctttttttattttcctctcctcagcttctactctggctttcctttgtttcgccattctttgtttcgtgtgacagtagagccgtccgagattcaggtgttcgccaacggtcaatgtcacaccctgccatccgggccaccagaaacggtcgaatgggaagcgtctcaaaggaaaacgaaagagcagagaacagagagaaaggccgtcgaagccgaagccttgaaggcaagagatacaacagagaaccgtagtctttcatgattcacaaaggagagagagagagagaggaaagagccgtggatggagggaggatcaaaaaagtacagaggaaagagttttaatggagaccggctggagagaaagaatgaaagtgtgtatgtgtgaggaaaaagagatggggatcgatagtcagtttctcttcattaacagagtatactgaacgaacgaataaagtgatagactcaccctcaggggtctgattggttcggaagagccaagaggaaaggaaagaaccaagacagacaagacttcagtctctgcagcaaacaagttgagagaaaaagaaaagaaaacacacgttgatgatgtagtccacagctggaagagagagaaagcacgggtcggtcgtgatcagcacctggcagacacatgagagatacagcgctctggccagagaaaagagtagaaaggacataccctgtcgaacagttcggatctcatcggcctcggcgtcagggatcctgtgataagcacgatgggccaagagcaaggcctccgatcagtaaatcaaaagtaaaagaacaagacgaacaagcactcggacgtgtcgaaagatgaacggaaagaaaggcaggacgtactcgatgaaaaagtcctcctcgatggccatgatgacctcgacggcatccaaagagtcgagaccgaggtcctcggtaaaggaggaatcaaggttgagctgatcgagatagagagaaggcaacaagaacgagttgtatgagttatcggatgttctcaaaccccgtggagttttccatctacaactgtttcttctttgagccttcccccccccccttcgttccaaagccatgtggtgtcatgtccaccctcccgttcgatcgccaacagaagtaccccactgtaagaaagagaagatactgttctcaccttgtcctggttgaccttgtcgaacgtcctaaagatgtcaaggatcctcctttcgatgttctcctttgtgagagaaaggtctggtccgtgccctccggcgtaagatcgagcaaagagcaaggtggacggccgagccaccacactagccggtctagtggcaagaagagagaacgtcctgggagtcacaggagcagctcggagtgatcgaatagcgaatctggagaacatatcg

SEQ ID NO: 366 - DNA, 4576 bp, Xanthophyllomyces dendrorhous
ccccccgcccgatcgtccgtcgagtcttccactctcaccatcaccattaccatcaccatcgggtttgttgggtatcgctctgctcgtttgcgctgcgctatgaaccgctcatcaatacggatatacggacagagtgctcggggtgtgtccgcaccgattcacctcccgtcactctacaggcgatcgttccattcctcaccgcgctcgttctcgagatcacctcctccaaagaccctctaccaggtccttggcttggaacgatcggcagacaaaaaggtcatcaaggaaaagttctatgaggttcgtcgttctgtctctttgttctttctctgttcatcaggctctgcagccgtggtctccgatcctagggttgcaacactcgatcatggagctatagtttccgatctagtgctctgaaagcaagcgctaactcgacatcccttctatcgttctcttatcatcatatcgactaccatctctcttggccttctgttctgtcaaaccgtcgggtatattcaccttctgcgtaaaatcccgcctggcagctctccaaaaagtaccatcctgatctacgaccgaacgacgaaagcgcgaaacaaacgtatctagatatttcttccgcttatgatgtcttgggaaacgagtctaagcggtcagtatattttatcttttctttcccatcgaaccccattctctttttgtctctgtttttttttccttctttttcttcttcttcttcttcttcttctccttctccttctccttcttctgaggttcaatcgacggccgatgaggcaaagaagagggcggtttaaaaaaaacctggggctccctccttcacctttgctagctgattcgtcgagcaaggaaacgccttggatgactgacgcctcgcttgggtttgaccttttctgcgctcgcatcctatcagaaagcagtacgacctcacactatcacccgtgccgacctatcagaaccctcaaacctctagctcccactacccgtcctcatcccgaaacggtcggccctcaagctgggttcatccctcaaccaggacggcgcctcgaccacgatcgtcgacagcgtcaaacccgtcggctcattggccgttgaaccaccggagaccccgtcaaccgttctcacctccaccgggaaacacgtcccatttcggtccgtacgttaacccaaattcttatagctcgcctttcgacaggtacggctttgacgactcgagccggccgatgtaccgaacacggtcggctcctggcgaaggatacagagaaggacatgacgggaaaaagattataaacgaaaaggatctttccgggttgaccagagccttcggcgtcggcttgatggtcagtatcgctttcggcataggcgccggcttctcaggagcagccaggtcggacaatgggtccagaaagtagtcttcttgtcgtcttttcttttctcttttctcttttctctttctttctttctttctttctttctttcgctccctcctcaattttgaataacaagtaaaataaactgttgtagtcttaggtagtcagtcgttagatttcctttttccccccccaaaccaaaacgatagatggaacagaagagaaatctcgtgctgaatgttcgcacgatccggtcgagacttgccagggctttctctttctccttttctttcgccttcgccttttctcgaaaccccatttaagaaagttgaccaaaattacattccagctcataagcaaaacgaagaaatccgaactctttccccgatcctctcaacctctacacacacattaaaagaaaacatatacacaacaccggcctgtctaatcccggatgatctcccaaccgagtttctttccttcccagaagggaacgacttcgccgccatcaaacgcaaacctcttgacggcatcctcatccttctcatccgtcacctttctcaacgtgatctggtcgagtccctcgaggggtagaccatagaaggccctgccgtgaagactggcgaaaccctgcaacttgtcgagcgcagagaaagattccaacaggttggcaaccaaaggcaagaggataggagaggtgtacacgcctgccgcgcaacccacgctcgggctagaagtcgtctttgaatgagcaggatggggcgcagaatctgatccgaggaaaaatcggggatggccggaggcgatgacgtcccggagagcttttcggtcggttgggtactttgcaactggcttgcaaaagttgaacggttgaccggcccagtcatccacgaccaaggttaaatggtgaggggtgatcgagcatcctaccgtatcaccgcattgcttgacctgtgtcaagaaaaaaaaacccacagtgaaaagttgggtgagacgatgcgcgctaacaaaggcgaaacgaaaagtaaaggaagaacgacaacgttcccacgaacagcagcgacggcagcagcggtagtagcgtgttccaacacgatcttcaactttgggaaggccttgtgaatcttgaagaggtgagccaaaaacgtctcctcggcgttcaacacgcatataccctggtttgttcaacgccagcgaacggattcagccttatctgcctccctgtgcacctcgcaatgacggagaagctctaagtataaaaagaacatgctgacccgatcgtgatcactgggaacttctccatgcaagttcaaaaccatgccgacctgttccatcgccccaaagacatcgtagtaactctcgtaatcctcaatgccaccatccgaattggtggtcactccacgggggtaagatttgactcctctgatcccggccgcgtgggcctttcggatctcttcaggtgtaatggacgggtgaaggtaaagagtcataaggaactcgacatccggagcgagcgtctggaggtcggaacggtaggctagcgctcgggcggtcgtcgttatcggcggtgtcaagttgggctgagcggcaaggcgttcggcaatagaataggaagggaaagcgttgtttcaataagaacaatagattcaagcatacgaatagacaacccgttctgtcagcctttcgatcaacagctagtcaagcatgtatttagatggtcaacccatccttccaaaaggacggagagcctaaaagaaggaggccaactgagaaatccaactactgaccatcacgtacgcaacatcgattcctcctgccttgacgtggggcgtgacgagcttggagacagcaccttccctcagatgaacgtgcatgtccaccggggatggaacagagatggtggtcatgacgagaagaatacaacgaagggcggtgagaagcaacgagggtgatggtacgtcggatggtgttgtaggatcatttttaaaaaagagaaaatagaaaagaaaaaaaaccgccagcacatttctttctttttcacatctaaccatcacccacagagatcgatctcttcgtcttctcttccttttctttgtcttctttctctcccagtcactcagattagcatcatggcagacaagaggaaagcgctcgttttcaacatctgtgaatttctcagaacatccattcaggacggctcgatcagatcggacgatgtcgagggtgtcgaagtggctagtcagtctttctcccgtttctctctttacatcttccaagctcgttcacgctttaactcttggttcttacgacctcagttgaatgtatcggtgaggctttcggagtaaacgccgaggctgccgctgaccaagagcagtactccattaagccgaccactctgctcagtatctttgacgtcttcttaaaaaccagggagaagagcaaggtacgccgcttctcttcgagatgctcaaccgaacagttcatctcgagtcgaacgtaactaatattgctcttgatctacaggcctcgtctgctcctgctccagccgccactcctgctgcttctgcttcttcctcggcttcctctccgtcagcagaggacaagaccaaggccgaggcactcaagacagagggaaactcgctcatgacctcaaagtcatactcccaggccatcgcaaaatacaccgaggccatcgctctcaacggtaccaacccggtctacttttccaaccgagccgctgcttacagctcggctggtgaccaccaaaaggcagttgaggactcggagaaggctttgaaggtcgatccgtcgttcgtcaaggcttactcccgacttgggtgagtacaccgacttcattctttgttctgtgtgtccggcgcatgatgactgacacaacatcatgctcgcctttcttctcaaccagtcacgcgcagtactcgctctctcagttccccaaggctgtggagacttaccgaaaaggactccttctcgatccgaccaacaccaacttgaaggccgctttgaacaacgctcaggctcgatgcccttcatcttcttccgactctgaggatgatgaggttgctgcccctgctcctcgaaccggcggcgctggtgccggtgctggaggaatgcctgacctgagcagcctgatgggtatgcttggtggcggtggcggcggagggggagga

SEQ ID NO: 367 - DNA, 37259 bp, Xanthophyllomyces dendrorhous
gagggggaggaggaggaatgcctgatctcggttcgttgttgaagaaccctcagatgatggcgatggctcagcagatgatggccaacggaggattagagaagatgatggccaaccctgctatcagaggaatgttagtagcatatatatattctccctatcggcactgtctacgagccacttgctgatgatattttctttgttccgtagggctgagaggatgcagagtggaggtggacccccttcgatggccgagatgatgaacgacccttcactcaaggaggctgccgctcagttcggcgctggtcaaccttaaaaacagaatctttcttttccctctcttgtcctttttttcctttttttttccttggacgaatacacctgtagcctttgtcttccctctacctcttttatcccacatttgatgtacttgcccttttgaaatggttcatgtgtgtcccggttgcgcgtaatgtagatggtatctggcaaaagcagtgttgacgcgtcgaaaatgacaaaaagtgagacgatcatctttgtcggagggtcgaccgatcagaacgaaagaacatgacgccaagtttcatccattcctcatcttcaccagcccaactctactgatacatccgcccagaatgggttaccctgagtccgaacgccatcagcaagacggacagtctggtaaagacagactgtatatcatcatcaccggtgcgaattctgggatcggtctaggaatcgctacacgaattctcttccagctcgcttttacctcttcttccacggctcctcctccagattcactaccccaacaagcccttcttcagttcacatctccagacaccggttcatcagatttatcatgtccttttgtgaacaactcaggaatcacgctgatcttggcgtgtcggtcaaagtcgagagccttggaagctcgaggaatcttgttcactaggctgagagccgaatgcagaaacagaggactcaaggactctgagggagaaaagatcgtgaacaaggtcgagatcgtttgggaggctctggatctcagcgagatgagaagtgtcagtacgtttgtagacaacgtgaaaacaaagtgagtgattggtcttccatccgagccaaccttgttcaagaggtctaatcatgagcgtacttctatcatggttctgtttctccttcacgacccccaaaaaatgaatcacggacaaagctatccatatgtcactcatttgttcaacaacgccggtgtgggcgcttgggcaggtatccactggccaagcgccttcttcgaatgtctgaccgatccgatcaagggtatgaccgatccagagttcaaaaagcaatatcaaggttggaagagtgagaaggatgggcttggctgggtttggcaatgtaacgtgttttcgcattggtgtattgttagtagccgaacggttcttcgcaatctgttggctctgttgaaacgtttggtttctctgcccgtcctgacccaaactgcttgaccctccaccttctctttcaatcaagacgaaagcactgttaccgcacatccaacggtctccgtttcatagtccccggatcatctggacatcgtctctgctcggttctaacgcgcccaagctaaacttatcggaccttcaatgtattgagtccctcagaagttacgaagaaagcaaacgtcaagtcgatctgctctgtgcgtcactcgacagagaacttgcgagtcaaccgttaggcatcagatgtataaccggtgatccggccgtcacggctacagagattttcagacctcaacttggattttggttgtatcaagcgatgatgtttgcgttctactttgcaagtcctatcctttcttttttttcctcctctctgtgagccccctgctaaccatctgcagggtacgcacggacttcctgttgatcaaatcctctctcccttgaaccgtgttctacaggttcggctggtgtgcaattcacagaaccacccaatctcacctatgaacggcacgatcacatttgtccatcttgctctcttgtctgcctccttgatccctactccttcctcctctttcccttcatcctctacgtccaaagctgagtctccgacaacaccaaccgatccaccgcatacccaacaggcattcaagttccggagtcaggccgacagatggggtaatccatatgtgtctgtcgtacagttcgaatgggacgaagtggaggccggtaagttagtggactacatggagaacttgaggcaagtatggggcaaggctttgggagggttagggtaccaatcttgagatcctctttctctccttatatctcgagccgttcttcgatgctcgttttgaatattgtataaattgagaatgtacacaaatcaggtctcgttcaatacaggtgatcatccatcaaatacaaaccaagcaatgccatacaggtacaggtgagaacacaacagaaagaacaaagacaggcagagacaggcaagaacgaagagacttggttcgttcgctttgaggagaccaagcatttaaagcttagctttggcactcttcaagacactgtccaatttggtctattgttttcataaggtaactgtcagcaatgtctcggcgctacacttgaaataaaaggtgaacacaagggtcgatgttgatccttacagagagcatgatgtttcctttgattttgagctgtgaaatatcaaggtgatctcaacgtcagtctcataactggtaagcgaaaaggactccaagatgtccaacagtcaactgacctttccctatagtaccgattcatgatttgagatgacacaacgtttaaacgcatcagcttgtgagcatgtttgatcaagacatcacgatagtctacttacgctcatgaatgcctgagagacgatcaacccggaagcaaaaatcctgttggttaacgaacgatgacagcgtgggatgaaagcgggagaaaacgaaccttttgagcactattcaagattggttttgagtcaaggcaagggtcaaggttgtcagctttctctcacgcaacaggtcattcgttttgatcaagaacgaacttgagcgttccatcagcctgttcaattcagaagggtgatcagatgccagttctaatgcccattctaaatcagacaaagaataggcaacataccaagctagtgaagacggcatcgtccataaagatgattacatctgatatcacaacgaattcaaatgatcagccgatgcgcgctctattgaaacctacagagagacaatgaggtcgtttgatatgatgaaacacgactatcgacctaccaggtttgcccttaggccccttgacgacatcgccgtccttcttgagatcaatcgtccagatagcttctttacctgcatttttgatgtttaattggaagattccgtttgtctgaatgatcaagatacccaggtcacgttcttgttgaatcgatgtatctagtgcctgggagagcagaatggggcacatagaaggaacagaccttcttgatggttgtcttcttctcctgctctgacattttagaaaggccgtctccaagggcctagttttattcgattagagagatctcagcacatgttcaataggtggacatgaatgatggagcgaatcaagacaaaggtataacgaacggtcaggatatcagccgccttgaatccctcctcctgtacgcccgatcgcatttatccatcattcgttcgtccattcgttcgagtcatatcgtaaaattcttcatagtaagtatgattcgactagcacatggaaagcgaacaatcatctaccttaagatcgggagatccactagacttcccatcagtccgctgggatcccattgtatcagaagggttggataccatattgcctttttccgaagaggacgtgttagagacaggaagaggttcgttaggagagtcttttgtctgaggaacaggttgagatccagcagaggccatttgagaggatgtatataagagtttctgttagtgaaagtcgaaatgagtgtttgtacttttcctttgctctctccatcggacgagcatctttaggaagcgagctctccggttaaagatgttaaccggactgggagtcacgtgcgtcatcattcaagtaagtgcacgcttcatcaaagtcttcatatatataatgtaacatgcacagagaaacagatggacgacagaatcaaccgactcgagaagcactagcttgataagcagactaatgaattatagagggatgagaacaaggtcaacatccgtccagagtaagaagaatcgaaagaatcgagtgacagtggaacataccctaatctcctcgagactgatgctactcttctcgcacatcgaccggaagattccatcagggttaagatacaagttgacaggtgtatcaaactcgacgatgcttccttgatccatcacgcaaatccgatctgtaggaatgtatgtggagatatagcagatcagacgaggtgttctccggtttcaagtataaggaagagatggacggaccgtagttgagaatagttctcaaccgatgcgcaatacaaagaatcgttttgtctctacatgattttatcaagagtgtagaacgtgggttagaaatccaatagcaacaagagacggttgaagttgaaacacgaacttgaactctttcgcgatggtttcctgaattttagaatctgtttccatatctacggaagcggtggcttcgtccaatacgacgacctgatccgcaccgaacgatgaatgaaggtcaaatctctgaactgacaattacccacaggatatgacaaagaaagatgtgactgaccttggcatcctttgtcaacgctctagcaagtgacaccaacgacctttcacccacactcagattcaacccttcgtcctcgacaaccgtctccaacgtaaacttttgactggatgtatttcccgaatcggtttctgtcaagtaagctcgtttcatagcgtcccaaagtctatcatccggataaatcccgaatggatccaagttcgatcggattgtgcctacaaagtcagaagaatcaggcataagaaacagataagcctcgaagtgatcatgtttacagtcgacacataccgctaaacagaaggggttcttgtggaatgatagatagccctttacgcaagttagataaccccaactttgagatatccactccgtcgacttcaatccggcctttgctaatctcaacaagtcggaagagtgcctgcatgatggttgattttccagctcccgttcgaccccttttaggatgtgaagaacccacgtagcaaaagagaaatcagatgagccgggcatgggtaagagttagaagaaagaccaacaaccacgtacacgactccgatcttttctcctcccttgacttccatagtgaatcctttcaagacttcaggaagaccaggccggtagctcatatgaaccctaatcggtttgacacaaaccaagtaggacagtatgtttcaattttcttacaactgaaagccttggtcttctttatactgatggaacttactgccggaaggagatcttcccctcttgaggccaagaagcgggtggtgtcgtctcagggatatcatgcggagcttctatttgtagctcatcagcataatgcagaatctagtcgatgaaccgaaatccatttgaggtcaacatcttttgataaagaaacacagtgaacaaaaaagaacttgaaaagcttgactaactcgttcgacggaggtagagtcattctccacctcggcgacttgactttagtccatggtgaaccacaaaaagtttatcagatatacagtcatatcctgcgctaaatatcaaatcaaaagtaaacataccggacgagccaagagaacgcctgaacgatcgagatcacataaccaagtgccaaaccagcttcggcggcagatatatcatgaagggtaatcgagagaatcgagcagacgagaaccaataggttccctagagcatcgatcctaactccaagccatcgttgggataaaattgtcatgtagtacgcctgccacatcagaaagatgaatggtttatcgagtcgttcgggtgatcagcgctatgaggtcattatgagagttagaacagaacaacccaggctcttactcggttctcataatcgatcatgacatgattctcccgaatgaagcgagggattctaaacaagtcggatcatcagataaagcagttttgacaaattcagaaatagcttggatatcaaccataaccttaaggaggcttgggcttactctccatatgctcgaatggttgataatccattcagagactctccaaaatgagaatagatggacgatcgaaggatactgtccaacctcttgagctcacgagcagtccgccgatagaaagctaagatggttcaagcgaacaggcttagatgtctttcgatgggaatgcatagcggtgtagaggaaaaggaagactacacaccggcaccaaggaaaagacagtagaatacaggtacacatgcgataaggaagtctaagaacgaaacgaagccggtcagtacatcagtattcgcgcaaagaaaagaggaagatagtctctgccgtacagggttggacaacagcaatcagaatgattgaacctatagatcaagctccgtacgtcagtaaaagcaaatgaaaatcatatttcaaagaaacttcatacccatgatttgggagagtgtgatgatgaccattcggaaaccttcaggaagttgattatcaacgttatccatatcttttccgaaccggttttggattcgtccctgcggttttggcaagatgtgagtggacggataataatcagaagcagattcacaaagtattatattcaagaagactaaccaaaggagttgtatcgaaaaagctttggggggccttcatgactcttgcaagagcttgacggtgaagcgacacagacgcatagaaagtgacgaactaaacggccattgtccaacagagatgatcagactcattttgggcgctaccgaccaaacagaacatgaatataatcgacagtttcactcacagcaaataccgctcccataaggaatgtactgtatgagagaaagttgtatgagtactcctctcaagacatttcggtacataagaagatggagtgaaccaaaactcacaagacggcagaagctacagcgagtgttccatataaagtcatatagattcctatgggaaagccatacttgccctctattgattcgtaatcaaagattccaatccctgcagcatcagcaaccaacaatcccaacgcatctcgaaagaagataataacataagaacggaccttgccaccagatcaggacataagatgtcatgaccgttgccacttgagacagacacatcgtgatgagcaacatcgggactaggattactcctcttccagctttgaaataattcttatacactctcccaccaacagcaccggtgtatctttcttcggttgttatgagtttgtctccctgtttggtaaatctggatcgatcctcaggtgcagatacaggttcgggtatatgtggtttagtttcctcgacatcttcactacaacagaaagaacaagggtatatatgagtattggaacttgaggggcgccttatcagaagagagagaaagagagaagagtaacacagacactacatcttctattttctgttcatcgggttcctctacatttccgaaatccttcatcaacctagagaagctgccttcttgtgcgatcaacttctcataaggcccttgttccgcaaattggccgttatttatacaaatgatgtggtcaacgaaagcaagaaaatgaagttgatgagtgaccagaatcctggtctttccttgaagtgcgccgtcgatcgcattatagaatagagacttcccgacgtgagcatcgacagctggcagtaagtatcaagtgcatgaaatttaggacccctatctatcgtaggtatgatggtttatcgagcagagggagagcacgcaccgctcaacgggtcgtcaagaaggacgatgtcggcatcaaaataaatcatccgagcgatcgatacccgctgcttctgacctccagacctacatcgatcggtaggtttgaacaatagtcgtttttagttgttgttgttgttgttgttgttgttttcaaatcagtaagggcgcggaaacagaaaggaaaagagaccaaagaagaccaacaagttaattcctttctccccgatagcagtggcatctccacctgacaagatctccaagtccgcctccaagcttgcggcccgaacagcggcccaatacctttcctcatcccatggttgtccgaacaagatgttttctctgatcgttgcgttctatttattttttcaagatatgacttatttagcgctgtgctgaaggaaaagatagcatatgaatggtagatacctggatccaagcagtttgagggcaatatccaattgaaccggagaacgtgatggttccagcggctagaagatagataatgggttctcttaagacttcgtatgacaatatgatgagcataagaaagttcaacgatcaatgagacgtactctttctcatttctcctatgagcgcctgcaacaacgaagatttaccggagcttatcaagatataagcatccagccaggtgaccccagcaagttaccaaatggagtcaaatcgtgcttggtgatatcaaaaagaattgagcgctgaggaaagaaagaaagaaaagaacgtacccgacagctcctacaacagccacaagttgccctctctttattctcatctcgacgttgttcagtccgaaaggtttttccttatctcgtccattgtcctcttctcctccttccttagtttcggaaccggctggaccaacacctgcaccagaaacgcctccttgagtctttcgtttcccaatctttgactttttatttttctttgttccttcttccaatggagcagccgcatcccactcgaacgaagctccagaaacgtttattgcgtattctgaatttggttcgatgatctgatcatccgacagtgttttcgcaaggaacagctgtttgttagatgtatcaattccaacccgatagaaacatgagtcagaaccctatccagtcaaatatttaagatagcagtcaacaaagaaaggaggagaacggacagtttcgagtcgaccaaaggcatgaactgcatctgtggctgaactaagagccataggaagcatcgataatggaagtctcagtaactggaacagagccagactggcaaagacgtctccgatattaaggccgccgtgagttgctccatagatcaagaatgatataacagaactcaggacagctagattagaggtagtgagaaaagtgtttgatgttcgaattagacttcaggtttgtatgataaaacacgatggcagggagaaaacaaaagagagcgacgtacgaagacagacagctaaagctgtattggcagatcggaccaagaggaggttcttgatgtacccaagctcctgcgttcggatgtgattcagtctatccagatagggaagctcccaagctgtttttgaatgcactgcgtatgagaagtcttgcaaatagactagatgaaggggcagaaaggaatggatagacgaaccaaagaatttgatcaacttcattccgttcaagagttcagacaacaacttggacctttgatccgtccaaatcattgctttaagtcgttgactaaataagactttcattgctttagtctgcagaggagctgtagtagcgcccattcattaggccgtcagctgtcgttcctctttgaaagcataatgagcgacgcttagatcactgaaaggtgacgaactgataacgacaaagaaaacaaatccgagaacggctgcccatcctagattgaggcatagaaggatcagacagatacacgcctgaatgggcgagacgattatgagatggaagaatccagcagcgaaatcgatcctcgacctaaacgtcagaatacagagggaaagacaaaagctagaacgttagcattgaaaagaggtaattcatcggaacgagaagaaaagagttgcatacacgtcagtcgagatgtggttgattaactttccgtgtcctaagccgtccaccctctccttgcctgtcagcttgagtcccttctcatagatgcaagaaatcaatgcccctcggagcaagactcccgttcctgtggatctatagaagaactgtaaggaaaattcatacgaggggaaaggtcagtcgagaggaaactggggatgggaaggagagttgggagctacaaacttggtggttgcataacgaggccaagagaatcattccagagagaccgatggcagcgcctacaccacggccgacattaggtggagcctgaccattagctctggctgtagaagattgtttgataaagttgatgatgtatttgatgagcagcggagtcaagatctgattacaatctccaagcactagcaacgcggcaagagtggagcgggaaaagggagttccgaggtaaacaagaatcttttggtcagccagggagaggcgaaatgctctagtgcgttgatcagaagaaggtcaaactgactcacgtttgtaggctcctccggtccagtaccacttgaagatgacctcgttacaggcatacattagactgggccgtttcctgccggactttgttctccattcttcttcactggccttggtgatcatccaacagacacgtctaaagacgctgggcttgagctctccgttggcaagcatggtgttgtacgcgtcggcctctctaactcgtctctccctgtgagcggaacagaagagtgatcaagccgggttaggattagacaaaagcacaacaatgtgtctggtagttcattgaaacacaaagaaacccttaccaagcggccataagtttatcactcagaatcttggaatctgcaaaatccttatcgagaacccatagatcggtgtcttgtagtggccgttgggagcctaggaacatcatcggctgtggccaggtaaagaaatgcctggagatgatgcctgcttgaaactcgggtgaccggggcgcgtcgtccatcgtacgagggggatgaggaggaggagtcggtttcgaaaaaggaatgaacgatttcctaagcacacaaagacaaaacacaaccgtaagcctggatttatctggaaagagaaaagaacagataacgaggaggcactgaccaagtgactttcaagtcctccactccacggccatactctttgggctcttgatcgcccttggcatcatcaaactcgtgtttttctaaactggacgggtcactcagaatacccttctcgatatctcgctcggtctgtttcgcgggtgcggaggtgggaagggtgactgaactatctggattagagaccggaggaggagggatatacgttggtgcgtcgaacgttctgtgaaagcgggaagagatgtgggagaaatatcagcatagcttcctactctcggcccaacatcgatcggacagaaagagcatgaaggcggagaagaccgaacggcgctgtcgatacagaacacaaatgaaaaggcgaggtgaaagagaaaaaagtggagaaggagaagaaacccatagacatctgactcacaacggtttgtccacgcctttttccacagtctccccatcagcaatctctctagccagactgagatcgggtccccttgcagtgtcgaattgtccgttcagtacgattctttcgaggtcttgtggtgaggtaactatcgaatcggtaccagtcgatcggaaagaaggatctgaattatcatgagagtgcgccatgtagatacgtttgtgctcgatcgagaaagcagacaaaatgtgagcaagatataactcttttccttaagaacaacaatcgaaccgggtgaatcgaggaaaaaagaggatgaatgaatggtgaggagaaaaaagaaagaacaagagacgattagttatattgcttaccgaggcttgttcggtcaagtccgacgatgaacgattagaatctatcgcccatactctcactcttactgtctgtttttctgtctttctttctctttctctccagttttgaatcaatcagcttgatacattgtatctggtgtatgtccaccgtcaccgacatccattcattctctagcgtctgttgtcaaactgtgtctttgaccgtccgaattgttgagcatcctctctggtcaaaacgccggtcggggaaattctttacagtgatggccggaaaatgagagcgatcgttaattaggtaatcaacatatattacataagcacatttaaccctagcattcatccttctacccatactctccttccatccatctgccagagaaaatcctgaatagaacagaacaaacaacagcgagggatccttcgtccatcaacttcgcccactcaattgtatgtccataagttgaacagatcatgagagttcatgcttgtacttgtactaaagctcttgttctttctgctgcttccgctgatttcgctctgtttaactgctcgttcggcacggccagtcgcggttccatctaacgtcttacaaatacccctcgcgtaccctctccccctttcttttgtctcgtccaacagatgagagactccaaccatacgttccctacacagaacagggcgtgtgtatgtattactagtgcgttgtatgatcgtagaggtaagtatttcttctcctctcttctttcttcctaggtgtacgcggcttgttcttccttcttcccaacaaatctccttcaacttggatagtcttcttccggtagagtgaaacaaggagagagaaagagagcagccacgcaatacacatcttatgagaccgtctccagggctagcattcaccagagtggtctctgtctttccttcatactcatccttctaaagagggactgcccttgtcatcgagaaacaagattcagatccggtcatccaatctctcacgctcatctgagtcaaatcaacgtgcccctttcatcttgttcgcgtcgttgcatcggacgttgttccatacctatcctcttgcacctaatcttttccattctcttgcattcgtcacgtttgtcggagtgaaattatgagtttgaactgatcttatacacacgctttcccccccttgttcggtcgcccgaccttgaaaccaaaccagccctggatacaacatcggccctacctctcctcaattctctcacccatctcacatacctgacctcaacatctccccgaatcagagaaatccttaccctcgacggcggactcgaacgacttcttcatatcctccgaaattcttcgatccctcgacctctaccaccgcctcctgatctctacggcctctccctccatccagccatcccagcctccactggactgctctccccggatcgagcaattgcctaccggttctcactcgcctttcaatgtgttagcaatattggtgtgagagggagtgaagccatccggaccagagtggtccaggctggggtgctcgacattgtcgcgcaggtattggagatctggttgaaatctaagggaatgtctatcgaggccggttcgtctggcacaggtgctccagcaggttcccatgtatcgagcagacgtaaaccagtgatccctccttcctccaccaccactaataacaacaccacaacatccggcctgttcgaaagtggccacgaatctagggtggctcgaggcacgaccgacacggcctcagtaccaaatgcctcgtcatcgttgacgaccgctcccaccgctgggagaactctagacatggcccctagtcgatatcatacccactccttacaaaccagtctgatcactacgtccgaacaagatctctcatctcgtgctcatcatccgcgtccctctcaccaccaccaccaccatcatcatcatcatccaacccaagttaatcagcatgttgcccctggcgacagacagccatccgccctgacggccccgacctccctatatggtgcctctagatcagatcacgacctctcaaatcccatccagcccgtcgcttcttcatcctcttatccatccggggcgacttccatgtccatgcccagctctttcaccaactctggtgacgaagaaacctcggatgtgaacgaaggagagagtagtggagcatctccaacgacatatgctgccgtcgactctgaaaccggccgagaagatcttgaggaatcggagataatggatgtcgagatggccttccaactggctgtctcggacgaggaaaccgcccgtctcacagctatagccagtgctgcactccaacggttctctggtgatatctcattccgagcccccgtccccggaccagggactatcagcccaatgggcgagccgtcaggatccgacaacttggccttcagacgatcagatcaacaagtggaaacagagagtcctacacctagaatctttcagggaactctccttccatccggcatgaccgtagaacccatcgttggctccatatcggctgattcaagtcgacggccatctcctacgagatcactcagtaatagtgcaaacacatccgccgactcatcccctagcatcccatctgcagccacagtcatccctattgagccagccggacgagtgaccacagctcgacacaacacattgagagctccgacaagaccgcctttcaacaaccaacattccgacgtgagctcggctggaggaagcaacgtgtcgaccccgatgggaacccctactgggacggccaatcgagaacgaagcgacacccttatcggtcgacctactctcgccccccgacgtaggaatcgaagggaaagagtggccacgcctggaaacgaaagcggcacgacaggcggagaggaagaggacgccgacgaagctgatgagggagagttagtaggtgacggagcaggggctcgaccgattggacagacaggaatcgacggggctgttggcggagccggagccgcgttagaggtaggtattgttcaagaggaagacggagcaacagacattgagtcgggcctggttgacggagatatgttgaatcagaatgtcgatcttcagatgggagctcctccaggagcaccgggagcagtcactcctcggacggccgccgagatgacacctaggcagccgtttttaccgatgacggatccccaagtgggtgttggagcagcaggagttcccggaggaaatgtcggtggcgcaaccccgctggttcgaccaactcaggccttgggaggaccccacggaggaactcttctaggaggtgtcaatttgaacccacctggggtcagtctggctggatctccaatccaaaacacgatcggtggcgctcagaatatgccagggatgacggcgccagccgtcgtcgcgctcgctaccgcccaggcgacccagcgaactcttcgggacctcagtatggagaccggaccatccaccggttcaaatgagcactgctacagggacgacgacgtcttgctttctctccaactcttagcctatctttcaaagtatccgcacgtcagacaggcgtttcatcgaccaagagaaccgttccacgcgaacctgtctctcaagcttgcaccgggtgaagcgccacttccgatgcggcctcctctgtcattcacaccaaacatcttttcactcgtcgaacgattcacattcaaaccatcggcgacggacccaaatacacccatcctgcctgaagagatcgtctactgggcaggggtcatcatgcgaaacgcttgcaggaaggacgaaggacgaggtgggatcagacagtgtgccaacatgagttgtggcaagtgggagagtagcccaagacagtttgcgaaatgtaggagatgtaggaaggcaaagtactgctcaaaagaatgtcagagcaaagcttggtctgaaggccatcgattttggtgctcgtgagttcttgttcattcacatttgagatctgggctggtctttgttctttgactgatgctgacttctggactggttctcgaatatccaacgggaccatcatctcaacgatagccaacgaggcgagactggtgatcgtgcagaccccagtcaagaatcctctgatccggtctcttcccgtggagacagacaccaagggactataccaccccctcctgtccaataccaccaccctgcccttcaccaccaacacgccggtggtcccgaggcaagtccgactgtaggacttgttcatcctcgaccgcctgctcatacgaggacccgaacccggacgaacaccaacccgacgatcactcttccttcgctcagaattccagctcgaactcaggggatggatgtcgatgtggacactgctgaggcagatgccgacatagatcctaggacgatgcctgtaccacctacacctaggcctcaacctatcgggcggacggacggaccttctttacctggaggccatccttccgttccgttcgctcgagccagaacagatggacttgattcccctctgtcaacgtctgagccaggaaacggttcatcaaccgcggcctctacaaccgtcccagcggctcctacgctctcaaggtttcctcttcctcagtggggcttggacgtagcaggtggcctgttcagccgccctgagcaaccaatgagatcgtccactttgccggctgatctcggccagagagcttctcattcttcttccagcttcgttcctcctccaactagtacaacggctggttctaatcagagttcttccagctccaacaacccaaacatcaactctcggatacgtgctcttcctcatataaccaatgcttcactcactgcatcgtcaacctccttgttcgcccatccagccaattcaacttccaataccggctcggtctccaacttgtctcttacggcggcttctgccggtgcaaactctggatcgacgtcttctacatcggcattctctagggcgttccatttcgtagacaggctcggcttgggagggaataatcccgatcgaacatctcacgttcctggtgctagcgccgatggtgtgcagggcgaaagaggaatagaacaaacaccgttcggacaagcgccttcagcacctcaggtccatcatcgacggctcttcttcagagggtccaacggtcccggtggtcttggtggagagttaggaggggtaagcagaacgggacatgatagtgagatgtcgggttaatgatctttccggaagcgttctttcttcttccttcttcatttctttgtctgttttcttcaaaccaagagtcatatcaagttgtatataagtcaaatcaaaccctcgcgagcagaaccatggggatttcaaccccttcttcccatgaatatagtctctcaagaagtcgagcagcctttctctctaaatcgtaaaccaacgtcaagtcttgccaacgctctcattcctttccgtcctattgtgatccctattatatcaatggatcctttgcatccgatcatctctacctttccttgttctcaaggttcttcttttcttctgtgcttgaatttgatacactcgcttataataattccattccgaacatgccaaagtaatccttcttttccttatgtttataactcctagtgatttttttcttcatgaatttattcacaagacactcgttctaggatttccacagaataacaaatgagtggatgaatgagcaaacgattgtgagctcgagtggaccgagaaagagagagagacagaggatgtaacacgtctctttcggcaagtgctagctctagatcttttcattccttgagtcgtgtctcctatcttctatctttcaatttcctagttgcattgtgataaattccaatgtatataattttcttctctccgttctttttttgttctttgggctagtttgatttagattattcatctctgacaggttttaaagtggctgcctgggcgtctctagcggatctgagggaggcaggaatacaaagtaggatggaagaaggaagaaaagatgtgagtatcgataaacacggacgcaaagaacgatatcctagaagagatgaaaggagaaaactcacttcacaaactcggtgaaccaccttctaaagttctttgcgtccaacgttcgaagttggttcaaaaagtcagctgctgtctcgggcggacagttgatcgatgggaagaatacaccgcctagtctatcgaaagcctcctgtcctcgagcggcaacgactgatcggaaaagattgacaacctcggacataacctaagttcgtacggatcagaagagtgagacagtagatacatggaaaaagaatacacatgagaagcaacatacaagctgggcctgtccgtccttgatcctgaaagcagggttagaaggcacctcaaaacagagagggatcaatcgatcatagatgtatccttcaaatccagggataacttgagtcgtaggcaacggtccggccacattacttcctaccccctgagttccggcaagtgtcactcgggcggccgaggggttcgtagcccaggcgatcgtcactctagataagatgccgaaggctaatttttgaagtaccgggtctccgaactcggatgcgaatccaatcacgttgttcaagatattttctaattcaggcttgttagctttcaaaacgttgagaagagggaccataacaaagatgtatcagcgtaaagaaaccagtaaaaaaacagatgtctcatcatagaaacacatacttggcgaaaggaaaacggcatctagtcgagcacccatgatggacgcgatgaaactgagataagcggctcgaagagcattgtgagagagctcgtcgtccgttccgctaacgggttcagccaagatttggaacaccttttgaatcaccggaaggaccaagccatccagaacatcgaacaagttatcctgaagaccatcatcaacgtttaaactctgattagtgacacagtgtctagcgattggtcattgcaaacagtagatataactgtaccttcaacttgtgcaacacaagacccaaaaatcctaggaactcgacaagttcgctgggctcaaactgggtgacgatacccttgacgaacagcgcgacgtactccaacacccgttgactggcagtagtaactattcgagcgaaagagaaccgagcctggtaaacatgcaaggaaagactgtcagaacacatgttcgagcaacctggctctacagatttagctgggcattaagttatgaacaatttggactcacagcatcacgaatcactttgatagtgttcattctttcaagcacagccaaaattgcttcggtcgattgcttgaacacagcgatccacggcggaggtgcggcagccaaggcggcatcggatggttcaggaaagcctttagcaatgtttcccatggccatcatagagtggtgcaccagaaggatcgatgcgatatcgtcgggaccagaggcagcgatttgaagattggaagagatgagggctagtaatggattgatagcggcctatgaaggatgcatttagtagagagaagagaagaagtaatgagccaaaatcgttacatatcgacaaacatgagctagtatcatacctgtaagaaagccaactgctcgttgggagagtctttgaggacggcaataaggattccaacggtttcaaacaagtagagctgagcatcgaaagcggaagcggtcagagtggccttgaccaaaagatcctcctctggggactcccgagctggaattactggcttgatcaccagcaaatcctagaaagttgatcggtgagaatgtgagagcgtggagttaagtatggaggaactcattgtcttttctaagcgcaatctggaaaacaaaatggctacttacgctcattgattctagaatagaaggaaccaaagttgagtttaacgaagatttgacgtcccgaacaaacttgtggaacagatagaaggcacgctcctggacggcaggtttttcgttatggattcctctgtagaaagcgcataggagagaagaaatacttagcttccgagctagttcgaagacggagccaaatagtaaaccaaaggtaacaagaagttcagagacgtacctagtatccaacaaggaacctaaagtgggctgaatacaatcaattctcatcttgaaaaactctgcatatcgcgaggcacattcgaagaactgcaacgggactgctggatgagggtaactcgagatgtttgactcgactgtgctaatcaaaatttgtccctgcaacgttagagggagcgacatgtagtctacattcactttgggtgtcgaggcgccagagtcggtcatcccgtctgacgaagaaaaggaggcttttcgggttttagtgctagaagcaatcgccgcctgaacgtctggaggaatctctacgaaagctgcacgacccgccactgatatgagagtaaaaaccgaaccaggggttgaatcagctcttcattcatgtaaaatctttatcatcaagtctatacgtacctcgagtcacactaaactcgctccagctatataccaagaagagcgccagctcggcctgctgccatgtcacacctccagccccttgggactggaaagtctggagggtcgagagaatgaagttcgaaacgcttccgacgaaaaggtccggatcgatattcgcgatagcttccacagcggttttgagttgcttcagacatgggaaacacgcattgaagaaagacaagtcgtgggtgttagtcaattaatgagaaagagcataagaaatagagagaaaagcttgttaccttccgcatggtctggaagttgttgacctcctcagggtctacatctccgtcttctcctcctagactccaatcagcatcccgtccccactccattttcttcataatgacattcaacagagacgtaaagaacgctcgtttcgaaggcgacaagttcagagcctctcccttctttgcgcgcttgttctacagaaatatttatatatgatgtagacatgatgagcgatcatagaacatatcggaggtcgcagaaggaaggaactgactcgtcttaggatatcatccaacattccaaacacggctgaactggtatcagtgctgacgtcccccaaaaagttcaagaatagcggcagactgagttccaacatggcttctgcctcaacttttgtcttgtcttctgcaagggcttcaggcggaacaatctttcctagttcgattccaaagttgttcaacagcttggctgttcgttctctaaactcatcaacctctccgccatcacctgcgccggcccgagtactttcttcgagcgggctaagggcgttaacgatagaaaggaagttaagaagctggatcttctctcccggatctttcattcctttgagcgtaattcgagagagaacatcaagggaaagtagacggaaggggaaatgagagtgctgaagcagtcggttaaggagatggagggagtggggagtcacggtcatggtaatatccaaccaagctttatattcaaaatgacagtcgttacaaatcgtgaacatcgtgcgagattttaggtggctgggaccacaactgagctaaaaacgaggagaacggcgagggaacaagtactcacggacgtagcctccataagccttcactgcccattcgacgacttctgcccaaccttgtccttcaccaccatccattcgccctaatgcctcttcccaaacagtcaagcaagcgtcgtgcatggccggtgcctctctttccctcatttcgtccctcaacttggcgtcccgctcatttctctcctgcgtccaagctcgagcgctcttcaaaagtgtatcatgtgcttcctggttgatctccacaatggtgtgcaagacgaggagggtggtatgtgggttcacttgaggctttaccaggattagcagggttgagagaagggaaggggttgaggaagggagaggaggatactggagagtcggataggacgagatgaagaggagggcgagggtatgggacactttgttccggagcagggattgaactatagtttattttgtgccagaagtaaaaaaggtaagcatgagaatgtaggcagcaagaaggaagccaggtaactagaaggattgcagccacttaccaggaccaacttcagcagctccgttgacaaactcggtctgaacataatcaaggaaagcttgctggatggcagctcgtgattctaacgacagcgcatccgttctaaaaaggagggacaaaaccatcgcgataactttttcaatacgagacaacgggccacaagggaggaaaacagaaagagaaccgactcactttggtttatctcctagtagttggtccatgacttggagactaagaactctagcctcgggtgagcacttctggtttccatcttttccaacttcagaacttgatggtgcccctgcaccttttagaaagatggatagagccaactgaacgacgaaagggacaaggacaagaacaagaaccaaagagcagtgaaagaagcgccctcatatcagtatgcttgcttaaagagtggctgatagaaatctctatgatgactgggattgagtcatcattgaagagagagccaaatattgggtcgtccgacaggaacgatatagagcatatggacatcggttgcctacgctcgcaaagtaccgatagcaaaccgagacagaccgaagagaaagaaacttaccggccaccattgatcacaatgtatcactacgtctcgaagaaaatcgtttgcctgttgcctgagagattgatctggcgaagaagcaatttctacagcgtacaagagctgcttgtcgtccatgatatgtgtgtatgtgtgtgagtgaatgtgggtatgtgtagacttttgtagaagattgtctgttgcgactattttgtttttatcctctgttttactggagaaaacccctactcttccgaaaacagagacaacacgacttcaacagagaatcggagaagccgagaaaggaagggaaagaaaagaaaagaagcgaagcgaaagaagaaaggaaacaaggaagagagagtgaagaaacggtgtttgtgggtggaagagagaaagagaaaaagagaaattctattttcttacgttttcttctaatcccacccggtcgttttccttgtgttcgtcctatttccatcacaacatctctcttctactttccttctttccttctcacatgtatggtcgtgaacgagagctagacagtaattgaatgccttaagcaattacggtcaaggcgcatacatgtgtatatttcataactatcgaacatgtctttacagtgtacaaccggtcgattctgtatatgtttccttgtatatcccacagacctgaattctttttggcttccggataacaagagcccaggcggttcatcctagaaggatatcgatagtgtattgctcatacacggatcaatcgaatgggtaaagggcaaaccttgacaagcactttatggtgttcatgccgaaccgagagagtgcttggccactttagaatgggcgactagtccaatgacaacgcaagacacggtgaagccgatactttatgagagattcagtatgtatatggtccatatgagatgggtatcaagtagagaagagttcgaaacctgttggctcaagtgaccctcgaaatagacaacgtctgaatgaggtcaaacgacgtacaactttgcgaacgtctgacgggatatctgacgttcctcctctgatgttcgagcagacgcaaatatggctagattggaacagaaggcgatatctgattaggatagcatacctcaaaaatggacatagaaaggcatgccaccaacctctgagatttggaaaggaagacatcctggatgttgtacttcttttaaactatgatagccagtttgtacagtgttaggaggctacacatagcctcgaggcgtgcctaaacctcacgtgcttttttgccacacgtgactcatcatcaaagcgcgtctttcgtgcgcttccttcgtctgtccttttttttcttcttcttacctgctcttcacctcggaacttcttgcatctttcagcatagatacacgttacaacacttcttgtcaatcaacaaatatgacttctacacctcccaacggtccttctcgaagcaggttcgcctccagagctcctatggatatccttaccgaggagctcgacggccgagttctctttgctattcctaagaaaggtcagtcctgccttaagttgcacccacgttgttttctcattagctcgtctcgaacgcgtctttgaacttttattcctcaacatttctatctcctaatcaacaggacggcttcacgagaagtgcatggagctcttgaagggtacgcgttactttccttcctctttcttgcagtgtccaaccagcttactgtctatcactcttaaaaggtgccgacatcaagttcagtagaggacaccgactggatgtctgcctcgttcagaaccaccccatcgctctgtatgtgtgttgttctgagtcagactcacactcccatcgttactttgccatgtcttttctcaccttctcccatcgtcatgatttgccttggtccatagcgtgttccttccagcttcggacatccctcggttcgtcgccctcggaaacgtttccctaggaatcactggtcaggatgtcatccttgagtcaactttggcttctcaaattaccgagctcctcccgctcgactttggaaaatgtgctttgcaggttcaggttccggtggcctcgccttaccagtcgctcgaacagttggccggtaaaaggattgtcacctcttttgaagtcatcgctggtgagctcttcaagggtgtcgatgagaaagctcaggctgaggatggagcaaagacgagcgtggagtacattggaggtagtgtagaggctgcttgtgctttgggagtggccgacggtatcgtcgacttggttggtcagtcctctatgcatctttcttacctttctcgtccttcagtagttatgttagcttttttgctcaagagaagaattggaaatctttattgcaccccttcctgctctgtcttcctcagaatctggagacaccatgcgagctgccggtctccacgccatccacacaatccttcaatccgaagccgtcctcatcacttcctcaacccctcacccaactcttgactcggatcttctctcgtccgtgacctcgctcgtccgcactcggctggctggtgtaattgccgctcaacaaaacgtgctctgcacctacaacatccctcgatccaagcttccccaggctatgaccgtcacccccggtcgaagggcaccaacgatcagttcccttgagaccgaaggttgggttgccgtcagcgtgttggtcaagcggaaagggatggccgaggtcatggacaggttgacccatgttggagcggaggatatcttggttaccaagttggataactgccgtgtttaaaagagaacgaagaaaagggacatgaacgaaaaggcagattgtaatagatggttttggcctgattccgactcatcatctggtgaagattatcacgaaaacgcagaacgaatactgcaaacgtagcttcttgagcgtggttatctcaaggagatagaacgaggaaagagagaaaaaaatctgaaagcggacgtgatcgacgcgactgttttcttaatgaagcgaattaaaaacgcggaaaaaaacaaactcgtcagctgaacctcccaatacaaccattctctcctccgtcctgcttcatccttgattcagtcaattccttcttctaagagagggaaggatataccctcttgtttttttatcatggatacctatcgcccatcttggatgacagacgagctagaagaagaatggccagcctcggagcacactccttctcccccctcttccggatcatcttcctctcgacctgcacctcttggttctcttcctctcccgcaaacatttcaagctcaacttatgccttcgacctctctattctctccaagtttaatctcgcctctgaaggatccagaacctgtatcatccgtgacatctgttcaagccccgggaacattcattgtcagaacggatatggaagctcaaggaccgtccacacctataggtccgttgtcaaagctcaaaggagctatcacaccaggcggtcatcaaggcggaggaggaggattaggaatcattaacagttttttctcaccaatcgctctcgagtcaatgttcgagcctccttcaccgagctctggatcggaagatgatcatattcggaacgcgaacaggtctacttctcagacacctgaactgaatagctttcagcaaacatcgtcaactaatcagtcacaaccacaaactcaacagcaacggatatcttcgttcgatatgacgtatccaatatcaatctcttcctcttcctctccagcaaaggaagagatcgtaaattcattcgctgaacaaccaatacctagttcacctacgcattcattctctccttcgccttcaccctcgcctctttctcgaattcctccaagtaataatcaattatatcatgtacctcagcgtccatccaggctagcaaaaggattcactccggaagatatgacagcatcgacgatcgatcctcacgatatgtctcgtgtggaagagacggggtatgacgatgaagtgaaggaggatttaatcgagaagggagacgtagtcgatgtaggcgaggtagagcggacaccaagcgctgacaatgacttgaaacagacagttagttctccgttgtatattcctgctttatagtcctttcaatgaagtcctttgtctgatctcatctcgagtatcttcttttgctccttccttctctgtctagcatgtagacaacagacatccagattcgttcaattcattcaacacaatcttgtccttggatgaccgttcgccggataatgggaacgaaactaccctcagctattcttctaagagcgatgaggatgatatcgaaacacaagcagaccgacccgaggaccaaattgctcaaccgacatcgactatcaatccaacgacaatcgcgtcttcctatcctaatacttcacgaacatgtgacgccaaagcctacggcccacctctctcacccttctctccgttctcccccgttaaacagtcagacgtcagctcggaaccaaagaaactccaactgtttcaaccccaattcgatacattcactagggaattcatgagcgccatcgtagacaatatcaatgcttccaccagcacttcgtcctcttcttcttccttcggcgcatccatgtcatcgtctcctcaaccacatgcaggctcaacgacatcttcaacagaggacgtccagtcgatatccatcctatcagacgaggtctccctccggtcctctaaaagaataagattatcacctccgaaagcagagggaggaaggatcccatccggctcatctacatatagtctagagagacttcgaaaatcaaagtcctcggcagccactataaatagagattgggatagagaagccaaggagatgatgatcagggtcagagagctggataaagcacaagtggaatcagataaagagttgggtttaattgagaaggaacagaagtcggaggagaaattgagaagagaaaatggaaaggtgtcatgggatcatgagagcaagtctgatcttgattcagagacgaagcaagatggtgaggcaaacagtaatgatgccgtgcaagaatcccaggaaaagagccccacaggagaacacggttgtgagtcgctataaacttttctcatatctgttcagattctggccatagaacatttctctccttaagtaaactgagtctttcttatgcttcctcaatttaattcaaaagttgccgaacaagcctcaaaacctatccctgcttctacatctccttcgtactcaccgaaaaggtcgcttgcatcttctacaaaatcttctgaatcgcgcgatcggctcaaccaccctcctcttgatgatgacactgtcttcaaatcaagcgcttcttcatcagatactgttagaactcacaaatcggtcggatcgtcaggattaggcgaatcgaaaacggtggatggaaagccctcattcgaggacctgcgctcaaagaaaagaagtccgatgaagcttttgaaaaggttaagcgcagcagataaagtggagaaggatttaataaagggagagaaggatttaggttctgtgattgagagatcacaggctaggttagctgtgagtattgtggaatttctccgtgtcaatctccgggatttctttgttttgtgtaaatcctgacacgtatatgttggcatccagcaacgacggggggaggtatcacagtcttcagtcctggagcttcctcgtgtcggaacaggcattccgtctagacctacctctcgacattcaagcgccaccctgtcaacacgcgctacccaagaatctacattacatacaaatccttctactcaatctacctcttccacccgagatatgaatactatcgagctctcctctgctgtccgaatgacgactgtccagcccattgtttactcgttagaagaaggtcagaagaaggagggagtcggcttggaggagaacaaagggctgagtgttctaccagaggagacagagattgactctattgaagggccattgtcgaatttgcggcgctctattatgggtgttgagtctcgagcgcctcaccccccgctatcgaacctagcagcctcgccttctcgaagaccgttcagtcgatcgatatctatcaattccaactctttcgacacctctgattccccggtagacgaccaggatggcttcaatatggaagaagtcgctgcttcattaaagacgtttcaaatcccatcttcatccttgttgtcttcgtcctcttcttcaggctcatcatctaaagcgagcacgcccacatcgtctccacctcatcaacgaccgcctctgctccatcatgcggctaccgcacctgtaccactcttgtctattcatgccacgcctttgcctgtaagaggtcaacgtgaaagaggcctatctactggaggcttacgtccattcatcacgccagtgtctgtgctcaagaagccgtctcctcaaggacaactgggttcagcgacgcctggttcggttcctcacggtcgaagcgttagtttctctgatggaaggaagactggaaagttgaaggaccctcaagtgcaaaagatcgagctttcttggaatgagaaagtgggagacgtgtctggggatgaggcagggccagaggcctccgcgggaacttcgatgcgtacgcatagaattcagaacttactggacgatttatgggatgactccgattctgcagagagcggtgagtttgttatgtttcctagatttatcctttgcgaacataggttggttgggaactgaaactatccgattaatacatctttttcttggtcagacgtcgttcacgacacgccttcgaaaattagtcaatccagttctacccttccgtaccgttcccgatcaaatggtttaaatcaagattcagaaatacccgacctcactcgtctctcactcgctcctacgtctcgctcattccattataatggtcggaagaacaaaccaggagacgcaacgtttctcaccgagtgctcttttggcgctacgagggatcgtttggttgagatcatcacggacgtccattcgtttgtgtcccattgggatgagatgacgtctatcgatatcgaggggaaacaggccggaagcgtagctcggatgaaggagtttttgccgaaacttcttgaggccaacctgtgggtcttgacgcatccttcttcttctcttctggattagacatctgatatcgcgctcttgtcttgtttgtcgttttcctcttgaacggggtgaatagaaatcgaaatgacttgacgtatctgacaggagtgccgtcctccgtggagacactgagagctgcacacaaccagttcgtcgctcctctccgatgatttcttctcgatgaatactaatggctgtgtccacccgactcctctctttgtctatgaaaaccagactaagcagtctgaccgctgtagctcatcttatgaaccttcaatatcttgacttgagttacaaccagcttgattccgttcaccgtgaggcaatcttcgtatttttcttgaaggggtttcctcctcgacgtaaacttattcttgctttcaattttgatgaacagaacttacttgtcttcgtcaccttcgagagatcaaactcgatcacaacaatatatccgacctgacgcctctttttgccatcgacaacctgatcaacataagcgcggccaagaatcagctgtctttgatcacctttccctcttcaacatggtaagcattagaattcaactgagtaataacctttctttttcgacggctcatcgtcctttctttcatcatcgtcatatctctcggccaaacaaggtctcgtttggaatctcttgatttgggacgtaacagaattgaatcaatcttcggcctagagtctctctcgagcttgagatctctgatacttggtgagttacttggacaaatagcagtactgattttagacttgcgcccttacaacatcactttgttctctcttttcttctgcagatggaaataagttacgaacgctcgagccttctggacaaattcgaaagctccgaagcctgaaagtgagcgacaacaagttgacgcaattggacattggtcaattcccacaactcagaattctctacgcggatgacaaccggttgaagcgtatcaatcgatcggccaggagcacaaagcttgaaagattgagtctgaggaaccaggagggcagtcacctgttcgtttgatgttcctccttcgctcatatgttccgtcatcatgaaatccttcgctgatcaatgtcttctgctgaatgttctggggactagctctctttctgctgttgagttgaaagaagtcaagcggttgtttgtttcgagtgggttagatttaaaacaaatgttttctctggacagaacactgacagttagatcttgtttggtctcacagacaacccgatcacccccagcttcttcaatcagcgatgtccaaacctgatctaccttgaaatggcgtcttgcatgctctcggccttgccggatgggttctcatcttttgtacccaatatccggaaccttaacctgaactacaactttctaagcgacttagttcctctgcgaggtctacagagtctgaccaagttgagtgtggttaaatctagattggacgctacaaagccagtagtccgagtggtccgaacgcttcctaatctacaaatgctcgatatccggttcgtttaaacttcgagtctcttctcatctagtatgaactgggttgtgttgccagctattatcttctaaccatctatttttgtgatttacaattccttcatagaatgaacccatgtactcttgcactttacttgcctattatgaccgaggctctctctgtcggttctgaaaccaacacgggtctcccatcgctttctacatcaatagaacggacgtccccagaatcggcaggctgttcaccttcttgggccgaactcgatactgctttcagacgatcactcccggacgattggtatgtccgtcgactggctcatcggggactgatcatgcagacgtgcccccgggtgtctaccctggatggggttatcatctcggacggcgaacgggcaaaggcaaatgagttattcgagacgatccgaagaaaatcggaatcttgataaatgcttgttcttagtcttctatccttcacttgaccttcgcttccttttcttttctttgatcgacatgtacaagtccagtttccggtgcaatttctgctctctttcgtgatgatttcccctttctttttgttctctacgctcagactcacgaagctatattttatcggctcttctctttatccttgatatcaccaccggtcagaaatgactaaatatatacccaactcgagacttttttgatgagcccttcgaatactgtgcctctgagaactattcaagacgtaagagatatcaatcaaattgaacgtcgaacgcgtcagagaagagttctttttgaattcaccgagggacgtgctcattttcgagatgggcattattcccttcatcccgcgtcgacgcgttgacgcgccttcgactagtcactcactctctctcgcttctctttctttcgtttcaccttcttctttttcccctttttacaccttcgttcttctccctttcttcgtctatccctttatgctccattgccatctgctcttactcacacttggcttcaagttctaatagctaatcaagactgaacacaatgtcgatactgatgttgaaagacgctagaccttggtcatataagcaagagagatgatcaggaacaagaacctaatgaacactaaccgactgaacgccctgaagctggagaacccgcagctgactactaatcaggcaccaggaacagtccaatcttgttcctgacctgtcagaacgctcacccgactgccgaaagctgcctctactgtctgactctcgctcaaggagcgtacgctgtagaactctctccgcatcagatgaaagaccggtcagactgattggattttttcttccccttgggatatcacttataagatggaacctgtctttcttttcctgtctcttcttcttctctttcctcatccagctgtatctcttccatctctaacttcctcatccaccattagttccctcaagtccaccctgtccaatattaccgtgtctctattgcgacacaccatcaaccaagacccggacgcaccattcccaatttatcttcctgtccacatttcctttcccaccctcacttttattcagcgcgcatatagtcatgtctgccgaagacgtcaactggcaatctacaaacaactgtacctcccagatgatcaaccatgatcaactagaggattgcttttccagatacctcgagtcagctttttcttttgattagaccacaactcttcgtcgagatttctaacgaactctgttaaatcaatacgttcatttagatcaaaatacaactgggatgacgagtctgatactggatactctatctcagatttcccgtatggttcctacgaacaaggatacgaacaagaccgcgagtatgaacagtcctaccaagcgtacccctttttattggaatccttcacccagggaaacatcgaggatgacacttcggagagctcgagcgagaatgcgagcttttcatcgctggacgaagttgccacttatgagtgagtgaccctctcaatgtttcatccctctctggttctagatcagtcagctgaacagcgtttccgaattttctccttctctttctactaccagtactgcttctgcgtcgtctcttgatgactgttcttaccaatatgagcacatatatgcacaccctcctgctcctcctagcttcagctccagtcccatcgaagaagccgaacagatctcgtacagctctcttcttgtgtctccaagaaaggcaccagcgtacgagagcgccccttcgccaagctactcggacacttcagccgagtctacccaagagatgcaattcaacacagttgattctgagttgtatgaaaactcgtggcctggttccctggaggataaagactcatccgtcgatcatccttccgcccagaaaagatctcgtgcggccagaaagactggtagcaggtatctacctatgaacaccaccgcagctttaaatgtatgtctggccaattaaatgtcttctcctcaagctgtcctcgtcactaacttagattcgatcttggtcgattatcctgacaggattggtatgtgagcagtactcataagtaccctcctcgagagctcaagattaagtggtgtgaggagactgggttaagccgaacccaactcgatgtacgtattggtcgccgcattctttgccctatttataaatcaactttagctaacgggatgttttgtttgtgcgcttcaacacacttcaacctggatttcttgctcctcttcaggattggttcattaaccgacgtcggagggacaaagatttctgcaagcaacccaagagcatcaaaaggagtgtaccacgtggtagtactgctgcaggtgagcctaaatccgaatcatcagcgtggtatatagtttatctggaggaatgcttattcttaaattccctttctctcctggctcgacagacaaagctttctcgggtttgaagcatcgatcaaatgcaagtcgcatgaagtgaggcatagagttaatagctaaaccttgatcgcatccggcgcagagcacatgttgtctttcctatctcttctatcgttctctgcttttctttctaatctactcttctcatttcttcactcggttttctgttatcttctttctgtctcttcttattcttcatctatctgatttgttatctatctttgatcttttttatatcgaatgccatgccgcatctccaccagtcgtatagatacttctttccttctctctttcatccatttctaccgccttatactgtttcctgatattttataccgcctcgttttttttatcgtcatgtcgttgtctttatgatgtaacatcgacctatagagtctgaattagcttgagtgcgattagggaaacgagacaggtggatactgtaagtcatctaaactcgagacttgtagagatgttcgaaacgagactgatctgccctccgcatcaaacggaaccagggaccgcttcgtcttctaacatcattttctctattatttcataatctctcggaaactagcatttgtatgatctttcatgtgaaagaaaacgagaaaccttgcttgcaatgcattctgttcgcttgtggactgcgaatgaaacgcgtgcgcacgttaaggaggacacactagtcgttggaagaacgtgcaccttcaaccagattgtattggatttaatagacatgaaatccaagaagggttgggcgaggatgttttttgtttccaaaaagaggttggttgagatgtttgagataaagaatttactcgtcatcctcaacggcctcctcttcctcctcctcttcctcctcctcctcctcctcctcttcctcctcctcctgctgggtctcccaaacagaggtggcgattcggtccaaatccctcataccgtcctgggagattcgtcgacctccatcagggtgggactcgaggacaccgatcttctcgagggactggcagacacctcgctggatggcaccagaggcgtcaccgtggtgggagggtcgggatcctcgtcggttctttcctccgtggagcttggtaagagcaccgataccaacgtgctttcggaggtagatgtgtcgggcgacggcggctgtaggagaaaagaggttggttagtatgacacgagtgaagaacggtgatgtagcgggaaaaaagaaagggaaaaggaaggtcgccacgaattgccttactgtctctctttttacagaggaaagttcaaaccaagttcatgtcccctccaacagcttctgtgaatttactcaccagcccggacgtagtaccaatcagggtcgtagggagccaactccttgtaagctccggtcttgacgatatcaacccagttggggatctcgagtttaccggatcgcttcaagtgggaagagtaagcggagataaagtcctcggcggctggagaaaagggagaaagagacaaacccgttcaaattgaagaaaaaaagcagcacgcagtttcgttagcctctatttctcttaatccattctcgttcgcggaatctctactaaaatcaaaagcaaacaagtagaaggaacatacagatatcacggacaccaggcatattgataaattgagtcgaaagaggtaaaagaccttgacgaaacggctggcggaaggagtgcttgagggagaacaaaaagacggggacaaaaagagaaggagagaaaagtttgctgaatgggccggagcttgaatgctaaggctgacaacaagctcacattgagacttgttgagactgatgaagaaattattaaacacccaccgcgtgacaccgccctgtaagcttttgcctggtcttgaatctcctctttgttttcaccattgttcatgtattcttacccagacatccatcgtattgattttcatctgagaggttgaggggaaaagctgacatgtgttgaacgcacaaactgattcgttctaccaaaagaacagctgtgtcgttattgttgtatcgtttcgttattttcttttctcttcggtatcatcagatccattcatgttttcatataccaccgcatcctcccttagacagtgccctcttcttgctcataccggtagtgaagagggtgattgaggccttgcgaagatcacatttatcgagttgctattagtagaacccgtgtcttctgtcccgtgaagaacttgggtgggaaacgcttcccgacatctctctttgtctcctctttccttttgttctccattctcttaatcatgtccgtctgtgtattttatcctatgtgtttcctcttgaaccgtcgtttcgatcaaattcccgatgtctgcaacctatcaagctgacaagatgcacgtttgagttgctcgtacttcctccagaatcgaacaagaacgcgtatctatgtatcgagagctcgatgccttcatgtacatatcgccgttggcgatgtagatggaaccgcagaaagagggaaaggatcggacgacgctcaccagcatctgaactcgatgtggtcacagaataacggcaagaaaagaagcaacctgcctctagatacaatacagaaatcgtcagggggtttttcatcgctcgttagaaagcttgtagtcattctgcccgatgaaataattagaaaacaagtcgaaaaaagactacaacagtgaagaatgattcctagtcaccagatatatcacgtgactgccaaaagattttctcacttgtgatattccaaatttctagtcgctccttctctcccttccctcccctc

SEQ ID NO: 368 - DNA, 7275 bp, Xanthophyllomyces dendrorhous
gtcctacccatccccttcgttcaccacccccctccccttttctactctttcccaggcttatcgtagatccttgaagcaggtctcactctagcttgacgtcaaaaagatgcccggactttcccacgttctttacgaggccgcctctggttacgccctcttctctgtctcccttcacgatgacatcgccaactctaccaagcagttccaggactctattgccgaccttcacaagtttggaaagatggtccagttgacctcattcgctcctttcagctctgccggtcacgctttggagaatgccaacgatgtttccgagggtaggttttctttgctttactattcactcggttatctattttgccctcctgcctcttcctttttttctccttcaatttccgtcctctttttctcctacttcagactccggccgtcttgatatcaatcgcttgaacagcatatctgatccatttgctctttacgcctcttatgtggtactataacaggtattcttaacccccatctcgcctccctcctcgagttgaacctttccaagtcttccgccaaagcctcgtcctcttccgcctccgagaacattcttcttggtgttgaagagaagaacttggctgggtctatcaaggctgagctcggtatcgagtgtgaggctggtcaggccgctttggaattgattcgaggtgtccgattgcatgccgagaagatgttgaagggtatggaggccggcgatgttgtcagagctcagcttggtttgggtcactcttactcccgagccaaggtgaaggtacgtgaaaagccttgttctttatttcttttacattctttcctctattctgcgcttagcctttcctcaagagtttactgacctgcgccgcgatgtttaatcattcgatgcccttctccagttcaacgtcaaccgatccgataacatgatcatccaggccatcgccctttccgaccagctcgacaaggacgtaaacacctttgccatgcgagtccgagagtggtacggatggcacttccccgagcttgtcaagattgtccccgataaccaccagtacgcccaacttgcaaagttcatcggcgataagtctcgattgtccgagtccgacctcgaggaaatgcaggagattctcgatgatgatgagacccgagctcgaaacgttcttgacggtgcccgagcctctatgggatctgatatctccccaatcgatttgatcaacatttccaactttgctgatcgagtcgtcaacctttcatcctaccgaaaggccctaaaggcatacttgatcgagaagatgcacctcgttgctcctaacttgtctgctttgctcggagagactatcggtgcccggttgatctcccacgctggttctctcaccaacttggcaaagtacccagcctcgaccgtccagatcttgggagccgagaaggctttgttccgagctctcaagaccaagggaaacactcccaagtacggattgatctaccactccaccttcatcggcagagccggtaccaagcacaagggacgtatttctcgattccttgccaacaagtgttctattgccgcccgaatcgattgcttctctggtgagtgaatttagcacaagtattttccctaaaaaacgtcttatattaacaaaagtctctttcaccttactctccgcgcccgcaccgtctttatagacacccctactaacaagtttggagaggcccttcgagcccaagttgaggagcgattggctttctacgaggtcggttctctcagatcaatatctattcgcacaatcacaaggttgacgtggcgtcccttttcttcccactttcttttacacagtccggaaccgccgtgtccaagaactctgacgccatgaagaaggctttggatgctattgctctggacggagatgatgatgatgatgaggaggtcgacgaggccgaggccgaggtagagatggtcgaggctgctgctcagctcgaggccgatgagaagaagcgagcaaagaaggagaagaaagctggaaaggttgagctccctgtattggaggaagtcaaggctttggtcggtggatccctacctgagggttcgatcgagaccgtcgtcaaggctgagaagaaggacaagaagaagaagagaaaggtatgtcggtgtttttcttgactgcgcttagatttctcctctcgagaggtacatgcaacagactttgttaacccatcgatctgttttatgcccggtcattctactttccttctctttctcatagtccgaggttgctgacgagtcggcaatggatatcgacgctcctgctacccctgctgatggtgaggagaagaagaagaagaagaagcgtgtgtctgaagtcgtacgtccagccaagcttgtcttcttttctttcatactgcgcgcttataacttaataaacgatccttggtcttctgtttccatcgtctaggtcgctcctgccgctgaggataccccctcaaagaaggagaagaaggaaaagaaggagaagaaggagaagaagtccaagtcgtcggcatagacagatcgatcgatcttcttttctttccagccctttgatcgtatccatcctccaaaaacgctttctttcgcgtctcttccacaccatcctcatcttgccttcccatacgttctgatcgcccaccgaggtctttgttctctgttcactcatcaattttcactctttctatatctctttgccttcatatgttttcaactttcttcgattacctgtttcccttatacaatatatggctttggctactataacgcaaccttaaccgatggtggtcgatacatgatccttttggacttgggtgccctcagatcacagaccaccaaatccccatgggtcatgggtttagtctgtgccagcctcagcctcaatagcgacagcgtcaaagcccggcattctcgccccctcgttcttctcctggtgcagggctaggtgcaacatgttgcgtgacgcattgacatctctgttccaccaagtctgagagcaagcatcaaagagacaaagagacaaagccgaacgtcgtcagcttcctcgctctgtctgtgagctcagagacttcctctctcgtggtggctaaatatgcttgagagaacgtcatcaggacaagatgtcgatcgcttgtgtacctgctcgagttttgccctgaactcaaccggctgtgcctgcgaacctccctttgacggctgaacacctgtcgaccgctgttcctgtttctttcctgtcaacgctcgttcctgtcgatgctcatcttctgctcctggctcatctgtgcgctcgagagctttcccatataagttcatccttgatacaatgttaccattcctttgtcttcatcttcttcatcacatctgcaagcgcacatgatcgcatcgtatagaatgtcccacactcgaaacaaagcacaagtccctccgagtgacgtgtgtttctttatgaggtctagtacacttgaggtatcaacccagtcgagcagtgtcgatagacagttttcgactctaacccagagcgttgagatcagcagccagtatttgactttcatggttgtcgagtatgtatcatcacatgcgcattcatgggatgatcgtagccacctgcgacacactgtcacccaaagacgtaccaacaacacaccgatcacagtcatcactatcagtcctgatcgaatgactcgtcgggaggacgagatcgacaagattctggctttcttttctcagcatgacatttcctggtggtccttcggcatccaagacaaggatcaacccagactcaaagcgcggctagtccctgtcagcacgcatgtccccgttgtacggcaacagatgttgcatgggcgcttgacagcatcgggaacgtccaaatatatggtctgtttcaaccgtacggtagcgtcatacaagaagctatcaaacgtgttctcaagtgtgaacgacaactcacctgagggccacgaggatgatgacgacgacgacgctgaccttggagttgaggttggagttgatcttgtagttgaagttgaagttgatcttggagttgacgataaagctgatttcgagtacgaacatgaagatgagaacgatgataaagtccctcttctcgtcccactggctcctttggtcccactccctcctcccaacagtccacttcaacttgccgcaacgtccaagttgcaccagttccagagttccgtccagcaccatatcgaagctcgccaaatcgagcgcgtcgtcgtgctcggccggacatctaccttctccaccaagcaagtctcgttggacgcccaagtaggtcttctacaacatatgctaggcgacttcgaaggagatacccgtatgctggagtgcaacggagtctctgcatacgagcatgactatctgctcgaagcatgcaaaagagacgagaaggtatgtttctgcctgtcctacctttatccgagtctaagcttcatgctgatctgccttccacttgatgtcgtaatccagactctggtccttgcgacctcgattgatcgcgcctgccggaacccagctttcatcgaagatatcctcggatcactcgatgtgatgacattcatccattgtgataccggggcgaactgtcgaccgctcgcggatgagtggctgaacactctagacgaaagcgaccaacagacctggaggcccatcctcgagaggcaattgtctcacaccacctcagtcaagacagcagggatcactttcccatatctctgaaatacaccatctgtcagccttagggagcaactcaagtctagggtaaccaaagactcagcgttctgttcctcacgaggatcctcacatcatttctcgtggcctcctctccttcctggcttgaccagctacactagacgcaggattggcttcgacgacgatagggtggaactgtggaaacagatccatcaggagtacacaggatacacgctcgacatttactatgagaacaaaggacgggcttgcgcatgccatggagatgtctgcagagacgattgcctttgtgattgcagtccttgtcaaaaacgagccacaacgggatgtgtctgtcgtcttcaagagcgttgcgattgttggatcatcgacttctgtcgatgtccaatctgtgacccggacacagaggaaaggaggctcaaggcagaggagaaagcagagaagtggaggctgaaggcaaagcagaggaagcctgagctagagaaggagatagagcggaggaggagcagaggaggagcagaggaagccgaaggcagacgagtggaagcttgaggtagagaggatgcggagggaattgaaaaagcagtttcaggcgcagaagtattccagggtccaacaattgatggcagctgcaaagctagtcgaccgacaacaggtagcggcagatatagatgcaatcatcgcggaagctgcaggtaaagtagcggccatcgtggaacgcaacgagacatatactgcggtctatcagaggacggtcatagtcgcgcggtagaagatctacgaaggaatatcttgtcggataaagactttcgcagagagggctgcccaacgaatgtcggatccggtcgtgcgacggcaagggattgcagtcgtgcgggacaggacgattctagagactccaatgcggctgaatctggaggctctgaagcaggagacattggagcggaagagactgtggagtgagatggagtgtatggagaaaccatatgacgtcagatgagttggatggaagatggacagagggacaacgactgaccaggctggtagcttgtgtagagatcaagcagctgctggacgaggagaagggatggagggtcgaagagaggcagttgcgagagatatgtgactttttgggggcagcagacgcaaagtcagaggcggattcggccaatgtgatgctgaaagagaaagggcgagagctgcacttgatgtcgatcaagtatagggaggaagaagaggaacggactagggagaaacggcagagagaagagtacgtccagatcgtttcattccttctactgacttggcggctgtcttttcctcactcttcctacgtaggttggatgagcagctgggtgagtctccttggtggcggtctatccgacagaagaccacagcggaatgtccagagcctgaagtgtaaagtctattggagattgaattcgatgagtgataaagtctatgaacgagacagactgggatcagcaagaatcgagtcagtcatgatatgtttcggggacaacgttgacatccagccgagcgttttggattaagggggagcagaagctcagatcggaagtccgatgtaagttgggttgaagcgagaacgggctgtcatccagaagacgccgaaagacttgaatcgtctgttagaaaatcgaggcgaggttgtgatgaactcgatgagattggactacatttgaagtgcgatcgacatcctggtctagtccggcacaacgggtcaacttctcttgtctttagccgggcacttcatctcaacagtttactttaatcttagtcgcccatctaccatcagcactggcaaaggattgctcgatagttgagaggaaagtggaggcgcattgttcgaacctactatagtcaaagagagagagaggaagagagtggggtgatgatggtcgatggatttggttgatcatatccacaataccataatagttcaacaatcccagactatatcgagatttggtggttcgtgatctgagggcacaccagtccaaaaggaccacgtatcgactgccatcggttgagattacttccagtaaccagatcgatatagcttctatatagacaaaaaaacatggatgatgagtgaagccaaggcacagggacgcctggagtatctaaaatgcggatcctgtacgcgaactacgtctgtacgaagcagaggatcgaaactcagactgccagctcgatggtcagcatgctgagtccgttgctccgagcacgggaggatcctctggatcttcccatctgctctctgtgagttgtccatgttggaaagtgataagcctctcagttacattcaaggtcattgctacactgagatatacttacaggccaaacctggctgaagtttcggtggcttcataaaggacacaatttgggccggccgtcagaaacttgctgcgtgtcaggatccgggttcagagggtaacgggaaggttacaagaatgtaaccaggcagggaatagggctggcaa

SEQ ID NO: 369 - DNA, 3939 bp, Xanthophyllomyces dendrorhous
catgttgatatgatgagagagcataaggaataccgaagtaggagaagcggcagaagcaggagaagcaagagaagcaggagaagatcatcggggtgtaacaatgaggtcacatccctgacagatagggataaataaccatctgacctttgttgagtcgtctgacttttcacacgcgtgctctcgttcaccaaacactcttcgatcgactcctgattctcgtgttgtagcggataacttcaagactcgtcgttcaggtgagtacagacatggcgttgttaatatttttgagggaatcctcctgtcgagatgaagagtgaggagaaagatatggtgtacagagattctgatgtttttaaaactctttttttcttttacttttctcttgggttttgcttttgaaacgttctgctcggtctctcgaaacggctgcgaaacttgaatttttgactcttccctgccttccgcactccgtccttccttgttctctctggaaaccgaccaacaacaaatctccttatccgcctatctgaatcgatctgttgaaccattttctcggccctctcaaaactcatccaaaaaacccaccaccttctctgtcttgttcccacactccagcatgtcctccgtcaaagccaccaaaggaaagggtgaatacttgttttttttttcaagtccgaaagatctcgggctttgcaggagaacatttcgaaccggacaacgaaagggagcaggaagaaaacagaagtcacaggcatagagcgagtccaaaggtggtgcaggaggtttttccagagagcagggcaggaattcttgttggacagagcgaaaggaagagatcaaaggggttcgaacatgcaactgggattgaaagaacagacgtccaaaagtcgaacggtcctccagcatcatgcatatccttcatcctttcggccaacactcttttctccatgcaccaactctatcctcccttgttcttcggtgtctccagctccgtcaaatgttcttctgctagccgaaaatcaatcccgactattcctccaagccaatcctactctttcaaaggttgatactgatcatttccaattcttttctgatctaggtcccgccgcctcggctgatgttaaggccaaggccgccaagaaggctgccctcaagggtactcagtctacttccaccaggaaggtccgaacttcggtctctttccaccgacccaagactctccgacttccccgagctcccaagtacccccgaaagtcggtccctcacgcccctcgaatggatgagttccgaactatcatccaccccttggctaccgagtccgccatgaagaagattgaggagcacaacacccttgtgttcatcgtcgatgtcaagtccaacaagcgacagatcaaggacgccgtcaagaagctctacgaggtcgagaccgtccacatcaacaccttgatcacccccgccggaaggaagaaggcttacgtccgacttacccccgaccacgacgctcttgacgttgccaacgttcgttcctatcctctttatctttaattcttctgcagtatttgcatcggctgttgacgcgtactttcttgcgtttctttcacgaatggtactcgcttgtcgctttaccataatatagaaggccggctacatctaatcgactccatcccttggatcggttcagttgtttggtttgcatcgggtttcagagtttgacgaccttgagactcgaagacgtttggatgcatgtatgaaattctcaaattcatgcgatagagaaaaatgagaagatttcagttggttgtgcttcgctcatcttgccaaatggaatacattctcgcacacacacatcatgaacttggagagctgatccaattcaaatataagaatgtgatcctctacaaagaaaagaaaactttcttgcacaaaaccgaccatctccttctgtcaaatccatcgcgaactgcaagatttgttgaatttatgacgactctgatatttcgtagccttcgacttaagagtacagtctttgtttcagtccttatgtactttgtcccttcctcgccccaatagaatctgggaagatagttttcggccacttctcgctctcgtagaactgatttccaacagaatactctctcgaatagtgtacgtttcctttctggaaggaaaaattcgacctgtgagacgtataaccctaacgcctcccataaccctaatattccgctttgccggccttcatcgttgctcaatcaacgagagatattcagtgagatgacatctgccagttactcggaaagcgtctatgcctaacgcttccgatcgagatcaagatccagaggccgatcttttccgccggttcgccgctcttaagaatgtaggatctcttggagccctcatggactcttcagtctcggccgattcacggactttgccgacagttaatagcgaggacgatggcgttgacgacctggatgatgaagtaaccctgctttcctcctcttacctgagagaagagggtaagaagcagagcagatattgatgtcaatccttctatctggtctccttctcaacaggtggaggcttacctagcggcgttttctcaagatcatacatcgggtgacttggacatatcagtttctgaatcaaaaccggttattattgacgcgacggaagttccagaatcgttagaaaaggaaactcgacgcgtcctgcgtgatgcacaactatggatatctgagagctcaaaaggagacgaagaagatagtaacgatggagatgaagatgtggatgatgggttggacgaggacgctatcgttagcaaagcgaaggatgaagtcacaatcgagcgggatctcatcccattagggacatcttcctcacgttctcctcttcctgatgatgctcaaccttcttctttggatgagacagctgacattgggagagaacaaagctccctatctttgaccaacattcttgcttctctctcttcgcccaccattttgccaccaccaccagccacatcgcctttatcaactctcttggatcctacactttccaccgctttctctagacttctcgctcttcaaccctcatccgcccccccgacagatccaaagaagaagtctcttgaaaccccgagcctgaagccaagtggaagccaaccaaaacccttcgacttggagggctggagggccgctagggattctgaagtcgattcatggtgttgtacgcttgcgcgctcctgctttgtctcgcgcgttccgatgttcacaagcatgcgttatctgatacttttcattctttctcgtttttcttccttcttggattcctcaatatttcaggtatctgctcagcggacgcgtcattggtctgtccagggtgtgatggagacctgtattgcgcaccttgctttagggaaggtcatctggatgaatcaggggaggagatgaaaagacatcgacctaggaaatatgtgtggaaggcttcatgatataaagactctttccttttatcctcaactcttgaaagcccttcttccatccctgcttccattttcgtgtcgtgtcttgtcttgtcttgtcttcatctcagcattcattcttcaagtacatcacatcatgaagaggctcaaagggtccaggggaaagtcactcgatccgtcttctagggcttattccccagatctcccagaagtcacgggcatccaacactcgaccaagtcgaccagtcggtcgaggtagaactggttcggattcttctctcataagctctctgacccatctcctagattcagcttctggatcgagaggaagggacgaggctaggtcccacctgtatatgttggtccggacgaaagacaagattgaatatatgctctacatcaaggataaaatggggaagagagaaggagagggggggggaagaagaaaaaaaaaaaaa

SEQ ID NO: 370 - DNA, 550 bp, Xanthophyllomyces dendrorhous
aagaaaaaaaaaaaaagaaagaaagaaaggacgtaccaatcatacactctagtgtcacagatgatgaaacgtctagccgaagatgaatctggcttaggcaggagatctagatcctggacgagccggacgatgcaatgtgagacgtcatctccatggactacaggttcgactatcatcagtatgtgatccttcccacagtgaggaaaggcaggcagaggtaaggacggaaggaacttactgagatggactcctcccttctttctcaaagcctctttatcgtccgcaacccgcgcgatccaatttctcaccagtctttccccaccaaacagaccggcaaggttcaacactacagtctcgtgcccgtcgatagaaagattaagaaactcagtctcggcttgaccgcgcgcgttcgttggattcggaggagagtttcgatcaaagatctggggtcgatcagtcgagaccaacgttgggtcggacttgtttacatggagcatgacgaaaagcgagaaagcaggatgagcattcgacgaccttttttttttttttt

SEQ ID NO: 371 - DNA, 27355 bp, Xanthophyllomyces dendrorhous
tttttttttttttttttgggagaaatgaaagaaaagaagagatgagaaggtcataccgtccagatccctgtgctacccaaattaacccaggtcactttctcttttgtctccatcttcttctcacctccccaagcctcttcccacccgtcaatcagctttttcccggacccacccactagaggaaacgtcaccaagaccactcttgcctttggtaacttcctgaatgattctcccacggtcttctttgaatcttccggatcaaacttgaacttctgaagaggataatccacaggaaccgatggatagtgagtctccccagatcgggtggtagcgacatatgttaattttgaggaagccaggagtggaagaagaaactgagagagccagccggcgccgaggatgaggatatcgacttgagaaggcagatgcttggagtatatggatacagccgtcattctagagaaggatccgttcttgttgatatgttctcttcttgactctctggttgagaattgtctgttggattcgatctttcaattatgtattcaaaggttgggacgaagatggaacgaaacgggaacgcatcatcgatcgtagctgactaagccgcggatgacaacataaattcgctcttcttctgcctcttacgtccttttccgatcatttgtttcctctaccgagaggtgtatagaaaaccggaggagagagctcaaagataaagtcgtttgaaaacgtatcgtatacaattaatggtatctagttttgcaagcctccatatcactacccactgcgtctgcccttctctgcatcagacaaccaaattacattcgaagcattcttgacacttccgaccgacagcgagcgaacaagaaagcgatagggacaatcgaggcgataaatatgtcgatcgattgatctcaacctcaaggacccggtccggtcttgaccttcgagtccggttttgtcccttggcctgagggaccttgaccaagtcgagcggacgaagccagaggaggcagtcgaggaacggcagcagcagcagcagaagcggccggggcagtattattgattgaagttaaagaagaggaagaagatgccgcagaagaaccggtactagtgctcgttccggacccgttccctgcctgcactttactcaagattcctgcaagaccactcaactgcgccgggctcagcgtccctaagatcaaattgaacgcaatgttgaccccatcaaccctcagattccacaccagactaggtgcatccggagctgaatttgttcgaggaatgattcctaggttcattagggtcggtagcgtcgacgcaggcaaagacaacggaacgggcgcgtggagatcgatgtgggatgccccggaagtggaactgggtgtagttgtaggcacggacggacgggtgttcgaagcagaaggtaggggacgggaagagatgctgagattcgctgatgaaggtcgaacctgggatgatgatgaggcggaagactgtatcggtggacggtaggttgggtacccaggccgttgggctggcggtctgcctggcgttccaacagatggaggacggtacatcccagagttcagcggcctagccatgttcactccgttcacactctgagccgagatagggactcgttgttgaagaggagcgcctcgattggtatagttggccggagggcgagcagaacctgtctgaagcggtggccgattaagggtctgctgaggaggtggcagcggtggtggcggaggagctcggagggcagctagttctcgtttcaattcattcagtcggttgatagcagccgactgttcagaggtagccgagcgcagaccagtcttgagatgatagatttgacggagttcgtccgctatcgctgctcggccaagaggaatagcctgcaaggatggggaagcgtgctgaggaaaaaaggccatggtagaaggtgaaacaaagaccgtcagccattatcttgcatggggcgtgcatctctgagtgtaggtctatcggaagctaaacgactcacctggccttctctacgcttcagcgagacaaaccgtttctccaactctcgttttctctttgcaaacctcacggcttctttcaaagatacacgtacatgtccgcgtccacgccaggcatcatttgatcagtcaacctcgaaagaagaagaaaaggaaaaaaacgagaaaaacaagacatctcggcaaggaaaagacgtgagcactgttgatacatacctgtaatatctgcttctggtgtgctagaggcaacatcgtcccactgccaatctgtcgctctagccttgcccttctgatcggttcccgacgacggcggcggtggcggaaaggatagatcctgatcagggatctgccagatgtgatacgggagaagccgctggatcacatcgcacacatcctcaaaggggctgacatcagggtggagagtcatgtactggtcgtgtgagagcgcgacggtaaccctattaaagcagaaaagaggcaagacggagaggaggagaatgacgacaaacagatcagacatcaatccttgttcatcgatacgagatgggctgagttatcaaatgcggcctgagccagggaccgaccttcttctcagagattcagcgacagaacgctcctcgaacgatcgctcctctttcggagcaaccattttggggccaggtccaggcgtaccagcagacccacctgtcactctcactgcagatgatgacggagtcgcgttcgacacgctagggttagagggaccagatgagcctctgttgactggaagggttcctgctgttctattgagagcggatgagctgactgcaggatgggatgggactggccgacccgatgaggcagttgtatccttcacctgggatggctgtggacgaacagctgaggacgtggaagaggaaggtgtggcaggtgatgacgattctaggtatattggacgaacagcatggacggatgaatggataggtgtatgtgaggatgaagaatgaacgggatggattgatgaactcgctgtctttgtcgtcgtcgaggatggaagagttgagcgagctgaagaagacatgctccttcgagtcgggtggggattgttgtgtctgtactgggcgaggcgaagcggcgaaagaatctttttttttcctccctgtcttttccttgacgaggcagaaattcgctggccacgcggctggcagattttgtattgctttttcttcagcattagaatttcgtgtaatgcactctctagtatgtttttcatttttcactgagactccaactcataccgcatatagctatgcaagatacagccgtgtcgtatacattgtatacagtcctcacagtctgatgtttacgttcgcaccaggacatatacacaagcatgacatggaaggtcatttatctaacgagaggtgtacaactacaggaatggagagtgtttacatatattatggaatagccaaaggaaatgtgaagagagtacaagaccatgcgccctacttggacgacgagaatttggtcacagacttggttccctccgagatggcgtgcttggagagctctccggggaggatcaatcgaacggcagtctggatttctcgggaagagatcgtcgactttttgttgtacgaagccaacttgctggcctcaccggcgactcgctcaaagatgtcgttgacgaaagagttgaggatagacatggccttgttggagataccagtgtcggggtggacctgcttgaggaccttgtagatgtacgacgagtaggtctcgactcgctgtagtcatgaataagagcaaagcccaagtcagtttttggccctccagatgtaagagcacaaagctcgacgtgcatcgactgaccttcttgttcttcttggacttggcgccctcagccttaggagccttggaagtggtggactttttggcaggcgccttggaggcgggagctttggaagcaggagccttagaggcagctgaggaatggacaaaagacgcgtcagagtggcgagttaaaagaggagacatgcgaaacagggtagactaacgggctttggaagcggtagaagcaggtccggccattttgatagagatagatgagtgaggaagagtttgagagggtagtgcaaagtaagcttggaatggttccggtgtgatggatgaggggaaatgaacaaaggaaatcgaagaggatttgacgtatttatacaatcgcctgaaactaaaaaggccacgttgcaaaaattgacatacatcgattttctcaccttcaaaaattccacgtcactcgaaaacttgggatatccctctaaggggatcaaaaatccattctgtatagctttgatctattcagaaattttatgtaggtagggtgaatattttctgtcgcttcattcatggttgccacgcgcgtttcaggatctacgcgactaaaatttcggggcgacgtgttcttttctgacgcgcgacgcctggcttttctctgtcaagttgaaactatataaaccttgtagcaacttgacgtcaatcaatccctttcctccatcaaatcattcctaattcccatcactcacaacctctactctcaaccacccccgaaacctaacttaatcactatcatgttcgtataacactcaccagtcttaaacacatccatctggacttgacgaactgacccatctgactttcttaacacaggtctggaaagtctgccggaggaaagtctggaggaaaggccggaggagtcgatgctgacaagaagaccctttcccgatctgccaaggctggacttcagttccctgttggtcgaatccaccgacgtacgttcacatgttttgagttctgtcgtccaaaaggtcttcgcttacctgatcactccctcttttagacctcaagaagggaaactacgcccagcgagtcggagccggtgctcccgtgtaccttgccgccgttcttgagtacctctctgccgagatcctcgagctggctggtaacgccgcccgagacaacaagaagtcccgaatcatcccccgacacttgcagctcgccatccgaaacgatgaggagcttaacaagcttctcggacacgtcaccatctcccagggtggtgtgcttccttccatccagcccgagttgctcccggcaaagtctggaaagcccaagaaggccgctgcctcccaggaggtttaaacaagaaaaaaagacttttctcgtgtactctttctgctcttcttcctttttggatcttgctctttctttagactttctgtgtaatacttgtactgatacaatcccccatatcatgcccaacttatgtctaaaacaacaccagaaaaccttgttcaaagccacaagatatatcatcatctaacgtgcaactcgtaaaaactaactgaacaatctagatttacccgttctcttatgcgatcaaatcctgtctaccaactgatacagccctttcgagctaactcctatttcatacccatctacttactgacaagcacgacgtctgtccagacttgctcgacccaacctttgacgcgttctaaagaacctactagatccttgattcccctttctaaagcctccccttcgaatccttttacctcgattctctccttttcctcgctcctgacatggttctctccgcttggctgtacgacctccctcccggtgcgcattatacttaccaagcctgtcgacgaaccacccactgccaaaggcggctctaaacaaagttcaacagctagtgttaaccgagagagtaacaaaccccaaactgggtcttctgttctcaacactctatcgatagccgaccggagattcttgctcgtcagttcgtcaggaggagtagggtaggatgatagtagaagggcatggatgtcggagagtgaagtatgggcggctgaggaaggcgtgacgaggtccgaaagaaggagatcaaacgtctttgcagagatcgacctggctggtgatggtgatggcgtttctgatgcagaagccgaaccggaaggcgcaggaggctgtttgtttgaagccggaaggagagccatcaggcacgccgtgatcactagcgcttgaatttggttctgcaatctgaataacgtttgagaaacaccgacgaagatcaccggaagttgatgcgctggtgcaggggcaactcgaggttcagaagatgacaacccattactactttgagccgaagaagaagagatcgcaggagggagagggagcgcaggaagagcgattggctcggaagaggtaatcactttgaggagcgtctttgtccaggtgttaggccctgtccaagtagagaaagttgacctgatctgatcaagagggagcagagagataatctcggttcgttcgttcgtttgcgcggcagcccggattaaggatggaatggcagagggaggaacggctagcagctggaacgatgtgagatccgactgtgagtgttggaaatataaatgcatcgtgagaacgagtatcgattcagtcaagacactcattacagcaaaatagttagaaagtgagaacgaaatcgggacaaaactgaccttcataagctctgccagatctaaaaccccctgcatgacagctagtaccgtcttggtcgcgtccttgtcgaaagaagaaggctttgagtcagtcgccgaagcgagtaacgaccgaagcttttgaatctcatcgtctcgagcaggtgcacaccgctgggctagttggttcaactgccatcgatgacatacgcgttcaggcagagacgaggtcaaaaagaagaaattggtaactatgtgtacaaacatctcaataaagagataccgcagcgagaggactgaccaaagttactagcgcttgactgaatacagcccgatcccaggccactccaggttcgggaacagggaagagatccttgatcatatgtggtggaagtagacctgatagtgtgttggtcaaatctgattgaagcaacgacaggcggatggcaggagaaggcccagaagaatgtagcttattagctgcctggtggtcaacaatccatccgataggatatttcagcatacataattatatagactgatggccatagtatgtagtcttataacttacatcatcccaaaatgctttcttcatcatcgcagtcactctctcctccatagtgacaggtccagaggtcccatcggccaagctcgcgctcaatcgtttccgcttcttctctttagcctcgttcggctgggaaagaagagacgtaagattcttccccggaggaagaactgtttccggagcgagcgctagagtcgaaaggagggagacgcgatggagagttgcaactggagaagacagctgactcgatggagcaggcgaccttgctaaggattcaagaatcaacggaagaagagcgggtggcacgatctcagacgcttccttttctattgtcggagtcgatgctgatgtttgcagagacgtattcaaaagactgttgctcggcagagagccttgatcttggattagaggtttctctatgcctgacatcggtgtcaactctgttgttgagaaagcctctctatctgtgttgttctgtccatccgctatatccatggctttttgatcctctgggtctttgatgacaatctctacctgagtcttgacttgatcctgttcaaccaaccctttcatctcttccctggcatcgctcagaatctgatctagcttaggcttgtcttgttcctgaagactggctcgaactttgatcaacgtattctgtagatctacccattcggttgtcggtgaaggtgaatcaagtgcggcagactgaagcacggtcaacgccgaggagagctcagtagaaagagctgaaggaggcaggttggaagcgagcgtctggagggcgagccaagtctgggaagtcagattgaccatgactctagatggctgatatgcagactaagagaagaaacaaagagaaatcgacgagtgtgtgtgaagtggatgagtatttggttgagctagatctccaaaacccggacggtcaagattacttgaacccgaaagtgtcttgctggcatccaaccatcacaactttcaaggctctcgttcagcccggattgttgttgtattctcaacaccgactctgttttcctttagatatcgtatctgaatatatcggagggctcatactcaggtatgctcattcgctcgagtgtcttcagctgtcgttgatagctgacaaacaccggggctttctttggcctttctttcttcagcctgtgcccaaacccctcgtttttcttgtctcatactccttctcctctttcctctacatattaaggtcaaggtatctcgtacttcgacctcgcaaaactcatggttggctcttcaaaagatcaagcatccgattttgtcgccagcgaacaaaccaatactgcctccacctccagcacagggtctacaacagcaaccaagagcccttcaatgctctcctcctctcttcgacctcgtacactagagagtcctatggatctcgccgagagaaatgacgggagttatgccagcagggaggtactagaccatcgaccgatcgcaaacggacatgagagaaagaggagtttgactcgaaaggttgaaggctcaaggttgcatgagagcatgcggatggtgaacgctaagagctcgtggctagacaaagtgttactcagcggaaaagataggaagagctttttgctgttgatattgctttgtaagtctttctgtgttgtgctgctatcgggtctggtagataggctaacatcgatacttgttttgttcagatctcttgcaaggaatcccgataggtatagcgcctctttcccttcagttgttgtcatcatccggtgttctgggtagccatttcatgaaggctggcttattcaaagaaaaaaatgactctaactctcacgtctgcatctctgtgtgcttcgctgttatcgcaaacaggtctgacgtttggaactttgccgttcctcttaaagcccaaattgtcatactctcagttagctttgctctctctctcaacatacccctattctcttaagctactctggtcgcccatcgtcgactcatgtttctcagccaaagtcggaaggagaaaaagttggattttgccagtccaaatgataatggggttttccatgtggtggttaggcacaagaattaacgagtggttggaacgggttcgtccggctcttccttgggccaagttttgtttctaatttctagttgatgaaaaacgccatatgaatttaacaacaaatatgtttctcctgtttcgttttctgtaaaccatataggaggttccaaatgtgactttccttaccttcatcttcgtgtccctaatctttttcgccgctacccaagacattgcagtcgatggctgggcgctcactttgctttcccacgagaatctttcgtatgctagtaccgcgcagacgatcggtttgaacagtggatacttccttagtttcactgtcttcctagctttcaattcggtcgaattcgggtttgttcaggcctcatctgtatgtttcgttgcttctgacaatccactaaatccgaattgtttggaaataatacacagaaacaaatatttcaggtccacccccttagaaactccgctgattacgttaggcggatatctcaagttttggagtttgatctattttgcagtcaccgtgtggctattcaagttccagaaagaggttcgtctgttttcttgcttattacgcaaaatcaatcagatgccacttctgacgattgcatcaccttgtatttgcggcgtctcataggacccggtatcggatgatgatcctgacatggacatcaagaaggtgtataaagtcatgtacagcattgtcaaactcaaacgtaagcaacacactggataaagattctatttgcaaatgtatatttaacttcacgtggatcttctatatgaataccttcttctcagacgttcaatcatttatcatccttcatttggtggccaagatcgggttcatggccaacgatgcggtcacatccttaaagttgctcgaaaagggcttcttaaaggaggacatggccgttgctgtgttgattgactttcctttccaaattatcggtggatggtgcgttaaattcacttctcgccgggtcgaacgtgttctgaataaaaggggttcttaatgttacgttcaaatacagggtggccgcctcttggtcccaaggcacgaagcctttgaatccttgggtatctgctttctctgtccgacttttctttggattattggcaatggcactggtatatggtttccctactacaaccccgattccctcgacctattttattcttgtcattctgtttacggtcatcggatcctttaccaggttcgctccttactcaaatactgtctcgcttaactcatctcaatcccctttgggatgttgttgcggccttaagatttcttcatactaattcggataatcgtcaatatctttatgaatcatagcacggttcaattcgtgggaatctctgcattccatacccaaattgctgatccgattatcggaggaacgtatatgactgttcgttgtttgctctttcctcaactggcatgcacatctatttgatatctaactcaacgattggtttcccacgttcaacccattcccaatcaagcttctgaacacagttagcaacctgggtggtacctggcccaagcctatcgtcttacaaggtgcgccaaagacttactctcgtctgaacctcttgttctcgcttcttacttgttaatatggatattttacttacaacttgattttggtcatcgtggtgcacgacaggtgtcgactactttagcacggcaacctgccggatcaaagatgatgtcgttcttaaaggtgagcttctccccatatatttcaatttttcttcgtcatagacaccaaggaaggaggcgttactaaccttaagcctatgctgtcatgtgtcccgttctcgatttacaacctgattaaaaagcatcggaatgcgtatctgaacatggcaaagcggcctgtacggccttaggaggtgtatgcaccattgaacgggacggatactatgtcgtctctgcactctgcgtctcacttggagcaattcttttagtaggctatgttattcctaccgcaagaaaacttcaaggtccgtcttcttttcttcttgctctcatttctgccctggtttcctcttggaacgatagattctgacgaaaaaacatccaattcgtttctcggttctgaacagctctaccccagaacgcatggaaagtaccgatccctcagtaattccttcctggagaggaaattccttagaagataaccaaagagagagagggagagagagagaaaagcgggaggctttgacagccgaatttgtactcatccaagtctctgactttattgattggaaacgctatcgttttgtgtttgtgcgcgtgtaaggaatagaatgattggcgtagaacatgccgcaatatggttatagactctcttcgtactttcccgtgttcctgtctttcttgaagaatgagacatctatctgtgaagtaagatcagggttgcattcgataagatgagctcggagatgcgcttctcaagtagatagtagaggtgttcataagaggaagagcgatagagaacgcaaacagggtcaagacatacataccaagaagagaagaaaaatcgtaaccaaagacatgaaccagagactgttagagaagaaaaagagggtaccgatggagatagcgagaaaaaatgttgaaccgaggtgttgaatgggtggcgaaggaaaaggaggttgtttgtcaatatagtgctacagtggagtggaaggtggagagatcagactagagaggcaggatgcaagaaaaagaggcgaggcgtaggcgggagagaacaagaaaatgatattatgtaaagaagaaagaaaagtacacaaaaggccctatggaggaagacataggaggatagagtaaggggcatggcaatgatttccaaccacccgaccttttaaagatccattccagctttgactccggcctcatcatgctcgtcatcactatcacctcccaatgagcccatgtcactcatctcgctgtcgctatcgctttcttcctcgctctcgtcctcatccccatcttcatcctcctcctcatcgtcctcgcctttcatcctaggaactttgtcggaagtggcgtatcgagaaacgtagtccttgactcggttgttgtaggatggagggtctcgcatgagtagcgtggccgcttcattgttgagtgggtcagaaggatttgggtaccggaggagttggggcaagaaggattcgaaaatgttcaacatatctgtcgttcgtaatgtcataagaagaacagagaacgtcaaggtcaaccaaggaacacatacagcgtggactcatggggacgtaccaaacatcggagaccatgtttggttaatgactggtatgcaagaaaaggatcgttagacaactctgttcataacgctaagtagtcaaataaaggtcgcaccatctagacaaaccgacccgctcctgaaagggtcaagaacagtagaccggtgtgtaaggatggcgatcgatgagtatacttccaaactatgtatccaatagtaataaataaaaaggagactcacatttcgtcgatgtttgggtgaaaaatcttgttcatgaatccaattgacggagacttgtacgggtattgatccggaagttcgacatgaatcttccaaatcccgtgctcaaaaggggctataagaaggttccgaaaattgtaagatcagctagcatctgaaatagtgtatgaatttaaaaatgcgtactatctgtaggtccatgaaagcggacaaagaattcctatagaggtatcacagcggatagacccaaaaaagcatcagacccgggaggtaccttgtcaatagataagacaaaacgggaaccgacctgcatgctgtcattgacgagcgttacatcgtagtcactcatcagcaatttcatcacatctgtttcgatcctacgtttcggagagctagaaacgaagaaaggatttggtatcgtatgatacgttaaagagttagtcatcgaggttcgacccgggtagaagcggcaatttcaggtcggaaggaagaggttcaatagagctcctataggaataggagctgatcttgatcaacggcttctaagctgtctaccggaccgaaccagtgtacatgtcatccgagtatacatgcacagagagtctgtccatgtgaagatagaatgccgaacaggagagggcgggaagatagacatacctcatcttgcgtttctttgcagggggcacgccacaagaacggatgtttatagaagaagaaattgttggatagatatgatctgagaggtcgaattaccgatgcgaacttgaacagatgatcagagattccgaagatgatgtcgacagatgagggaccttcaagggttgagtagttggtgatggcgatgctgatgagcaaaggatagtcagaagtgaggccgacaggatgatagatgtggttcatcccgatggtaacgaaatgcattgctgtgtagatcacgtgaggtgcgataattgcacttagcagataaataaatatacttgaattatctgttaccatcgttcgtaaccaacgcgtaaaattccatctcttccctccttcctcacttttcaacgttatactcttagccttcctctccaaacagttcaccctcttacctgtgcatacacccatccagttatctttataccctcatgtggagaccggcaactcagcaatctggcacaaatgacgttcctctaggtgggaaccgtcgtagatttggtgctcctccagaggatgatcaacatcgtggaggtcaggctcctgctcctgcttacggagcaagtcctcctagatcaggttcaaactatggtcaaccccctcatcaagataaccggggttcgtatggagatcgacagcagggatatgctcctcctggttctggtggatacccaggtgggggaggggcaggagggtacgattcaagaggtccgccaggtggcggaggctatgatgctcacagaggaagagacgattatgacgcgaggcctcctccgggacacggctcgccaccagctccctctgctattctgaccgagctatcagacaccaagagagagcgagagggagaagacggaggtacgtctatcttttttccatccatctgtccatctgtccatatgccatatattctctaactcactttataccttgaacttgttcacgcgccttgtctactcttccacgtcttgattccagacgctcctcgaaaacgacgatcccgatggggtgatgctgccgccaatcctaacccgacccttcccaccatgatcaatgctaacgtctctcaggctgagttggacgcgtacgcgacccgaatgcgtgtcgaagagatcaataacaagcttcgatcaggagatatcgtgcctcctgaaagacaaaggttcgtttttttatgagtctgattcagatcatacattggctcatcaaatcttgtacaaaaacatctcctgtctgcccattcccacgtacaatacaggtctccttcccctcctcccacatacgatgctcagggtcgacgaaccaacacccgagaggttcgataccgtcgaaagttggaggatgagcgggtccggctagtcgaccgagccatcaagctcgacccggcttatcgaccgccgaccgagtaccatgctcagaagcgaaacaaccgaccccaagacaaggtctacattcctgtcaaagagtttcccgaggttaacttcttcggtctcctggttggaccccgaggaaactcgctcaagaagatggaacgagaaagtggggcaaagatttcgattcgaggaaagggaagtgtcaaggatggaaagggtcggccagagaacacagcagatgacgcggaggatgatctgcactgtttaatcacaggagaggacatggataaagtcagagcatgtgtgaatttgatcaacaacgttatcgctaccgtaagtgtctatatattctcacttgcgcctttttcggtcttatcctcttgagctacttgttaaaatcatcttctcttcctcacggccatatctaaaaacgcaggctgcttccacccccgaaggccagaacgaccacaagcgaaaccagcttcgagaacttgcggctttgaatggaacgcttcgagacgacgaaaaccaagtttgtcagaactgtggaaaccttggtcacaaggtgagtctttttcctcctagtcttggttctcactatgctgatcgtacttcttgtatctctgccatacacctagaaatgggactgccccgagcagcgcaactacaatgccaacattacttgtcacaattgtggatctcagggtcacatggctcgagattgtcgagcacctcgaggtgtacgaggagcccctggtggacctggagcgcctggaggtcctggtggaggacactttgacgcagagtatgcttctctgatgaatgagctcggagaaggaggcggagtggccgccaagggtggaccggcaggaatgatcgagggaggaccggctggtggaggacaaagacctccttgggcggccggaggaaacgttggaggtcctccaggagaagactccggcgcgccgagattggccccttggagagacccaaagaactggctgggacctgttcgtatagcttctttgatcagtttatcaaattctctatatcaaggtctcttattgacacttgacccttttttttcctcctccgacctcactcaggctcagcgaaaccaccacggacctccaggccagcactttggaggcggaggacacggaggataccaaggctacaatcagcagcagcagcagcagcagcagcaacaacacgcaccttatcagcaacaacacgcaccttatcagcaacagcaacattatcagcagcccgctcaccagatgggccacgcaggtatgcccgctggcggaccgcctggcatggggggataccctggctatacccctcaggcggctcctgtcgctgctgctaccgctgccacgccatgggcaaccgccagtccgacagctgccgccgtcggatctcctgctcagccctcggcgtatgagtcttattatgcttcgctagccgctaatggcggctcgggcgttggggctgcgtcaatcgtgccgccatctggcgccccggccgcttgagaccaatgaaaaacgtgctcggttggatgaggacaaggggtaggactcatgaacagggacagaggcacaggctgctgatcttggtttcgaccttcagagacggcgcttatggctcatcgtaccttcctctttgtcctatcccctcatcttctcctaacgcttgttcttgtgctctcgtcgtctctttgtgattcttctatgcttgtaggtctctactttctcttgagcactctgacgcgacccgttcttctttctctgcttcttgaccttttctctacatcttgacctcttgggctgtcttctgatcggtttttcttaccctccttgcatctcctgtctctgctttcttacctcacatcttatccctgctgcgcttgtctcgcctgcctcacctgcttgctcaatcaacagatgtctcatccttctgtttctgaacaaaaccctcttcgcttccatgatttcagtcctccaaccgtcttatgcctcaatctggacctctctcatatctcgccctttcaccatttcaccatccagatgatacttctgctttcttattcctcttactaaaaagaatctcgtcatgatccccttgactagcaactacagactcggcttgtccatcatgttttgatttctgtgagtggtgtctattgacttttccataaatcgagaagtagattagccgttttttttactgatatttctttctcgtatttgggcatacctgctatggcgatccgtgttattgcacctaccggatgattcgatctccacggaatcgatgcacacacaacaggacgttctcttgtgttcgcgtgctcttacccggcttgatctgaagacttgtggagatgatcgcgctcacggggtcccttcttttggcctcttttcgtctttgaagaagaagactcgtcagggttgttctgaccttgtcgaattcacccctttttccttcctctgcattctccatccttctcacccattgtctttttctaatttaccttcccctttttatctattcgttcctctcttgtcatcttttcgtttatctctttgtgatcgtctgcttgtattgagaaagatgatagtgtcggccatacccaaggaaggcttctggtcctgttatcaaaatagaagaaaaaaaaccacatatgtatatactctacgagatgagtgattcaaagggcctgccatccatatgtccagaaaaacctctagctgagaacgtttgattgattaagtatcttgagtttgtcgataagatagccccaagtccggaatcgggatgaacaaatggacaagcgagcggatatacaagggagagaacaagactgaggtgatagacgtctatcttcacctaacctaggacgtccagcccgttctttgatttcttcttactaggtttctttgagaatttgcgccagtcgttaacctgttatagaaatttccccctttcttcattagcttcatgtatcacaacagagaggaatgatgaaaggaagtgagtaaagaaatgtacggacacgagcgtctcgattatctatgcgcgtcgtcagaaaagcagaacaattgaggttggacaatcaaaagcgggtcatcatcggaaaagcacagaagaaggaagaaaaatacgaaccttcccacgccttgtcatcctcgatttttcgttttctctttgcaatctcttcttcctttttctgtgcttctaaaccttcgtttgccaaagtgtttttaattgctctgtttatggaagagaagtggaagaagattaaaaacatgcaagagcgcagagtgcagagaagtgtcagaacttggggtttatcatatgtgaattttgaaagaaggtaacaagtgggagagtctgagacacaccttcttcgagcaacctcttcatcaatcaggatcatgcggacttcttgaaggatttgagacctccaatccgtaggtaacatcggatcgctgaagtcgccaccgagacggaataggcaagtaatgcatggcatgagtttccagacttgactcttatccggtgagatgcttgaattgaatcgacacgtatataagaagaacaggaaggagaagaaccaagacctactcgtccgtagtagtaggcggtaaaggaggttcgaactgagccaggagacctcttcgagcatagagcacgattcgatcgatatcctccctaggctctttgtttgacaacgattgttcggcctagaaatcagaatgaggaagcgcagagatcagagcgatgcataatgatgatatgttcaaatgatactgaccttctttaaccagtcaaaggcctgggaatcgatgtgacacaaaagagttcggaaatcaattgatcgtccactccagatgattctagtacaccgccagacagatcagaatggaagagcgtaacataattttaacgtacttcgactcctcgctcatgcttgaacttatcaggatggatcagaagactcttcttcctgtattgtttcttaacatcgttctccgttgcgttgaaaggtaggtcgagcacgtcgaacggactacgatgaagagccgaccgtggcatgaaaaaggatcagtccggaacaatgttgacggagtttgacacagatcatatctacttgagcttgaaggacttcatcactcgttccacctaaaaaagcgaaacaagacatcggattggtattcgaatttgaacagaaggatcagtaacataaactcatcactcataaatagacctataacggactgacctcgagttctttgataaagttgctcgcctccactgctatctctctatcgttcgtagacatagtggaaggaatcgtatagggacgaagatacgagaatgtgcagatagactagctactcggacgatggttgctgggatgatccggggatgattaatccgcctgactgcacgtggcgtcttttgtctcttgatcaactgctctcctctcaacgtcgaccaacgactccgtttacgtctcatcgaggtctcttcctcttcctccctctcctcggcgtaggacggacacaagttggacaagtaaaggatcttgctctatttccttgtctggttgaaaaaatcggccggagacagaagagagcatttggcaggcgagtgaattctctttgttacaccattcccatgcacacgctcatgccggcgatccactcacccctccctttgtccttcggcttaaccgatcttgactatgtaggccagcttttacatcggaatccctaccctagtaaggtgtcgatagcgtccatacatctgaagttctggaggttatctcaaccaggtctgtccttagtatcttcagttaacccctcaaaagttttctgacactcgtcccggttctatcctcatcttacaatcatcggatcaaactgcttacaatccctctctcaaattgcccttgtcgtaataaaaaaacatacggactaatactgaatggccgcgatgaacatcattgatccaactctaccactcattctcggatatcataaagtacaattatccgccaatgtctaatgagtttatggatgaacacaccttcgtgaaggcgctcttcgacttcaagtcatcaggatcttccggcttgagttttcacgaaggtgatatcattcaaatatataccaaatcagagtcgggatggtgggacggggtttgtgatggtcagagagggtatgtttttctatctggagactttcatcatctgatatatcaattcgtttatcaaattcccttctatcttacacccttcttttagctggctgccttccaattacgtgatggcgcttaccgatgaagaaaccaatagagaaattctgcgagtggagcgggcgggtcttgtcgcctctagacaagagctttcggacttatccgttcggaaagtagagtcgagagacgcggaacgagaacggcaggacaaacatgaagcagatgatgtgaatgatctctgggttccgagagtaagtccctcgctctgggtactcctgtctaagttgatcgtgcgctcagagctgatttttggaaaaacacatcttcaacagatatcttcaggaggtcaagtaagcttacattgtttggtgctctttatcaacaatgttatctgttttgctgacatcatatcaatttatgatctgtggcttctcaggtgtattacttcaatactaaaactttcgcaacacgacaagaccttccttcggccgacccttcttcggacgtagacgcaggcgatgctgaaggcgatgaccacttggtgacatccaccgtaaatggccgtcatcgatcttctggctcttcagcgggttcatctcctttcagtcctgcacaacccaaggcccgtcaattctctgaatcgccaaagcaaagtagttaccgtgccttcaattttaatgctccactcggtacttctctttctacgacagaccgcttagaggatactttgctccccagtcctgttctctcgatcgagtcatctcctgtcctctcagatcctggagttttcccatcctcgatttccctcgggccgtctccctattcttctaagaatgtcatacctagaaccaccagttccggaaacctttcaaggtgggattctcttgggaaaagattcacgcgtgaaagctttgttctgcgcaggaaggctagctcgggatcgtctaaatcttcccgagctcaggccatctctgacgtggctctaaagatccgagacaccatcaaatcttttaaagactcgatcgatagttttagcgagagcatgctcttcgcagacagaattggccatgcaggaagtgctgtcaaggaagctcacagtgcggtcggtttccaactgaacttgatcaccactgccattcgtgacctagtatatatttcaggagtgttttccgtggggtcttcgagctcaacgtcctcgtcctccaccgacctatccaagaacaccgaggccattcaaagatcttatctcaaagtccaatatgccttctcccgactgcttctctcaactcaaacgtaccttcgcatcctggagtgcgttggcgtaacctctttagcagatcaaatatctagctcgaaagtaaagactgatgcggaagacgtggagaggttggtggttgcgtttggattacaggcagagcttacaaggaacatgcttgaaaagaccgatgactacgaggcgaacattcgccgtggtaatgcttgggtagaatctgtcggattggatcgtctaccaggcggccaaaacgggttcttatctgacgctagatcgagcggaactcttagacctttcgcaaccgaagctaccgatccagtaactcaccaggttcagcaggcgtgccagcaggctttcggcagactagtggagatgtctcctctttccgtctcgttgaaggatggccaagagatagtcatggatgtcttgacgcgtgtcaacatagttctacggcacgttcgaagctttgatatagcaaatgcgatcgatctcgatggagaagacccggctacacctggagtgaaggatagtgcctatggagcgcttgtccaagatgccaatatccacctgcttcagttcgagcgctcgaccaattctcttacaaatgcttatggccaagcgctcgcttacttcggagcgcttcccatcgccgagctttcaagccatctgtctgtcctccagcaattggccaatctgtccttgaacgctttccagtctctctgcgaggtcgcattctttcaagttcaggccgtaaaaggtgggatcgccggccggatcggcaatcagcagagaagccgtacgtctaggattttatccagtggtaatcaaagtcaggtgggcggatcatccagcctctctcgaagctcatccttatctcagttgggcgaagctgctctcaaccctacgccgaggaacgattctaaggctgtcagtgttgattctgaagatgataatcgagctcaatcaacaccagtcgctgcgctaggatttggaagaaaaggtgatcggctcaacgacaccgacgaagatagagacgtagtggtttcgatcccgacttcagcaagctcactctcgctgagtggacgagcaaggacaggatcgatcagtgcactttctttcgtttcgtcagtaccatcagtaccatctacaccatcgactcctttggaagatacagacgggagggagagttggctgataagtaaatcagaacagttcgatccgtcgagattgcgacagaatagcagcgatacttgtaggttaacatcttgtagagaagatgatacgatataatgcggctggaacttgtcgtctgatactgatgctgattctgctggcttaatcatctttcgactcatctgcagccaatagcgatattcattttagcgttccaagaacgaaaaggattgctatagcgctttctccggccgagtcgggacaggaagatacaccttggtacctaggttgcgactgggatcctgaggatgtagtcctcggtgatggtgacaaggatttagtgaaaggggctaccttagatgcattgatcgtcaagttgacgtctcacctaggagataagcacagtaagttgtttcgttcctccatcctttgttctgacgaacaaatggcaagcctgttctaacagccgtgtccattgggatcgctctatctcttgtctaaacttttcaggccatgaatatcgagaaactttccttatgacctacaaatcgttcaccagcccctcaacacttatggagaaactagctgctcgattctatatctcacctccagatagtttaacggttgaagaacttgggcgttggagaaatgagaagcagcggctcatatggctcaagtgagtctttggtcctgttcctgttcgcaagtttttgtaaggtaggaactaggcatcaatggctgacggtgtctttattctcttacacttttacaaagggtcatcaatgttttgaaatgctgggttaccgagagctttatagacgcggacgaacacgcaacgataaggatgatcgaagctttcgtagatggtctcccggatactgtcaaagtgcgagaatccgggggtctggttcgcattcttcagaacagagttagttttttctcttagttcttcagagaattctcgcctgtctagagggaaaggacagcttatctttccgtcttgtttcctggattgtatagagaatcgataatgcttatggcggactcaattcacgaaaggcaactgtggtgaagaatgattcgactccggctccaatcttaccgaaacacaagatcatcagggtgacagacatggatccgcttgaggtggctagacagctcactatcttggatgctcagctgtttggtaaaatccgaccagtggagcttctcatgaaagcttggtcggatatgtcggattccaaaaaagctcccaatgttaaagcctgcattcgatttagcaataatgtgagttcttctgatgtcctgagcatagctttagcttgaaggaactctgtctgctgcgtctgctcgattacacttgcttatgggtttcaacatccctccttaggtatcgaaatgggtccaggtgtcactcctgtctgaatatctacccaagtaccgggcccagatcatgaaagctttcatccaaatcgcaaacgtaagcttcgctagttttttttaaatcttttgttttgttataactagacagacgtttttgacctctgttcatgcattcaatcttctcccgtgggtatctgtgtgtttttccctttgtttattggatacttcgaagtgttgcttgtcaatcaacaacttcagttgtatggcttctattatcgccggtctggtatcatctccgatctctcgtctgaagcgaactatcgagcttcttagctccaagaccattgctacgagggacgccttgatcaaactagtggactcagagcgaaacttcggggcctacaaagaacgactagcaaaatccaacggacctgctgtccctttccttggtgtgttcttcttgttctcagaagtaggattatatacgttttattcttagtgacgacattgacattgcgtttatatgttattgatacaaggcgtttatctcacctacctaacattcatcgaggatggcaatcaaaatttcctaccgggaaacaaaaagctgatcaactttagcaaacgaacaatgaccgcttgcataatgaaggaaattcaatcctttcagcttggaagatacaagtaagtttggcaatgaatatttaattgccgcgtccatttttcttgagttgtttttgactgacctgagattgtcctctttcttgaaacacagttttgcattggcacccccaatccaggcttatcttcatgaacacctagcggcggatcatcatgtcagatctgatcagcaactttacgagcgtagtaaagctctagagcctagagagcaggagatggaacgacttactcggtgagcttaggactggtctgaatttgtttccataaaacaaaaatacctatttattcggcattttcctacttcgaatttatgcagactcttccaagagagcggcttcctctaaaagcctaattgacttctccattctcgtagatcgtgaacgattatcgcttcgcctccaagtttccctttcttctttcttctttttttgcttgatttgatttacctgtgctgctttctttcctaactatcttgatagttgcttctcaatctctcaagaacagctggtggtcttttcttcagcttgtggatggtcttctttgcttcctatttcatactgctttctgctcaatttttgcttaaaacacgcttgcttctctgccttctcttcgttatgcttactttagttgcttcttgttgtttatataattatgatgatgactgctctttctgataattatcaaatcattgatgaagaaacatcatttctgtgtatgaaactaggttgaaatgacaatcgtcttcgatatcatttgaatagaaaatgaagagatcaggatatttggttctcaccgccacctttgaaattatcccggacctctctcatgacttgggttcacggaaaggaaggcgacgatatcgttttcaaccctccgttgatcctcgtacgacaagtaagaattctcttgctatatgaattttcttgtctgaatgtccggctggttgatcaagaatgctggcatatcaacaaaaagtcttttcagatgaaaattgattgctaaatttgatctcgtcatctgggtcatgtcttgatattttctcatagcgatggattttggagaagctgaggaaagagagtgtgacttcagtgttggacataggttgtggcgaaggtacatattctggtattctgcttccaatctcatcaacgaaatccagttgcagattgacttgttgatccttttttgctggtttggacgatgtggttggataggtaacttgcttcaagctgttagtgactatcagtatctgtccttccagtgttgttgtattttatagaagaaagaacttattgatatcatgacgtttgactccagctctctttcccagctcctacaattccagagccttgcattcgggaagacacatgttcatccgaagaagatgagccagaacccccgagtttacatcttaaagttagtatctatcttccgttatagacatataatgccagggaaacaacaattatagatctttccctgcggcgaccaaatgaccgatcatttcaatttctggttataagaaaatcgcaggtttggacataagcgaacaggagctgaatagagcttcagagcggatctttcctctgattgatgattcatcagacagcccaattcgcaaaagatggacagatctagagataaagtttttcctgggagatcttaccgttgtaagtcccatctttggttagaggaactcttactgatctgataagcattcttattcatgttgttgcttcttcctgtgaagttcgatccagaactagaaggatatgaagccattgtcgcgtcagaagttgtagagcaccttccacaaccgatgttgagcgcactcggtcctgtgctccttggaaagtataaaccccgtctgttattaatcaccactcctagtaagttagagcatagcttgtttgatgattttctttgactgagccgacgaaatggaaagttcagattttagcttcaacgttcgcttcaaccgggacggagagaacaagagaggatatccagatccgacaggaaggacagacaggattttcaggcaagtttgactggtgtcagcgctataagagatttgtgtatttatcaccttcactgtaatctatgtgccagacatgatgatcatcaggtaagacaatacttatctgtctcaagccatcctccgtcattgagtttgctgtaagacttttctcttctcttgtcgctcagttcgaatggacaccggaagaattctcgtcctgggctacgtccctagcccacgaatacggatatatattggagaaaagcgctatcggttcacctacatctcctcttccgcctccatctgaatcagctacgtacgctgtccattgttgtgtcttccgactcgatcccacttctcctcaacaccagagcccaccatcgtcttcttcctcaagcgcgcgtccaataacacccagttgtaacaaagaaaatcatcgactcctcagatccacccttattcgagccacatctctcatcgggctggggattgactttgaagatattcgagaaaccgttagagatctgatgtcatgttggggtagaacagttattctcgtgagtgaattgtggccagagttgggagtcctatgtggtggatcaaagagagtcttggttcaggtttgtttcaatctatgctttgctcttcctgttcttttcttcctttctcaaatcttatcattgaagacgtgatgtggtcccgatcaactggtacatccacaggcgcttggtggatggggtaatgttcccccgccccctcccct

SEQ ID NO: 372 - DNA, 44110 bp, Xanthophyllomyces dendrorhous
ccccctctgtcatcgtcaacatctacttccgtctactcatactctgatgggttcttcgattttcaagagttttcgatcaaacgagccgggtacgatcttgaaatccaatggaaccattatcatgcgtatgatctcgcctcttcagagcaaccgcctgacggtttgatagactttgattcgagagacaagaaaggaaagagagaagagaatggatggggatctgaggagtcaacaccgggatgggaataaactggaggagtttcatgtttttgatgaaaatggtttgtctaataggtcggatgagaagctcagtggttggtacaagaatgtatcggagagatatgaatagatagaagaatgaacgtcatgaatggggggggaatattgtataaaatgggggaatttttagagcttccaagctctattaacgatatatggaaagagcaaagaatgggagaaagacgaaaggtgctaaattacagaaaccatcttccgaggtgcttgagattgtgaatcaaatccaagacttttagcccaagccttcaaatcgatgttcttgttctcaatctcaatcatccaagtaagtttctgttccatcggaagttacatcggatggaaaaaaaaacaccagaatatcagatcagtcggaatacgaaaacgtatcagcaacccgtcgacttttcaatacttactgataactctgccggattaggtctaatcgtcggatccttttctaaacatctatctacaaagtcaccttcgaccgttccgacgccccacggttcacctaacttcggcgccggctcgttgactatatgttgcagcaggtctaagatcgacattgtcatcccacctccaccaagggacactcctttggatttgcgtttttcagatgtcggaggcgaagtaatggtggccgatgaagttgatgagggtatatcagagtcatctgcatcatcagaatcttcatgaggtaaggaaatagatggtgaatgagcgcgctccttctctgctttcaaaataaaatcatcaattggaatgaatcacctgaaaatgggaaccggccaagcgccatctcaatcaacgagattcctaaactccaaacatctgatttgacagtatagggcgctccttggattcgctccggctgtccaaataaaaaagatattcagaaatgtttgtttaacacatgagtcttgattgttattatgtactattccaagagagaaaggagcaaaaggactgacactcatatacgtgcttgttcctacgaaagtgttggcgatactattgatcaactcgcccgatactccgaagtcacaaagtttgatctccccttcagaattgaccagaatattcgatggcttcacgtctagcatttcgctcgacccaaaaaaaaacacgcacatatatggtgatgaggaagaggaattccaaaaatatggaaaagggtacctgaggtcaatatttgcatgctaatgcgaagtacctgtaagtggagagaaacaaacctcggtggatgattcgatgaacatcatatagatatgttaggccctcgaggacagcatgggctatcttgccaacgatgtcgatgtcaatcgaaccgtgttttcgatagatgttatctagtgacctgtagaagtcgagtatcaagacgatggaaaagaaattgttctgtcaattcgagaacgaccttaagagccacaacagacacgatacagaaagaaacacaccctctatccatgtgctccatacagatacagatgtgaggatctgccatgaaagcgccatagaaggaaacaatatatggtgacgagcaatcgtgcattatctgcaactctcgtaagatttgtttcctaaccgacggcttggcatcgattagaaccaactatatggaagaaagtcgtcccatcgcagcgaagtcagtgatatcaactgacaacatctcgtctcgttctttctcgccatatctaagagagaagctgtacctttctagccatatagagccctgtcgcttcgtgtaaaactttggcaaccgtccctccatttccacttcccagatcaccaacaaccttcagatcctctcctttcagatctgtctttgtttttccgtttccaccgcctaaatgcaagctttcgagctggcttgctagcttctgctggtatgagaccttgccggaagacggagaagatgaagatgacgatttttttattcggccagcggatgaaccggtagttgtagaaggcgtaggcgctagccgagtcgggccgatcgactttgagatgtccagtccgacgggcttttttctcgagatgctagattttttgagaccacttagaccgataggcatgctcaaagctgggtccgatgtactcgaacagggaagaagagaagacgacgtggaggacgaagacgacgagggcaaggtgatggtggattgtgatgtgacaggttttccgagcgtcagattctcgacagaaagtgatatagaggaagaccgatcgtatgcagacggagacactgtcaggtctgttgtctcctcataggaggaagatgcagagccgatataggttgattgcgctctaggagttatgtttaaacaatcatcgtcgtctgtgtagtccagcggtctaggtgccaacgcttcggctgacaattgtaggagtctcggattccgtttcttcttcggttgcgggagccctgggaacgtagacatatgtgtgtggatgaatgagtatgagtatgtgtgtataaagaacgagatcaacgggatgatgaccggaagggagagagatgggaggaagatagcaaagggatcaaaagagcatttcaggggttccctacaccgcagtcacgtgcacaggtcattcgtagggcgcatacacataaacacacatacatctaattggaacagagggaaggaagaacgagagagtacggaaggtaaggcagagtaaaaagaaaacaaaaagatgacacgaatccatggatcatacggaagatagatagagaaaggcgaggaggaaggagcgagcaaagcacaagaacgaaaggaaagaacaaaaacaagatacataagcaaaactgacgaaatgtcgatcgaaccgatcaaatcacaaacaactagaggacagacaacaaggatacacatatggttagcgaatttcagagaagaataggagaacatagcatttgtaactaaccttgccctcccctgaccgcactctcttctccaacaacctactcgctctcgatctccaatcagattccacgaaccgctcgacccgatcccacattgcttcttttcgcatatggtcgggaataaatctatctattgggttcttcatggcgctttgtatagcatgaaagaaaccatcagaatcgtttctgaatacgttgtacacgtatggcgcatcgacatatttcagtccgttctgcaggagatccggggccgagatgttagtgttctactcggtcttgctttggagactccaacacacacataaacgaacacacctgctgagtataccagttgattttatctcccggattatctttattccaactcaatattgggttcaagaatggtacacctagacagagcgcatcgtacggactgggactcaacggtgggttacctattccaatcaaaatcttgctatgggcaaccttagagaagaactcggtctgagggagcaggtggcttgtatgcgccaacgcggacggcggttcaggaacattcggtgtagactgtgtatatgcgagtaatgtcacgttgagttcatcccgggctcgttgaaagatcgcgttggaccctgcaaattgtgagttagagtagatgttcgggtgagatgcgagaatgatacgtaaatagaacggagacacgaacacgcaaactcttcggtgaagaagaatgcagacatctttgcaaacacgtatgcctgcttctgccgctcctctcgagggatcagaggggttttctcacagacctcctcgatactatacccaatatatgtgttgcccaaatttgagtcagaacctcgggggcctatgacttgctttttcggcacaagaatcttcgagggccagatgcttgctaagaaagaggaggtcgcgtctctctttcgcttgtaaccgatggaatcaagctctccgccttggaagagctttcggaaatactcttcctgaagctcgatagaaggttccggtgacatcgtccagcctggtccgagtggatttttactgtcgccccagaaatggaaggagaataacttccaagcaggaatccctcctttgtcccaaatggatttctccgaatcagtattttgtgttgtatcagttcgagtacattcagcggactctaggcatttgaatgatttgatgggttcgacgacgacgactaaggcgaccgaacagattgaaagcactagagtcagctgttaaatcaaaagcgttttttgcgactctttggcgttgatacctttgacatagtcccccaggactctatattgtatcgcggtctggtcaagcctccttgaaaataggaacgtatatcccagatgatccaacgcacggattatagatgaagccctattatttgagcgattggattagccaatgattgttaaacgagaagagagcctctgaatcaagtgacacagtaagagaacgaaccaaatggcttccccgcccatccaactgaggaaagcagatccaatgaactccatcgagccgacaagaacgatggacgattgtttctctttacaagttcctttctccaaacattcatgtaaacggatgattgcgtttcgattatgttcttccggtgtggagcctattgagctttgagacgagacttcaatggttggatcaatcggatcatctggatgcgctcggagaaaatagagaagctcccgaagtggtgggagaggaccaggaggaggtagaggatctagatgcgggacgggtataggctcagattcgagctcggagttggatgcaaagtttggatgagaagttggcgtggtatatgaaaacagaagggtgaacaatgagaaaagagtgagggtaagagcgataaagagcggaaccgtccggcggggcgagcgaacgaatctagaaagaggaagagtggtataagtatggttttcgaaacaagatgccgcaccttcatcgagagaatagacaaccgggagaatgagggttatttctctccttttgaactaacctggtcattgaagatgattcatctacagaataaaccaaggcttctctatgagcgagtgaagaggcgttggtcaagtgttagctccgaggtttcagccagaggaggtttcactggttagtcaccctggattcaacagtcttctcttccatcacttcctcgcctgcctctgtcggtttgatctctcaactatcatcacagtatgtctcctaccgaaccttcccagttaaatgctcagatcacatccacccagggtgtaatctacgaggtagttttagtttcatttgatcaatcgttattatgtcccatctgattcctgacttttcaatcgcatacagaccatcggaaacgtgacaggctcctcagcctggaaggaaaatggaaagaaccttcaagagaatgggaagaaggaactagaagctgctaaagcaaagcagcatgtggatgctgtttgggatcaagcagccggaaaactcaagaggttggcccttgttttggcagatgtgttgatcaaacaaacttatattgaccgacatgcgcatatacccgcatctacttaatagcggatggggaattatagctggtgaccaagacaaacagacagagggaaatcttcaaaatgaaaggggaaatttagaggaggcacagtctgttcgttgtctatatttcttttccttgtaatgcagtgacttgagatcaataaaactgaatattctaattatctctttcctttccgttttcttaaatgcacatatggttcatctagaaaggagaaatcttgcctgctggaggatcagagacgatcaaaggaaaacttgagacggctgctggaatcatcaccggagatcaagaaaggcaaaatgcgggcaatgtccgcgtccaaaaggcagagttgcaaggaaatatttagcaggcggaaatgtttagagatctgctctactttcgatgagaaaagctcgatgtatttaactttgtgtgatccaatgtatttgacgctattgatgtgccaatggcaaggtcgtcttgtcgcctggagttgggttttatctatcggctcggtcaccaccgcgattagatttgttttctcgttccgaatttgtttttttttgtcgttcgttctcccttccacgtcgacatcttatcgtttcttcctcgacatgtcgagaagagcaacatacctcgatgttctaagcgaccggcaaaaagaaggttcgctcttcgcacagatctgatcagcttgggcattattctcttttgaggaaagctcatatcctccagaggaaacttggaatttataaaataatagccgtcacatcggatccatccgttccacttcaaatcctcgccggcccaggatctggtatctaacatattcttataaatctttgttcaatctttgttttctattgatatgtatgccaactgactatggcttaactgctgtatggggagataataaaaggcaagactagagttttgaccactaggatcgcacacatcatcgaacatcactatgtaccacctcaagatatctgtgctgtcacattcacgaataaagcggccaaggaaatgaaagatcggctaggaaatctattaggagatgagttagcttccaagttgattatgggtcagtcttcagaatgaacccctgatttttgtatatgctcatcctctatcgccacctgggaatgaggctgaatggattggatttcttgtacctttcaggtactttccactcggtctgcgttcggtaccttcgtcggttctctgaactcatcggactccctaagaacttcataatccttgatcctgacgattgcgccaaggttatcaaacgccgatggcctcaatatgccgagaagtttcgggaacttgctcaagagtcagccggagagggaggaggtgaagggatgaaggaagaggattttaaagagaagtggtgtttaaatgaaatcagtagatcgaaggcaaaaggactggaaccacgagcggtcaggaaaatagcgatagaggaaaaagatcccaagaaggctttattcgcagatgtaagttcatacacaatatcctgtcgtatttcttcctttatcatgtcacttacttctttgaatcatgtggacctgaaactgctagatatacgaagaatatgagaacgagcttaaggacaatcattcattagatttcgatgatttactctcaaggggcatggaggtgagtaatgaagattggcggggtgctcatcgagaagccaggatgggattattgaactttacgttgacttgctccactttagcttttcaaaacaaacccgcatggtgagaggtatatttctcgtaaatggcaagttgttatttcgttcgactgaagaactgtttgtttcgtatcttagtcttgttcaacatcaaacatattttcatagacgagtttcaagtgagcattaccctgtatcctcaccactcttcacttcctcgctgatttaatgtcaacttccgactcttttcctcaaggataccaaccatgttcagtacactcttgccgagtaagcacaagccattgttgtctagaagtaggctggaaagctgatggcagtatccttatactgatcgtgttgttcggatataggttatttgcgggagtcaataaaaatatcacgatcgttggagacccagatcaaagtatttacggatggcgttcggtacgttcctcggatctccttttgacatttcgtttctgtcatctctacttccctacttatcgaaaactggcgatcggccaatcctcacggatctttatcctgatcgaacaaaggccgagatcgagaatttgaacaagatgatgaggaatttttcagggtgtaaacaaatctttctagaagagaattacagatctacaggaagtatcttggcagctgcttctgctgtgatctcccaaggttggttcttttaatacccaatcgaactttcttctcatcccttctgcctctcatcgatgatttatttatctgtttatgatcgatagatgtgaacaggatcaacaaaggtacgaagattcgttctgatctcattcatacatagatctacaagtgctcacttgttattctatcttcggacctcttaacacaggcctgtttacaaatcgcgccaaaggcgaagccgtcgtcctcaagcgattctcaaacgacgaccacgaatccaactttatagccaaagaaatcaaacgactcaaggttgcctacgcactccggtgggatgatttcgcagtcttgttgagatacaatgctcagtctagaggatttgagaaagctatgcagaccgaagggattccgaataggatcttgaatgggcacaaggtgagggtttatctgaaccgcctgtccttcgttgtggttactgataaaaacggatgtgcggttttttcggattggacaatcagttctttcaaagagcagagattatgcttgttattggatatcttcagctagtcgagaatgaagccttcggtgtatgttcccctctgatttccatcccaaaagcgttgaatcagaaccgtgcttgaccggtacacaatgggttttcgacaatttttctgcgtagtctgcattcagaagagttgtcaatgctcctaagagaggccttggagaaaaggtatgtagtccagatccttatgcgacctattttgcgactcacgaattgaagaagcaaatatatatgcgattctgtttggtgatagagtatagaccggattgttgcatcagccaataacataggtgcatctccaataaagtacctccgtcaatcacgaggagatctgaataccaagcaggcgcaggaaatgaaaaagatgattgagggtttggatacggttcgagcttcagcaaaatcggtacgttcatgtttacttcgttacttaatccagaagctgattttgtttctataatctgagcagggatcatcagtcatggatctgatcgacctgatcgtccacgtgttcgagctaaaagctcatttcatgaaagaagatgattgggaatctcggatggaaaacatagacgaattgaaaacgttcgcttccaaattaactctcaagaatgagtctacttatgagattcctactcagggtgattcagatgacgagatagaggaggtggtgatggatacaccactgaggatgtttttggaggaggccatgttgtctacagacgcggacgaaacggctgacaaagatgaatcgcccgtaagttggctctcgccctctcttatggtacaaacagaaacatatgttgtacatatgtcataatcggcgttatctgacggtttgttgatctggttctgttgggtggggctgtttagaaagttctcctttcaacagtacatcaagcaaaaggactcgagtggccagtcgtatttatccctactcgtccgttcatcttacttgtcattcgacacgttcactccacgatcttcaatcgtctcgttttgcatctttttttatagtcgagatggatatctatccgttctttagatccaagacgccggagcagattgatgaagaaaggcatgtctaaattacttgacagctcgtactacgtatacatctatattgatcaacatgttgatctttcttatttaggcggctgttgtatgtaggtgagtgtctgacacaccttctgtggtactgctccagaagactgatgctttattcttatctatgatcattcgaagcaatgacccgagcgcaggctctgcttgtaagttagccagtttcctgcgtttatgcttcagtcaagcatggatctgacctcgctcttgggtaaggtgaaacagtacagcacacatgtagaatctcgatttgcacatggaaagagtagggcttcagaggtgagaccggacatttgtgattccttctcttgtgaacgttaactcactccaaatcctctccatgtttctagatttccccattcctgccgccaaaacacaaatgggtccgtatcaaaatctttctctttggaagtttctcacaacttgaagtaacgtgctcttctttcaatgacaataaaagagagagctgtttctagtaacgtatccgatcatcacgtccaatgcccgcattactatggcaaaaatcctggatcgacccgaaatagatgaaaaagttgttttggaagcgatggcatctgcgtaagtattccttctcagtcgtgtatcgatatcattggactcagctggacttttctcatttgaggggtcacagaaatattcctcatgaaacgacagacgagtattacctaccttacagcgcaccgacgacatacagccaatcaggagggagttacttcagtcgatctaataaaggtaaagacgagtacgctttaccacctatgatggattcatttgacggagggttctcgaaagctagcactctagtcggttcggcatctaccttttcttcttccactgtctcggcttccacttcctctacagccgatcgacagcctcgtcggcaactgcccggcgcaaactctgtgccttcctcaacaacatcctctttgtccacaactctaccgttgatatcaagctcaagctcgagctcgagcccatctatcggaagttttcgagcgacttcgtcccggaagatcaacaatctaagctctcgaacgggctccacccctgtgttcaattcaacattcaagcccccgtctttcatcaacccacccccttctgcttctcctgccaacccaactgcttctatttcttcaaccaaaacagcgtctgtcccatctcactctcgatcatcagcagcagcaacagcaggagggagaggaagaggaagacagaatcagattacagctgtagcccgccgtcgagcagctctgacgggccctcctcgaccggatcctcctaaatgggcaccacctcgtcaatcggaatcagatcggtataaacttccgcctatgaaatcaacttcctcaaaatcagcagatccttcaatcttgttacctgatggaccgggtactggtctagataggtttgttgatgtgggctcggaaggattatcgattatgaagactttaggcttaagttcatcaactcctcctactactgctgcctcctccgcttctcaaccatcaattcgaaccaatcaatctcgacctcaaaatctagaagaacacggccaaacacgctcgagaccaaaccggattaaaccatcattgacgcctacttatcttatcccacaacctacaaatccagagacagcagcctcaatcatcgtctcgggttctggaccttcttctttgggtctaagtacaagtacgaatggagtcgggatcaaacgaagtttggggcgttcaacatccgctgggtcgtcagggtcgagagggctatcgaggtcatcctcgagaggatcgggtactaaaaggtcaagaggattgtgaacgagggggagaagaaaaatctcgtattttcgataatgatgtaaaactgttctctcgggacagaaagtgtaatacataaagacgagatgaatccgttctatgacaaatcgactagttgaagagagagctgagtacgaacaaagtcaagagaccgaatggccattgttgagggaattatggaaaatatgaaattaagagagtgcaaaaattggatcctcatcatgaatgcaattggacatcgcgcacaagatagaatgaaactagcagtataaaacataggagtaagcaaacatagaacaactataagataaaaagtgactatgtcgttttagaaagacttcaatcgaaggataaagttgatacccaaagcgacaatgatgattccaccaaggagcgtcggtccgagatcatcgtgatacctcgcatctcgtcgctgatcagaaaaattgggatatacatgtgtcagcaagggatcgatgagagatcatagaaagaacgaacctttcttagggaaatcgctcggtaaccgaacattccagcactatatgcgaccgagatgagcgcacaaagcgtgaacgcaaacgcgctgtacattccggctgtatcatccacagaaacgaagttcaatagaccagttgagataccagcgagaaggacagccacgtgaagccatcggaggaatgttcgctcgttagcaaagatgacctgcaacacaaaagtacgatcaatacaggtgagcctcaatttaagtaaatccgttcttccaagtggcataccagtgaagaagtattgcttaccttgggctcaattctgacgggaacagagatcctcttgccagcaggagctgagaatctgaccatctccggttgatccaacggcgccccctcgtcctcctcctcttcctcgtccaacccagcctcagcctgctctctttctctctgggatttgctcttgaatagttttgagattcccaaagagttcagcatggaagaatacttggcatcaaactgtcgagatccagtcaacggctcgatgtggatcggtcgctcagctcgtttggccgagtttgtgttgccgttggtcgagggctttcgatcagccgtcgaggatggaccctgaacctgaccctccccagctaatcgcttggcctccgcttcctgtcgaagctttacctctcggaacgcccgggcctcattaatccttgacatgaccgcatcagtcagtttgatctgtttcgcctcgtcgtccttggaggccaatttcgagtacgggtcatcgtcatcatcaaactcgccatctgaaacgggctcgttgtagggcgcttcagaaggtggaggagatccgatagaggtgggtgtgaccgaggctgagttgccggccgaggtgactccgtggtgaggtcggtgaatatcaacctgatgtcctcggctttgttttcggatatcgatatccatctgggggagccaaaaaggaatcaaagcgactctctccggaagaagggcagcacatccatgaatgaacttggagaacttgggcacagcctcgaccaaatgactggcgactaggtctctcacccactccggtggttcctgtcccatttgggtctgtagcttgacctccaacacggcatacgggaactcagccgagtctttcttgtcgatctggttgaatggaggtgtgattccaatatctgtccgacgccagtttccgttagggtgatccgcgctggccgttcggtccttaccatcgaagtcgtcctcgcggaccatggtgagctcagtatcaagagagattcggactctagcatctccaggaagctggaaagcggttcggttgtagaacgaacgcatcaccggtcggagctttctagtttggatagcatattggacctcgtttgccaatcctttgactttgtcggcgtccttgggatcctttccctttgccttggcggctgcctcgagctgctcgtccatggtcatccggccgttgatgtagtcgttcatctggtgttccttgatctggaaacgctccttgacggacttttcccctgtccagtcttctcgatgtgtcttcctctccacaaagatcgtcttggtgtccatgcctccgtaccatctcattctaattgcctctgcaccctcggttttctccaaccgaccgaggtaaagatccaagtcctcattatcgaaataaattgaagtgatcgccgaatcggctggctcgaactctttatcagagttgaatactggaaaactctgacgagtcagctctgaaagcgaaaagagaaatagatatagaaaacgtgatacaaacctagaacgggaagatgtcttagtacattcaacttcaactgaacaatattatcagggtgaacctatcggtgagagtttgtgacgatactatgttagcatttcgtccgcctatctgccgaaatctttacgacgaacagcagtcggctggaatcataccgagcctttctatatttcgacaaggaagagagaaacccaaacatacccagtacttggtcgtctgtcgaacgaaagcattctggcttcctcccgctccagagtcaccctcgacagggtgtcctctcgttcggacgaggtcgtagagcttggaaagcttgacaatgatagcatcgtagttgtatcgatggaacggggctttctcgaggaactgatgagagaatactggcttgagagggaaaccagtgactttctgtgggtcgcgaatatccgagtattagaaatgtcatgattctaggatctagccattgtaaagataagaaaaacgaaatagacgtacatcgtgctttttgacaatcttaatgaatccactgtaatccaagcgagattgctagacgatgagctttgttcatagaacgacgatttacatgcgaaagataagaccttaacatacgtgtagttcaactttgtgaataaggcgagatcatggacatctgctaccaagatagcgactggtggacggaaagcgagtgagaaagcagagtgagtgatgtaaactgagtttcggcccatcgactatcaagagacagaaggaaggaacgcaccatcctcctcaagagacctaaatctttcctcgacagcgtttacactaccatcgtcactgttcgagttatcttctccaccttcttcgtcctcatcatcttcgtcgtcgtcactaccctcgtcggcgccgtgggggtctgatggaatatggaacttagactgctgagcctctgcatcgtcctcatcttgctcgttgaggacatccggatcagacgtgagactcttgactgtcttttcagccactcggattcgggatgccaattctttggccttttgataaaatagagagaaaaggatgaatggatgttgttttcgggaagaggccccgatcgggtcatcagacatgtttgtttattccttttggaggggtggaatctacaagagctgaagacaaacctttcgatcttggaacccggcaatcttttcgagctctttctcgagctctttgacaaagtgtgcctcgtcctcgtcttatgataaggagggaggaagaagtagaagtcaagagcgaatggcacaacaccaattgattagcccaagttatgtttccacacaggcggtacacacgagaactgatttcgctggcgaaaaaaatcaatcaagaagggagcgcagaaaggatttaccattccattgaagtccgttctcagtggcctgtttcagggtcttcttgagacctttgtagtcgaggtactgcaagtgaacaatccaggttagtcacccaacatcttcagaaacatggagattgtaagcgtcagacatacaaaggcctcccactctgggtagagcgtttgctatgatcagaaaaattgagaagatccgtgtttaattgatccagggaaatttcggattttgaagttgtgggttattttgagtacatggagagagcgtcagtccaaaaggttggtcggatgtaatttcttatcgatcacccagaacgcgggaagagtttacttgcctcaattcgacgaccaaacttcatctaacaagatatcttcttgagggagttgattcagttgagggagcaggggtaggatgggatgatagttggagtgaaggtaaagagaaggaaaaaaatgggagatgaaagttaggaacaggattctttcgacggaatttgggattaacgaacgttcgctcagatttcttcgaggggtccctgcattatccgtcatgcgcagcgaagccacttcaggctcacgtgctagttcattaagtgtatttgaatatcaaagtttgaatcttgagcaagctcattacgtaagaatttaaccctagatactggagttatcatctctctatacgttccctccttctagttttgatgacatacagtagctccttacgtctcttgccaatccacctccatcttcatcttgtcgtttgaaagataacaatggcagacaaaacatcgggaaaacctcggatcattcaagtaccggatcagacattcaaacaaagaccgttagctattccagattattcaccctcctcaccctctaccgtaccaatcgtcatcgataatgggtcttaccagttgcgagccggatgggcaaatgaacagacacctcggattgttcaggaccaggtcgtttcgagatatcgagaccgaaagtctggcaagactgtcctcctctatgggcaggatgtcgaggttgacgctgcttccaggtcgggcgctcggtccgtatttgagggagacgtgctctgcaactttgacctgatggtgagttcgaaccgtctctgttctatatattgcgaggaaacacgcatctgttcgttccgccacaattttcgcactgaaaaatgtcatttcgattaccgtccgagaaggaacatgtcttggactacaccttcttgaatctagggattgacactcattcaatcgaccatcctgtcctaatgaccgagcgtgtctgcacacctttggccagcagagcccgtaaggatgctttcatttcttgctttcttcttgctcttcttttggtttcgctcaactcaccatccttctcttctttaatcacgtcttcttgtataaactttcatctctatagtcatgtcagaactgctgttcgaagcatatggcgcccccgccgtcacgtatggcatagattcgcttttcgccttctctagaacgggaaagaaagacgggattgcgctcggcatgggtcataccagcacatctgtggtccctgtcgtgaatggacgaggtcttgtaggatctgctagaaagtatgaatcaaagacgcgtctttgttctgaaagccttcttccggcgcgactacaggaagctgattggaattgtccttttcttttccactggctgcattctatattcagattagcgtggggtggttctcaggcaagtgagatgatgcttaaacttgtccagatgaaatatcctggatttcccacgaaggttactccgaatcaagctactgtcagttgtttttatctgccaactttatcctcatttattcccgtcaacagccaccgaatagacatttacgaagtatacgtctgaacctctctttcagtttatgtaccgagaatcttgctactttgcggaagacttccaaacagagatcaagactttggcggacacgaaacgaattaacggggttgataccatcatgcagtttccttttaccgttcctgtgagtctttcctccctttgtctagaagttgtttctcactcataaggaaggatatactcatttgttggataaacttctctataaaatgcaggtcgcggatgagaaaacaggagaggaattggcgcgccaggctgaaaagaggaaagagtcgggccggcgacttcaagagattcagacaaaacagcgaatggaaaaggtccgtccatcgtcccttgtctttcccttttgctattcgggaactgtctatctgattttatctcccgttctgtgtgttctagttgattcaacaagataccgatctggcagcttataacgaaatcaaagaggccaaaacaaagatcaagaaagctgatttccaggtctgtttctgaatccttctttcttctacttcttccttctttctccatactcatctcaagctctaccattctgcctgaacatatacgctgtagaaaatgatcgagaatgcaggatttgaagatgagaaatccctggaccaggcgattaaaaagattgaggaatctatcaaacgtgcaaagaagcgctcgatgggtgacgagatggagcctgaggcaagattatcttcatcttagtttgtttttcaagcaacatatcgctcatcttactattctcaccctgtgacgaccaacaggaagaaccgtctttccccttactcgacatccctgatgcagatctgaatgaggaagagataaaagagaaacgaaaacaaaggttattcaaggccggatacgattcccgagtccgactccgagctgaaaaagctgctgaaaagattagacaggttggtctctgcagcttcttccttgtccttctgcttgggttcaaacaccaagtcagatggagataacagaatatcgaaactgaacatatcactggtggatggggattggatgttgataggcagagattgagcggaaagacgaagaagatcgaacggctgacttggaaggctggtctgctaaaatgagggctgagcacgaggtgagtttttagtatttggtcgtttctccttttctatcctagattgacaccaataaaatctcttgaacaggtcgtggtccttagaatgaatgaacgaaaaagacgaagagcggcgttgggagataggaaaagtgcggccgcgcaaggtcggatgaagtctatttctcatttggctgcagaaggacctgcttcaaaaaagaggaaaaagaacggggatggttcgtattcggggtttcttacacatcttcccttcgtttcatcttgaaaattgatgggttgttttcttttccgtatagatgatgattttggagcaaatgatgatgattggggaatttatcgagaaatcgtaagactccttccccctcctctcttttcttgcctgttcctgacactgacgattcatctcttttcgtacggaacaaaaccacgatgtctacctatacacatagggcggagaagacctagaggaggaagaggaagaagacctcgggatcttatcgaaactggaatcttccctactcgcacacgaccctacattcacaagggcttccacattcgcttcgctgtccgaacgacaaaacgagctcatcacttccttccttcgaggaggatctctttcttccagctcttcttccacttcatcagcaccaacaggggagtcatcgtcgacgccggtaaacaacggtggcgagcctgaaccaggagggttatcgttggaggaatcattcaggattcatttaaacgtagaaagagcaagggttccagaggtatggtttcaaccacatatcgctggtcttgatagcgcaggtatagcggagatcgttcaacatgttttgaacgaagtcgagctagagaccaggaagagaatgcagcaggtaagctttctctcctatcccttatgcattactttacgtgaatttgtatttgacgaccttcttcattactcgtctatctgctcttcgatcagtcaatcattgtaacaggaagctcagcatccatccctggtcttattcctcgactgaaaacaagtctaaacccaattctaccttacggcacccccttcgacgtccgtacctccctcctccgaacatacccgaccgtctcagtctcacaaggagtgaagaaaattggagaactgaagaaggagagtgaagatatagcattagatgcttggaagggaatggctgcttggtctgggacagatgagtttgagaagagtttagtgacaagagcggagtatgaagaattcggtggcgaggttcgttttcccttcagtgcttcttctatatatttcatctctttgttgatcattgaggaggagaggaatcaaagctgatcgaaaatcttattctgttccattcaatagtacatcaaggaacatagttggggaaactggcgtacaggttgatcgtttatctacattcatatacatccttctttcccagtggtgaagcaaggactttctactggtacaacctattttaatttccatacagcaagagaagacaacaaacaacgtgaaaggcaacactcgaggaaaagagagagaaacaagaatgaaacgaaataaacatgacaacaggaagaggaaagagtacaacatgagaacaacaggacggaagaaaaggataaatcaactacttctacgcccttctcctccttcggttctccttctctttctcctctcttcccattccagagcccgagccatcctcttcccctctcttgcccactcagcggcctcatagtcctctcgtttctcaaatccctgtatgaacagatcgtacaatggcacgatgtgttcttcaagcgaaagagatgttgagtcgggatctagatctaggggaaaccgttgagtcagttctgaggctgcgatgggagatgcaggggtactttcgcttaaagatgtcaaggtcgaaatggaggtagagaatgatgcagatgcagaggtgtaaaagcggttggcagagatcgaggaagaacaggaggaagaacggaagttggacgatgacgacgacgacgtagaaacgggcaggaaagacgatttgaagagggaagcaccagggatttgattgagaaccatggtttggtgaaacagtcgacggaatggcccggttggaaaatcagcgtcccatcggacaaaaacttggatcaagatcgttagcgtgttcctacggacgaaggaagaacaaaagatggatcagtcctgagtctactttaggagaacgacaagataagacagaataagccagaaagaaagggtcttaccaatcgggtcggaaccaagggaacgactttttcattttgaccatgacttccatcatcgatctcatcaacgaatttcccactcttctccttctcgttccctcgttctttaacagtgagttgacgattagctttccaacttgccctccgtgaagcgcataccaatcgatgacttcctcagcttcaagcggtccgacatcagcacctacggctcggatcatgagagcccaggtttcctgacgaaatgcgtatccttcattcagggcgagtctgaagtagttttcgaacaaactcgaccgaatttcatctctgagagcatgctcggcgcgaccgaccgctcgttctgccggatcagcgggattgtagaacattggtggggcggacaggaaggcttcggtcgtacgaacatcaggtttgattttcggatgagaattgagagatcgctcgatttggtcggtaaacgcgtttgctgctgaccgagtagagaacgtcaagtttcctgctcgaatcaaatcattatgcaattcgagcgtccggtcgagcataggtatcaggtcgaatatcgacgcggccaggtcaagacagacaggcgtccgagacggaaggagtgctctgatgagtatcatcgatagatggacaggaggagctggagtacacgactgagtaagcgatggtcggtagattgtcaagtagagtttagcagcctcagatgcttgattgagatcgatccagaacgcgagcagggtgtgcaacaggtctgaggaaatcacccgatcagtcgcagctactgactttccgatcgcttcgatcagatcttgcccaaaagatctcatcccgtagaacgaagtgtgctcgtctccggattcgtcgaccgagcgaatcagcttgtaagcgagcagatggaaatgacgagtgttaattctaggatgagtaaggacgagacaggccggtcgggtagaggaaaacgtgaatgcaaactggacaagtgaggatgagcgaagatggatagtttgacagctgatgagcatggcgtaaatgcttaaagaatcatctatgagttgtgatgacgatgggtcgtctctcgcggcgaagactgaattggaggagatagaccaatgaccatcacatgtggtcaggatgaatgaggcgatggaagaaaacatcttttgctgggcgacacatagcgaattatgccttttcaactgggaagctaaccagtcaagtcttttgatcatttttttcatccactcaatttctctagacgtggcgagatgtcgaaagattttttgaaacagtcgctggtagctttttggatcggccagatgatgagcgaggaacttttgtttttgagtgagaatgagaaagcgctcgactgcttcaatgctgagcaacctgttacgtgctgagagcagtgcgaggaggaagggtgcgtgcagagcaagcgaggcgtccggagagagatgttgatagagttcgcgcacaggagtaaagtctgtgtggagggcaataagaggtcaggagagaaagatgacatggtgcttatagaaagagtttgtgatgttcgaaccttgagacttgcgggctagaacgagcgcggcctggacagcccatcctatcacttctgaaccaaggccaggtctctgtccgacgagcctcaagacgaatctggcacactcatctctcaactctgtgttttcgttcttgacctgttcaaccagacacttcacaagttgttcaaaatcctcactggcaataccgagccggtctaacggttcgctggaagagaacaagagaggaaggatgatccgctcgggctcgaaggcggcgacaggggaggatgtatggtagagaatggattgtatgcggaaggaaacagggggctcgatggcatccatcggaggatcataggtgggctggatttcttgaggaactatgtatgtatgatgctgtaggtgcggtgttggatgccacactgttgatgatcgtggtgaggatgatgaagatggactaggttgaaagaagggtatatgctcggggtttgagtttgattgatcgatttgtgtttctggaggcaggagatattagtgagagtgtcagactggatacatctagagaaggatggtcattggaggagacaaatatacatactacggccggaagaagatgacctggttgtccgagaagcgtcgttcagttcatattcccagactccaggatgaaacaagctgacatcaattgaggatcggtagttcttgaccggatgccgaaggccaacactccgggagtttcgtctggaaggtgaccgtgacgagagcagacaggtcgaaaatggcctggccccgagtatctgatatgtgccagaagcgtcagataagtctctgaggactccttttcctttgatagatggccatggatggaaaaaagtagactgtcttcggaaggaccgggtcgtatagccggacgagagatggaaggacggagcggataaggccaaattttgaggagctctccttgaggagtgagcgatgaacctagacgtcatggcatgtctagaaagggagagagaagatctctagcgagagagatgatggatgaaggatgactgccgttgagatcaccgagatggttgagatggattggaaccgagaggaacaggaaggcgacgaattggaaaccgcccgttattcttctcttatcccattacaaaagggcattaagggtttggtctggaaagtatatttgatggaagactacaaaagtgattacaccaccgactatggctcgactacaaaagcgacgagagatcacattacagagcaggactacagtcgaactagggtcactgcaaacaacatcacagatcaggacgcgtcgagaacactagaaaagatgaatatatgcgaatacaaaacgactctggattgactacaaatattgtagattgagtggactgcagtaaggactacagaattgactaaatgctattacgaaccagaccacagaagcgtaatagcagggaggatcgcgctcgtacctccttcttgagctggccgtgccttgttctctccattgaatccatcccatcccttacttcctcttcctcttcctgcccttcctctttccctcatcttccttctttcttctttctcacacacattatctcatggcgacaacatcattcacggccaggccatccaagccggtccgaaacgtttcctccgggacgaccagctcgaatagatcgatcgggagaaacacgatgaacagatactcggtcagcgccgtacgtactgttcgattcttccttctctctcctatctctcctctttgcgtcgtctacgagagacagaacatcaaagactattcctcggtggatgaagttcatatgttaacctgtatgatactgaacgatgttcaattggttccttctcttacgacaacctaacacccatgcatacacaaaaatacaaacaaaacaatcctattcctgattctgacaaaatgctgcctggcttggctgaattacttaaagatgtactccagtacgtatacgctttgtattggatgaaaggattctcgtcctgaggttttcttcacttcattagagcttgatgacatgagttgtccctaggatgactgatctaactcttcgcttgaccgactggaccttgcacatatatagtggccgctgaggtcgatatggaggtcacagacgatctggccagaggtccgttcctttatcttttttctttgtcacacttgatgatcgtcaaattcaacactgatatactgctatctatctctgatccctttcgctccacgttcgatccagcccaaaaacgactccgagacctgaaggccaagatctcgtcacagtcgaagaagaactttgtgctcgaacgagacgtccgatatctagattccagaattgctcttcttatccagaatcgcatggcagccgatgaggttggtccgattgatcttttctccttcgtgattcatcacataggttctattcagcaaagccacaaattctgctccattctctccttgtcgttcagttcagccctggacaggcgtctatgctaatttcatgcgctgaccaactctccattttcgtcgtccgggaataactacaatagcaacaacaggtccaagaacatctcgacgacgaagacgataacgatgtgcagcatctggacgataaacgactgacggtacgtatccctctttgaggaatgaacccgtaccccttgtcagcttcgcgtacgccaaccaaacttataaacacatccttcctctcttacatattttcgcgcttgtccatcttctcatcacacggcgattgacatacaggcatacggtaacctgtttttcctactccaagcggaaccgagacatatcgcctcgctctgtcgattgatttccatggcagaaatcgacattctgttacagacagtgatgttcacactttacggaaaccagtatgagagtcgagaggagcacctcttgctgacgatgtttcaggtgaaagagcttccctctccacattatatcttttgaagatattacgactgacgcgatttgatctgttctcatatttccttgaatcctcccatcagtcggttctctccgcccagtttgaaacatcgacagagtttggctccctccttcgagctaatactccagtgtctaggatgatgacgacttacacccgacgaggacccgggcagagttatttgaaaagtgttctgtccgagagaatcaacagtctgattgaacatagagatttgaatgtagagatcaacccactaaaagtaagtcaaatctgtacgtgtccgttccttgagatatagatacttaattacgtctatgttgcaacttgaaggtgtatgagcaaatgatctcacaaatcgaagaggacaacggttcccttcccgaaggtcttccgcgaggagtctctcaggagattgcggctgccaacccagacgttcaagggatcattcgacctagaacggcgatgttgatcgaaatcgccgattcattcttatcgaccatcatcgacagtctggacatggttccttacgggatcagatggatctgcaaacagattcgaagtcttaccagggtccgtatcacattacagtgtcatcaaccattcgttcgggggcgcgtaaggcaaacatcatactgaaatgagattttgttctttgatacttttcgtcgagaaattttgtagagaaaatacccagatgttatggacttctcaatttgttctctcatcggtggattttttttccttcggttcatcaatccagcaatcgtcacgcctcaagcatacatgctcgtcgatggggtaccagcaaagcacccccgtcgtacattgacactcgtttcgtccctctttctcgcatacctcctctttgcaaccttgatactaacatattttctttctgcttcctttccgttctatcgaattttctcccctccttcgcctaaatcacagattgcaaagatgttgcagaatctcgcaaacaaaccatcgtacgcaaaggaggcctacatgatgaccctcaacccgttcgtcgagtcaaataaggcgcggatcaacaagttcctgaacgagctgtgcgatgttggagacttttatgaaaacctggaggtaaggccgtgtcctcatttctttctctcttatcactttctatctttccttacgagacgcgctgactgggatcggaaaataaattaaacatagatggatcaatatctgacgatgtcaaagaaggaccttcgaatcaacataaccctcaatgaactttacgtcactcaagattacctactcaaacatatcgacaccttggttagtctgtcctacatgctcttcttatatttatctagtaatctggcattgagaatatccttttgttgtattgttgcatatcttctccccttctgtttcggactctaggctccgagcgacaatgcgcatctccggttatgtctggccgagctaggacctgctccgccccaagttcctcgaaaagagaaccgagcggtcgacctggcgctcttttctcgatgggaaactcccgttcaggacatagcaacccaattaatgtctgactcgaatgtcactaagaatgacatcctcttccaagaaactaaatcgatctttgttcaacttattcgatcgatccctcatctggcggaccgaagaccgattaatctggcgagtctggcagataaggcagcgacagcaaaggacggacaacttgttaggaaagggatcaaagtaaaggagatgttaagagagctggaagagctgaaggtgctggacagtaaagacaactaccgaatcatgcaggaggaagtgtcggccgaactcgtccatttaggaaatatgaaggaaaaggtggtggcagagtctgcttcgctcgatgctgtttacaagacgatcggcgaccacaacaagtaagatatttttgtcgtacttaggcaagagtcgataccttatctcactcattttggtccactcattcaaagctaccttcgctcgcaactcgaacagtacaaaagttatcttcaaaacgttcgagcgacgagtgcaaaagacaagggaacaacccctgttggtgtcactgccgtaggtggtaaagataagagggcaccgaaaactcaggcgttagggccttatcgattcacgcatgctcaatttgaaaaggaaggcatcattttggatagcaacgttcccgataaccggtgagcgctttcttttcgtccccttgagcatagactgttgactctcttatgctgatcctttctcttttctctctgtgttgtatcagtcgagcaaacatatactttaacatcgcttcgccatcgccaggcacgttcctcattggacttcactacaaaggtcgagacaaggccatcctggagatggatcttgggctggatgatttattggaaaaggttagtcctccattcaatcttgggattccatccgttcgcccaggtgaatcttatcgatttcatctcgttccgcggaaacagcaacgagaaaacaatcatttcctagacctcgaatacgtccagttggacgtaacgaaagttttggccctcttgaacaagatgtttgtcaagcggagataatcagttcttttttttgtcttgaagcatttcactgcttcacttattctctctctcatatcgtcttgactctcggttactcttaacacttactcaactctcgacgagtctattctccttcttcttgtttctgttacccttaatccataatcctgattatttcgtatatcgttcgatgcctggcaagtcacccggtgtgaccgagcgctcggttggtcggttgtaaaaaaatccttcctcgacttctattttgttctcttgtcgatcgttctcggtctctaggtttctcttcttgtgtgactatgattgtgaatgacgttactctttttaatccgggaaatacaatcgggatcccctttcatgagcgcgttgtctttccaaatcagggaattatacataatgtatcaacgagagaaaggggttatatgctttcttggactctattcctaagtttgagggagaacgcatctttgcactaaagtcaaggagtcccaattatcagatcttgtgaataaccagacgatctttacagatcaaaggaacaagaagaggtaggaaagagaaagagaaggagcaagaataggttggacatacgtgaagatgagtgacttcaccgagaggtgtatggacggcaatgacagagttccctagtcgtttcttgcattgcgggcatctactccggggagtcatccattttttgattaccgtaaccagccccatcagtttgattgcccgagttatttgatgacccactccctttttccttgttcagaagaaaggagaaaggagagaagaaaggagaaaggagagaagaaaggcgaaaaggagaatgaaagacacttacaccctggtatccgagatcctgactcgattatcttgtaacttcatcaacctccaatcgatctgctcctccctacatttcataacttctctcaacaccagcttttcgttcctctgagcgtttgagtctctaagtgttctaaggaagaacgaatgaacgtctttcatcgtcagcatcggaggtaaaatctcgatcacttctaaaggttccagtttagtcgaatgtttagcgatcaaggaaagcgctggtggtatcagaggcttatccgttggggcacgaggaataaggtagatccgaaggaggacaaggaacacgggggatgaggggttggataagtatgttcggacgcagtatctgttttgaaggaggagtaaatatccatcaaatggacctcagcaagtgattatgtaggaaagacttcaagcggaggaaaggacgaactcttcggctttcttgtaatcctccaatcggtgaacgtatatctggagtgcattctcgtgattcccaagtcgacccaagaggacagcccgagcttcaaataattctatagaacgaaaaggaaagaacgaacggtcagatatgattcatcgattttcaacacaaccgggtcggaagggaacgcaaaagatctgcttaccgtcatcaggcagaagacgaaggatgtgtccagcacggtatcgttctgacgtcttaaggaactgcaatgctctctcatacgcaacctcaaatccagcttttcaagaggaaacaggaacaaaataaaatgagcatctcaaaggagcgtaaacctatgaaagtctttccaaagatagaagcgcaatgaaaagaaagagaaatctcacccttccccggctccctcgatgctctcttagcttcatccagatacaattctgccagtcgatcatggaagtcattattgttctcttccaagtgttgagtaatgtattccaggtatgtggtttctgctctaggactgatcttttctaagaactgaagaacgtctcgtcgaggaagttgctccacggtgtcgggatcggacttgaagatctactgtccaaaaaaccaaacgttcattgacaactgaagacacatatcctgaaagagagggtctctaatacggaatgtcgtaccttcatggcatgatcgaaatctttgtcaaaaacccactttgaactttcgaatattaagttcatgtacttcggtcctaatgctaagagatatcggacgataggctcaagcttgtcatctaggtctgcttcctcttcgctcagcctgatcaagagtcgtggtaatcagacgggaaaagaagctatgagttcaggtccaagttgtcttgcgcaaccgatttctaaacacaaataaccaactcttgtagtagatgtaaagccttctcgtgatttttcctagttcggtacaaatcgatcaaatcggaatatttctacacgagaaacgattcaacgattattaaacaaattgtgcgtctcagtaacatgccgacaacaagacttaacagagagaggaaaaaattgacaaaccttcttctccttcaactgttcttcgacctcggtaacttcacaaaagtttgagagcctacacaaactacctaccaagctcggcctgacgaccatataactcttgaacaatgccgtgtctaccagttgagcgacccgatagacctgttcaggcgtaagactcgaaactggggttgaaggaatagtgtagagttcatcttttgacacagctgagagtggaggcagatttgtttcgaggggacttagagtcgaaggcgggatggaggatagtgcgccaagaactttctgtcgacggtcagacaagtaatgaaacaaggcttcgtatgtcgccttgcgtttggcttgaatcggcgaggaatcaggaggaaaagaaaacacctcaacacatcagtttgaatgtcgagagggacaacgggaaacgaagccaactagagagaccaaacgaatgtacctgcatcctccttttccttcctcttgtcttctatcgtcattttcggctcgctatacacgcttccagtcaaactctgggtctctgagtttccgcccccagcaccaggagcaaccatggtagttgacttcagacctcctattcccaacgcccccaacattttctttccagccgattcgaccccaccgacagctcccgccaagacagaaccatgttctatctttacgctctctgcttctgaatcgagataggccaccacaggtgtgacggtctttgggccaccgaacagttcaacccattggtcttcaggtgtggctagtcgaccgctgatgatctctggaaacaaggcaatcacttttgctggattgatatccagtcgaagaaatgtctcaatagccatctgcgctggagaaggggtcgatagaggaagcgagctgttctgacggaacgtttctagcgcacaaagcgtttccaaacggattcgacgagaattctaagcattgaaagcgagcagattgagagagactgatgaattaggaccatcttcttgcgtctcaggagcctacggataattttcttattatctgaagaagcgaaacagaccttgttgtgaagcgaacgttcgtccacgccttccagtatcttcaaactctcttcgtatagtccttcgttcaacatgtcatccaacacgtcccccatcttcttcatcgtcaaacaccagatcttgctaccaccttcggctgccaagaccgccctctccaccggggtgctcaccacgaacaacggcggtttcagcggtgccgtctgtgacgaggccgaggacgagggggtcaaatgatgaagggtgtaatgcgcggtagacggagtggatgaagcgagaggtaagctcaacgtctgggttagcgttaatgtcggagaagaacggatctggatcagagtcgtcgtttgttggggttcggatgaggtagtgttcgaagaggccgaggtaaggagtgatgtcgggggtggtggatttagagacaaaagaaaaggtttcgcgtagactgtatcgaatacaacagatcaaaatccaagagtcagcttaattttctctttcacggaaggaggagattatgtctcccttcgcacctaattcatccggggagatggtccaaaggagatccttgtccctactgatctttccttcttgtccaaagaacgcgcctacgtcctctctacagactaaaacctcgccttcttcgattctaacgagttccggtctagctttattgcctcctagacccatatatccacccattccacccatccctcccagactcaaacttcccagcccgctgaccacgctcttgctatcagctcccgtcggctgtgcagactgtccaactcttgactcatctgtcgaactcagcggaaggtctccaagaataacgcctaatgggtcaagcgcgattagacactgatctgatagtgtgtatgccaatattgccctgttcggcgagacaaaagcgatacttctcggtgagtgaggtaaagcgagcgagagcggtacaggcgtggacgatgtgccgtccgtccaggtgaacgccaaaaggcgtttcttcagtccgattagaagcgtggttatcaacttggggattgattcttctggatcggttgagccggctggggtggatgagggtaaggaaacagaggtatggatggcgaacgtctgtgcttgtcgaacttgaggaaggacggatagtagggcgaacgattgagggtcatacaatgagaccactccatctgttgtcatcacattacatcacatcatgagagatgaatcagcgcgtgccccggttcctcctttctgatagtatatgaactcaaaatcgaggagagacgaagcactaaccggagaggacaacaagactgttgatttctcgaataaacccaagtcgatcgattgcccttctactcagccccttctttgtctctaccaacgttgctttcggttcactctcatcttttgaaattttaaaaaaaaacaagtttcactcagctccctatcaggaagggagaagagtgttgaaaggacgagaggcgtcaagaaggactgaccagtctgttgatcaatttcatacacgctcaagctgcccgacccatgagctacgaacaacttttcccctgaattccccaatgtgacatatcgaccaacgagtccaagatcaatcagctttcgtgattgacgtcaagtatctgtgagagagaaagagtcaagggaggatgaaagagaggagtagatggagacgaaccttgggcaaagacagcgtcgatcttgtctttgaacccttcgattataggaacagccgagaacggaggcatctttcttttctttccctcactattcctagaacactcgtttgcgtgtcgtttgcttttttgggcgatacttcgagaagatgatgcctttgttttctctggtagagactcaatagaagaccaatgaccaaggaaaggactcgagagaggaatgtgatggacggagaaagagatcagaaacttcggacaagtgcgatttcccgtccgacggtgtttacttctcgtccgtccatcctcgttcatccgagagtcgaacgtttttatctggtgaacggtgtgacaagtccatcatctaatctttgtctcataccaaggaaggaggctaagctatcgaggtcgtatcttttgacagaacgaagatgaaaatgtcttgttctcgacacacgcatttggtccgctaataaacccctcatgagaaaggtgacatcagcgtcatcaatccgtgattccaatgagatagatcaagaacaaaaacgaaacaaaagagattgaggtctaacaggaatgtttcggattaatctaagaatattcattctctagtcggggctaaagaacatgtgagattcagactcgagcgagccagtcaggtaaaaaaaaaaggaatgctcagacgacaagttggtcggacgatcaggacgaacgagcacgaagagtgatatatatatatgaagatgctcgaagtagaaggaagagacttcgtcaaacaaggaatatggaccaagagaaaaattgaaagaagtgagatagacgacaagcggtgaatgagacgacacagatcggtaaataaagagagagagaaaagtcagcaaagacggataaaacagcaaggggtagttttgacaagaatggtttgtctggtatacaaagcagattggaaagaggagataaagaagagagagagagacacaacaagcgagatcgagtagtggtttgtagacgagagagagaaggagaaaaaaactacatgcgggaagaacagataaaaagaagaggatgtggtaggtaggcaggcatggtgagccctcttccgaaaagaaaaagaacggacgatgttcatctggatgcaaaacgccatacggggaaacataatcagatcaaggcatacaatcatgaacagatgcaaacacaaagcagaagaacagcatcacttacgaacaagaaaagtaagggaagagaagaacaaaagaacggagtcgatcaagcccgtcctgcagatagcgcgagcggaatttgctccccattcggcgtgctcacatcctcggcctgatcgttctcgcctagtagctgatcccgccactccaagaatgtcgttaacgcttcagcctgttccggtctccagtctgtcaaattgcaattcagatccggacgaatagggtcagatggccatagcagggtggttgtatgcgtatagtatatgtgaagaaaaagtagactgacatgttcttgagatagcctcctcaaccgttacccattctcgttctctcgtatcttccggccaagattccaagagacctgacacctgaagcgggaagaaatgaatcctcgttctggccgttgcgatctcacgctacattttgttcaaagaaagccagcaaagacgatgagcttgagcttagagttgaacatgagagatgacttgaaagagtcactcactatacactcttccgtcatgatgtatcctctcacaccaccctatgaggtgaataaaaattcgaatccccagtcagaccggtcctacgcttaagacaatggaggagcaacgctaaaaagaagtaaagaaccactaacctcttcccaagcttctctcaacgctgccgccggcaaggcctctccttcttctcttccacccttaggcaaagtccacaatcctgcctttttctgatgatccaagaacatggcccatacgaaggagcgagcgagggacagaacaaagggtggataaggagggaaaaaaaagaagggtgggcgttaaggcaaggctcggggcgagcaaaggaaacatagcagagccagaatgaggcaacgaagagaaaggttgggaggtcgtacccgtgaagagatcaagagaatgttcttcgtcttcaaatcatactttgagaaagacagaggagaccagaagagatcgggcagtcagcgaatcaacagaagaagggattctagaaagaaggagagaaaaaaaaagacataaaagacctacagggatcgcacagcacaccatccgcttgttttcctcggtgcctctgactttagctatcccgtggtaagcggctggtgtccacgacccgtcatccgaagctgacgagtaggcagaagagtaggcggacatgatgaacttttaggagaagaaagaagaggacgagtgggataggacgacaaggaaacggaggggtgagaacgtgacgtggttggccgaagtgagcgggcgagcgaaacgggactaatcggttagggatgagaagccggagaggagctgacgtccaaagatggagccaagagagcgatagggaggagaaaagaaggagtgatcgaacgactttgtagatgagaagaaagagagataggaacggagccttcttttaaggttccgggctcgaaaggatgaggaaaagagagatccagacgagcgaaagaggcgatatagagcaaggtgtcgggttttggaaaagctagagaggtcttgaagggaaagtgaaggtaatcgttctgttctggtctgttctttcttctgttttctttcttcttcttctttttcgggtttgattaaaaattcgagacaagcggtcggacgagcatgttggatgtgagtctttgttgttgaggcgaatgggagataacggagaacaggtgtcgtgtgagggcgagaaggagagaacacagagatgggcgagagggaagaaaagagaagggagagaacgtgatggacgcacgtttgttaatttttcattacaaatcttttctagtcttctctagtgtttgttggtgagttctcctatcttctttcgtcattacgcctttttcggccggaactacaatcctttctaatgcatttttgtaatcaagccgccgttcttaaacaaacacaccaaaaaaagtcacaacgatgccgaaatggcaggattacgtaaacacataagttatctgcgcctgatgagtaagtatttgtatataaggacgaatgaatagaataatcccgtacaggggcagagcgataaggtggaacagaataaagaaaaagagagaggagaggagaggaaaggagagatcattgaggaggaagtgcagatgcaaaagggggccgatggacaggatggatgagcgtgttgaacaattagaactacaatagagaagaacaaatgggcaagagaaagagagaggaaccgaaatgaacgtctagagtacagccaactctgtcaatgaccgacgaagaatgatactgtcgtagttttcgcacagataatgcacttagtatcaggtgtgttcaatacgaagagagcgaaagaaccgaagaggacaaactcagtgacggcgaccatgacggctcggagcatgtttgtgtcgaccgcgcaagtgaaactagcacgccaattgaggaaatcttacgtcagtgaacacaacctctctcttctcctctgtcagcaagaaagaaaaagtccactcactggcaatagacgtccttggtggatgaccgatttaatctggaaaactttttctgaaaaaactctcttccctgtatgtaatcattcggtggtccttggtaatcaggaaagtagtccctgatcaagctaggccccctgactttttctcgaaacagatcgtccttattcagaaacagaatgatcgacgtttgaagaaaccattgagagttgcagatagagtcaaacagcatcaacgcttcttgcatttgattctagtaggtgaattagcgcaaattagcattcgttcattccaggccgggcatcaaagcaagaagcaaaactctctcaccgaatccctatcttcaaccagacactggtcatatccagagacagcgactaagaacaagatggcggtcacgttctcgaagcaactatcacgaggagaagaagaaggagacaatgaagatgcaattgagcttcaatacaactttaaagaaaagacgtgatttggctgacgcactgaatccatttctttctctcggaccgttgaccaccgacatcaaacattgagtaattctaaccacgcattcaagttgaaaatataaaatgatcgactgtcagtccaatgagtttctactaaaagaaaaacaaataaaagaaagagaaaaaggcaccaacaagttctccaattttgaacgtcgtttctgcaatccccgtagtctttgctcgactacgaacgacatcttgttcattaggtttgtaatccggaagaaatagcctatcgagttctcgaaagtagtagaccaagctttgggatccaagagattcacgcgcatgcgatcagtcgttgagtcagatcgacgagaactgaaagcgcgaccaagagaacctacttctcaggcaaagatgcctcgttccctcgctcgtaacatctctgaacttctgaatcgttccacaagctgacgagcggctctttgtattccagagggaatgcttgacctgtttctaaatctggagcagaatcgatgatcgccacattgcgctgtaaaggacggaggcgagaatgggaatcaagattgttcagtcatttcgctctttaatcttctctccctgtctcctcctttgcctggtacggagacttacccgattcacatccaacactctcatctcccaaaggtccattgcgtcaataatttgacgcattccatgaacgatattcgaaaagatcaactgtctataatctacaagatacaagcaactcatcagtcctctctccgaaaccaggttaggctttgtgaaagtggaaaaaagggacgaacgttcggtctcgctagacgtgaaagggacgttatgaatcaacctcatttgctaccgtagacgaccatgaaacgcgggcgtcgaaaatctatcagtctctcttctctttctgtttcattatccttccgtgcgtgggtaaaaacaatcaaggaaacctatgaccaaccttcagaactgtactctttccactctcacccgctcccaggagcagtaatttgacttgggtctgcagctttcgctcgtcctatgaacatgaagattgatcaaacatcggtcaggtcaaatctctcatcctatttctcctgttcatgagttcgaaggaacaagagggtaaggaaaagggcgaacctccttgagcgctcgttcgacttctcgactccgttgagcctccggagaatccgccgtactcgaaacgcaacttcccatctttcactctacacgtatttaagcttatagagtgtctctcttctctcttcttcgcttcagttgcgtgatagagatcggacacgatcgaagaaacaagacgaaacaagggttgtacttgttagcaatctgttcttcgaataagaaacaaggacgtgctggatgcttgatgttacgcgctagatgcgagagaggaaatacagggagagccaaagtcgacccccggagaaggcttggtctccgtgtcttgcacttctcgacgtgtaaactttcagcccttccgacgagaacaaagtcttcccgcctcttttaacgcgtctgattccgggatagaacggttcgatgtgaaagcctgatgtgcattctcttccccaaacaccaatggacaacaatctctgagccgatcggcggccggacatcgatcacataagggaccgtcgacttgactttactcggctgtacgatcacccgtcatgtctggaatgtaaagaccatccaaccgatcgctcaagttctgcgatggcctgaggaaacgaccatcagtcgtaccagaaccgacagggacgaagtgtctttcgtttgaacgattcgaagctggcgcgtcacagaaccatatccgttctatccgaatcacgggaggaacactcacgatttatatcaggcagttgcgaagggtgtccactcgatcagaaagatatgaaagcgaggccagatatgattacgtctatccgactcgatcgttggttgatggatgtcgagagagaagaaaaacggtctaccgttgatagttttcttgtcaaactggcaagatattttatcaaatgtgtattaaatctgaccgagatgccgacggaagagatatgaaaagaacaagagagatgttcgtgtaagttatcttcaaaacgagtcgagttcctttcatctattctagtttgggctgatttatcctgtacacacttacaccacctcatctcaatagacatacatcttacagacatttgagtctctaccggatgagtcaaacactgctgttctctctccgtcgatgccgatatctctcgaattcccttttgtctaattccgctcccatccgagataacaaaaggatgggaagcaacaacagacgacgatcagtataaatgaagatccgcagtctccatttgtctttgccgaagttaatttcctttccttcttccactgtgtactcattcgattgcagacacaggaaaatgtattccgaacagcagcataggttgcatctctatcaggcatccctcgctatggttactgacatcaacattgtcataagaaccagaatcgtcatcgttcattcgttccaagcaatcaaggccatgctgtggagatgaaagtgcgcgtgattttcaaaccaacaataagcttcatcagcggatgatcatttattcgaagagacagaacaaaacctaccatgagattccgaaagccattgcagccgcttccttcaataactgtcgcccgcttgagcttgcctccaaaagctccgggacgaccgagacactcgcaatgtatactgtcagatagaacacagtcgttagccagtggccgggcatgattatcagcttgataagagaaacaaagacatacagaatgaaccggcaacacatggaataactaggtcagcccctgtcaccgtggtctgcaagatcccagaagcctctacaggtaagcgcggattatgtcagccacacaagaacagtcgcaggaagtttacaatatcagttttctaaacaagggatctttgggcatataaggccaatgtttgaaaaattcaatacgcactgtgcaaaaccgaagcgaccaggtcaggtgaagaaacaacttcctccgctcccgcggccgccatcttttgaataaagattccaagcaaggtgcctacgaatgcaccaatggcggtgatgaattgactgagcatagctttcttcttggagaatctgtttttatttatttatatgtttgaatggaaacattatgttcgagaacgtcaacaaagttttcttcgcccttcttacatttcgtctccagcaagacagacgaatttatcaagcttacccgctcttgacgagaatagagaaatcagcaatctcatgtgggatctcgtgggcaaagcatgccaatgtagtggtcgcgccgattgtaggagacgcgaagaatgcagcgctcattgccaacccatcggtgatgctgatcgacaagagaacattcgattggtcaaacacatcatgtgatcgatgaatcgctaaagagagaagagtccttacttgtgagtgaaatcagcaaacaagttcaagtaagcacccagctgcagactagctccgacctccttagtggtagtaggttgaacctccgccttctcttccacagcggtagatgatcctcgctttttaagcgtcgaagcagtatctttatcagtcccggcgagagccgaggaagacccggttgagtgggagtgattatgggaatgagaatgaccagaggagtctgaatcaccgtttcgggaggaaaggtatcgcatcgtctgtattgcagaaaagaagatgtaggctttaggttcacccaaactcatcagacaacgaagatggtggacaagcttactttatcgagcaagaagaagagagcgaacccggagaagattgcagtcccgaccacgatgtttcgcctcggctcaacaaggacgacgctcactccagcctcaggcgagggctcacccatgaaggagtgtgggctggcggagaagatagtacacatccgtggtgagtttcgagtaggcgcactaattttatcagtggccggaagacgtacatcaagttcaagaaaacgtctccaaggagtcctccggtagcgaactaaggtagagaacagtcagcccacatgaattatccagagactaaaacaatatgaacctaccgagatcatggtgttcaaagaagacaactcgatatcggcagggatgaatcccaggatcaaattggggaaagacgagatgtagaatgtagctaggagagagttgtaagcgggactgtcgaatgggaataacaaagcaaacagccgcttcatcaacgggctctctccatcagcagactcaaaagtatccttgatgctgctcagccgctgaaccgtcgagcaggcttcaatgtctttgatctgccatgaccgaaggtttatcccaggagatgaaccagcaagagaacgtttcagccaacacactcgagatggcctggcagagtgaggaaaaaaaaaagcaaacctactctgataggagcatgagagtcggatgtcttgaaaagtgccaaggctggcagagcgagcgcgagaacgagaatgccgataaagatgagtctagtacccggcatgttgagcaagatggatggtaaagatggagagatgagattggcagggctgagagttgaaaaaggaaaaacactggtaaattctaataaatcaaaagactacaaaacatctagagttgcgtattagagagtacagccaagatttctaatcaatccggatgcgcccttttccctcgttcatccatcctcgtcctctccctactcacgtcagtcgtgtcctctggtctctcaccctctgataaagacctattcaggattggttcacgcgatggaagtttcaaaacctacttcgtccactttgtccgatggctctgctcagactttagcccgagacgatgagaggcgcaagctgggtgaactcgttattgttgtcctcagagctgtacgtccatctagagcccatctctggttcactgtaccttgtggctgatgtctttcgtttctctctctctttcattgtttgatagcgacatcttacaaacgtcaaactttccaagcaagatccgtattgtacgttgacagtatcatctgagaaacggcggacctcagtcatcaagaaaggtggtcagcatccagcatgggatgagcagctcaagttcgagatctttgaggacactgaagatattctcgtccagtcaaagtcggataccgagtctggaacagaaggtgccaaagtccctcccggaaaacgcaagagaaaagtatttgagaagggaagcaagatcgtcaaactatgttgttatgcagatgctcctagggagccagaattgattggtgaggccgagtttgatcttgccaaggtgttaaactcgggggaagacgaaggtacgtcgtcacagccatcagaagtgtgtattatccctcaaactaatgcggacatcaacttgcaaacctccgtcttgaagaatggataactatcaatcggaaagaccgatatgctggagagatcttcctcgagtttacgtattttatttcagtaaggcctgccactctgttgtatctcttctaaatcaatctgttaccttgcctgactgtcgtgttttctttaacgaaactttaaacagggaacccctcctccacccaaaccacctaagcttccaaatactggctacggaagtcttaaccggccagatgcgcacggtcagccagcctaccttcgacatgcaagctctgccactaacctccacgggatgtcgaacgggacgccgctcggacctgatgaagatagccgcagaagagcaggcagcttcatggtgagtcttgctaatacagtcctctggatgtcttatcttcttgtctcattgcaacagcttgttgatcatttcgtttctctgttgatatgacggctacgtttcagtccaacacctctgccatgccgccagcccaggctccgctcaatccacaatttcagcattcggcatccatgcattccttctctcaactccctcctcgtgcaaattccctagacatgatcgccaggcctgcttcaatgatgtctctagcatcagtcgcctcggctacttccaccatcggatccagacctttgccgagcacgatggacgcacatcaatctagagtcgatcgtctacctcccggatttgtacctgacacatctacctggaatcaacctcctcaacagcagacacctcattatggtcaacccatacctgtttctcagtccttgggatatctttccactcttcagccacaaacgttgcttacgccaggacttccctcgcatgccaactcaattccttatcaccataattcttcccttcctccgtcatcttcgactacaatgctaccttcatcttcttacacgcaattccctcaacctcaggagtacgctccctacgctccaccaactcctctgcctaccgctcctcctcaagattacggcgcgccttcctatgcatcatatcagtccagccaactcagccaaccgcccccattgcctcatctctcctattcagatcctcaacgataccttgcccatcctccaccaccgccaccctcgcttccagtgtctcaaacaccgatacctcaagctacactgacaaattcgtatcactcctcgtcggacatgtcgacggtatcggggacagacgggttgagctttgcctctagcttggtgccccatagaagatcggatgggccagacacaggtcggccgctacctgagcctacttatcagaggcgactctccataggtagctatcagagcccaccaacttcgagcccgatgatgggaggacacgggtattcatctgtggcaccgccttctatggggacggggcaatatggatatgcaccatcacagattgggtatcaggaccctctttctcagcaatatcagcacaactctcaccatagt

SEQ ID NO: 373 - DNA, 21082 bp, Xanthophyllomyces dendrorhous
tactatcagtctccgtatccaccatccgcgccgacccccgctcccgcttctgctcctatacatttgcctccacctccaccacctccacccccgagttcatcaacagatatttataggcacgcttctcctatatctcctagttacaacgtatcaagtcagtatcagcatccttcgacgggaagttacacttcttctcaaccgtcgggatatcttaaccagcctacgccatcgcaagaaatctattcccactcaacttcgccaaacctgaaccagacctacaacggagcgcctcctccgcctccgcctccgccacgacaaacgccatcacctgcaaatctgcagacgacgtggttatatggcgccggacaagtacagcagccgacaagttatgcggcttcttcgacaggagcgtctgctccgggaggttactctggtagttggcagtcacagcagccacctcattggacttgagcaaatgtctttggaccagcctctatgtgctttatagatttcttttttcccactacgtttcaaatactttttctttctcctcgaccctacactccaattttttgtgaatgtaactcatataaaataaacatctgcaccatctactgcttgaatcaagttgtgcttctattgcacttaagcttctataacagatgaatattgagattgtactacaatcctgaattggaccgccgttcattttactagatgtaaccacatacgggtaaccactcaccgtgaccgttcttcttgccgctgagcgcgactaggcctcacgttttctcgtcattcatccctctctctcctccactctaccatctacgtccttaagcccaagatggattcaatagatgtaccgatagaggatccaaaatccagaacgattgaagtcaatatgggagggtacgactttatttcgtttcatttttgggcctccatcgcacgactgtggggaagtcaatcgggctaactgtttcctttcgccttcttttatgttatccctctggtcatctactttcctttgggtattcgtgaacaggggcgagctcgtcgagtttgaactctcccagctagcagaaggagaagatggagtggagccgatcttggatatctttgaatcagcaaacgcaaaagttgagctctggttgatctgtatcctcgagttcatccgaatcggaaacgaagttcaggcagagaggatggccgaattgggcttgaagagtcagtcgtatttcgtatatatctctgcacatcgaacgattagaaagcagcaagatgtctgctcgtgtacaacagcagaggattgacttgattcttattgccatatctttgctcacacccgcctcgatttcatctcttccagctaagagagccagtaatgaattggctgctcaagttcctcttctgcttgtgctggccaatatgaagcttgccaaggcgaagaaagctcccaaacttatccttcctaacgctggtgagtaatggtcacatttatttggtccatatacattccagtcgcgtcgctaggaagagtataccttcgctgacgcgtcggtcaaatcactactacagacggcgacatcttgcctccttcgacattaaccaaaggagctctgtatgagcaagcttcggagaagatcaacgaagctcagcgaattcaaatgcaactaggcgagaactttgacatggtcggattcttgagtgtcggttagtctgggttttcttgccttctcccttactcggtgaactgggcccaaaagtacatactgacctgtcgcacggtcgtcatattcaaggtatcatgcaacttgccagaggcgaggcagacggagcgttgaaacactttgactctatctcgcagagggaacccaacaacgtatttgctcttctcggaaaggtagcgttgcctttttttgtttttcatgcataatcgagagttctttgcctgcataaagctgatatgtgtagtgttacatgcttcatctacaattcatctataggcacgagttgcttatacccaacgtgatcctcaacaagccttggtcctgttccagaaggtcttatcgctcaacccagattgtaagccggatcccagaatcggtatcggactttgctattgggtgttgaactcgagggagaaagccaaagctgcttggactcgaagcttagagctcgtacgttcaaacttttccgcggttgtcttgtacaagaatacgtgttaaccaaatcacttcttaatacatgcatctgcaggatcccaacagctgggctgctgagttactccttgggttagagagactcaacgtggtgaagaacgtacacacgcgtcgggaagatcgagatcagcctttgatagaaggacttcggtcggtggctgctgctttcagagcaagcgatcaaactagtgcagctgctgccatcgcctcaagtacgatgcattctctggaaagtggagcatactcaagggtaaatctttctcgacatacatacatgtatatatcagacaaacgttattcctaactctacttttcttgatgtgtgtttgtgttgttccttgacaggctgtcaagctcgcggagagagcgatgcagtttgctgacactcgagctcactacattggaggattgaccactctggctaggattcatcatatgcagggcaatattcctgaagctcaaggaatgtttgaacaggccgcatcggaatccagaaattcaagtctactagcagatatcggggcaggtcagatgcagatcgccagtggtatgttgacttttgctttttgagaaacaccaaatccatcgtttacatagagtcacttctgatctgtcctgtcttgatatctataggcgatctgcttcaagccaaacatactttcggtggaatcatcaaacggtggcctcatgagcctgaagttcaggctatctacgcttcccttcttgcccatccgcacgccggtcttagtgctgaggaagaaaaggctgagcgcgctcaagcgcgagttgcatttgatcggattcaacatactatcgataatacgtcagccgattcaattagagatatcagcgacgatccagacctgtttgtggagatggccaaaacgtggcacggcaattcaatcgaaaaggcagcaaaggcttatcgatcggcggctgaagttcggcttaaaaacgaacaacctaaatcgcctcagttgttgaacaacttggcgtcgcttgcttatcttgatggagatctccaaacagctgagacgatctatcaggaggccttgaccagctcggtcggaatggaaggaagcgacgtgaacgacatgaagaccactatactttataacttaggaagggcatatgagggacaaggcaagttggacgaggccaaagaggcttacagacaaattttggcgattcatccagagtatcctgatggtttgtttatcgtttcttatgatgattctttttgttctgcaagctaatattgtcgtctttactttaattttcgattggcttggatactctcagccaaggtacgactagcagctatgtgcattgcggtctctcagttcgatgaagccaatacctaccttaaggaagccctcacggctcatcctaccaaccttgagctccgtgcattttatctgtactttctcgttcagaccacgtcaaccggctcttcttcagctgcttctaaagccgctcttgactttgcctacactacgctcaaagaacaccggtccgatgtgtactccctctgtgctgctggttggcttgtttatcgaacggccagagagacgaaaccttcgcctcgagatgcgcagaacgagcaggcgatgaagacgttccgtcgagaacagtctaagaacttccttcgatcagcagaattctttgacaaggcgctgtcggtcgacccagagtgttcgtttgctgcacagagtttggctattgctatcgctgagaatgcgctcgcaccagcagggtcatcgaacgaggacggtcgaaccagggtggcaaatgctcggcaggccttgtctgttttccacagagtcagggagactcttactgatggaagcgtttacatcaatatgggacattgctattttgcaaatgatgagtttgaacgagccatcgagagtgtgcgtatttccctttgcttgccagaatcttaagatgcgttatcgtatcctaacgtttgtgaaattacttctgcattcagtatgagactggccttcagagattctataacggagttcactcgccgattcttctatatttagctcgaacatggtacgcaaaagctaaccgagaaggaaacttctcggctatgcagatcgcgttgcggtaccttcaaaaagtgggtaatatttcttgcatcattcatatagctcatcttgggatcatggtggcttggcgattaatcttatgctcttcttgtttttaggctgtacacattcaaccgcacgacaaagctattctgttcaacgtggctatgattgaacaaaaggcagcagaaatgctcattgcgcttccaaccgatcaacgtacacttgccgagcttcaggatggtctcaaacaagccgtacacgcccaaaagtaagcatccatagtgtatcttgttcttcttttcttctctcgactgacttagtttttgttgtcttcgcttcgttctatgaaaactaggatcttccttgccctcgcctctgataagtcaaagaatttaccttacaacccagagatggcggatcaacgatacagatacggatccagtatcatcagacgtggaccggccgaggttgagaaacagacggcttacgagcaggacgctcaggcgaccgtcgccgctgctatgcaacgtcgcgaggaagagaagcaaaagttggaagctaaagaggtccgtttagtcttttcatacatttcagaatatctaacgaggttgttgacattgttttcgtcattgtgctatttcttgaaccttcatatttcacagaaagaacgggctgaagaaattcgtcgacaggccgaagcactcgctgaagaacgacgattggctcgtgaacaggtcgcctcgtgggtcttcgttcaacccgattatgaaccagaacgggagaaaaaagttgccaagaagcgaaagaagaaggccttcctcaatggttctgatgacgaaggcggtcagggtatgtctagtggtgaagaaagggaagaacaccaaccaagggtcaagaagagtaaaaaatcaaagaaacagaagaagtttgttgacccggatgagatgccagatgatgcagaggcccattctaatgacgaagacgatgaggagagcagaccgaaaaaggtaagttttcgacttctcttttcttatccttgaaacgtctgaggataccctgctgaagttttgacatcttatccaacttcttgaatcgttttagtcaaaaccaagaaagaaagttgtggctgcagcgatgtcagacgacgaggatgcgttgaagttgaaaaacaaaaaaggaaaacgagtgtaagtcattgtcgatgttgagaaatcacacacgtgtcaacttctcaatctgatcatttgcttcgtctttcttccactcgtattgtgtagcatctcaaaggagacaatatcagactcagatgaggattaggacaagtcgagattaacgaagataaccgagcagccgaaggatccgttgtaccaccttttgttattcatgatctcttatatcacactgtccactcattgagaaagaaggacgtgatagagaagagtggacatgcggaagaggaagaacgtcttatgtttttggtggaacataagtagagagaagacaagtattggaaataacagatcgatcagaactagaaacacggggtaagcaaaacgacgcaaggatgcgaaggaacactaaaactagcaaattgtgtatatcggtaagaggattcaagattttagagaagaaggaaggtgattgactacaagacccacccgagattcaactcaggcctatcgtgtcgttttctcctcttggaagatggcatgctttcaaccctgatttgccaacccagccatcgtttgcaggaattctctgggagacaagatttccgtacttccatacgtaattttctttcctccaccagcagctccaccctgtccgctggcactcgcacttgcactcgctctctcagcccactctgtcaagttggtgtattcgacgtatcctccacctcctacgacgaacacgaccgcttcggagaacacgtgcctgttctttcccccacctccaccggcaccgcctccggcggaacgaccaagacctgcagaaggtcgagccgatcgaggatcaaacagaaggtaatcatcggtgtcttggagggcttgagtggatgcggtagcaggctccatcaacgcttccaccagcctggtcacagtcaaattcttctgagccggcaagaagttcttgacaccagagataatggattcaaagccacccgcgagaggaaggccgttttctttcagtcgatctgatattcgactacctagaacaccgaatcctcggaagagttcacctccactactcgttacaggggcagcaggagcagtggcgagcatggtcatcctcgtgatctctcgaacccgctttacgtactcgagcgcactcatatccgctccactcgtcttgagtgccaaagcaagctcagccatgtcgtccttggaaatcgcgttgtccggcatggataagaaatagatgatcactagtcgaagcttgtcctcatccgtgcacgacatctcgtctcggtctctcaaaatatccaaaatacccgtcttggtctggacgcaaagtaaagaggtccgtaatacatcatgagtatgccgagcaagatgagagataatgcgagaaggaaagggatgataggaagctaacctgtttggtgatagcctcctcggtctggaatagtgtgtcgagtcctctagacttgatggcctgcaaaagtgcggtggcaatgttcatatgggtatcaagtgtatgctttcgggcagtcaattcaggaagtaacgtgatggccgtcttaagattggccgcgttggaagtgaaatctcttttgaagaccggagcagtgaggggaaaagatttatggcgggaaatcagcttaggagaggaaggtctagatcaaaaagacagaagagaatcatacatttggctgacatcgttgacatcgctcattcctgttgaccgggtaatctctgcggcgtctgtcttgtacctgagaacagtaaagaagcaaccaaataaatatcatggttgagccagccagagatgaacatagtgaatatcttacctattgagctctgcgtcaatgtcttccgctacttgcgggaagggattcgccgcattctttgcccaaaagaaatccttggaatcaaaatcgtaggactttttcagaagcttaccggcctctggtgcctaaacaaccaagggaggaataggatggatgagtaaatcgaatattcaaagagaaagaggagaagcctcacctcaacggacacccgattgagcttcatatccaatacatcatgtacaagcgcctggtaagtccacgagtgagagagcatgggcacaagatcgacattcctatctaggatgacgagcactataacgcgaaagcatcgagaggatgagccatggtgtggagcatgggcaacaagaaagaagtttaatacttacaaggtctttgcaaaccacctagaccatctccactgaaaagaccaccgttggccgcacctgtcctggccgagctgacgagatgatctctcatcaaagcgtccaaccttcgggccaccatctctgctgcgttacctctagggcatctgatgagagggatggaccccattgtggccaacacactaaacaaccctttggcgactcgttcaacttcaccctcaatctcagcttcgccagatttggggtcattcaacagcgcataggttggtctcgggtcggccgctgagttggatgaacctgctggtgcagaggccgcagcacctgggggaagcgtcgacgaaggaggaagtctaggaagaagagaaaacaagtttggggatggaacgataaagtctaggtattgatcatacacctgcgcaatggattctcccgaaccatccttggctacgagaccggctagttcctctagcagcggccttggaagggacgatgtgaagttgagatggatggctgagtagaggttttgggaaaggtcctgagcgacccgacggatattggcgatggtcggagagatgaaatagatcgcaggaacatcgggaagaggtggcctgttggaatttaattgccttttggaaggaaagagagagggaggagaacagagaacagagaacagaagacagaaaagacatgtgttgatcaacatgttagtttgcttatcatcataacacgatcatctttctgttatatcgtgaccgctgtgaaactgacaaagaaggctagggaaacagaacatacatatgaagtgtcacaccctgctccctaagatcctgaactcggagtgtggtagcgagaacatctttggagacttcatctagtacgagtaccttccatacaggagcattcgtcacgatcggttgggccgccgggtttgaggctcggccgttctgaccggctgtggaaggtgcgttgaggttaagcaaattgaggagggcacctgtctgtgatgtgagcagactggatgacgactgggaggccatgatgagctgttctggatgcctcgacgatgtatcgggacggaaacccagacgaaggtgaagatggtggatgagatggaacgagcaaaaaaagaaacaaaatagaaacaatttctttttttttgtttctcttgcgttcttgcgttcgaccgtcgaccatcaccatccaaaactcttttttcaattagatacaaccagtaggtctcgttgtcttcagggttaatgcgtgaataagtgaccatttaatctaaattgtccgctcttgccagtgcccaagatcaagacctctagaacgaaacctcctccggaaggatacgaggaaattgctccgattctcgaagactatgctcggaagatgagagacgcagagaacgagcctcacgagggaaagcgacgggtagaaagcacctggggaatcgtatgtatctcttttcctcaatcgctttgtcttagttcgttcctatcgcgtggcattgtagcacgacaagtcgaacgaagtggatatacaatgctgtcggttgagctcatccagctcacagaacacaaccgatgagctcttgcttacacaatttgcctcttccgatctgacgatgaaatctcttttctttgaatggaaatgaaactctcaaatagatgaggatagctcacacccgatcgaaatatatctacgacctctacgtgagtatcatctttctcctctcttcttggctctttcaacgcgtccgcacagtagcaggccgtaagactgaccgattcacctaccggtaacttgtctcctcacttttctgctcaatctgacagtactcgcgtgaagctatcagcaaagagctttacgattggcttctgaaggagaaatatgcggacgcgaagtgagtaatttatccttgtacaacctgatgaacgttttaccagttggtctaaacgcggccactcttctatttacagcttgatagcaaagtggaagaagcagggatatgagaagttgtgctgtgtccgatgcattcagaccaaggtatgtttgagtcttcatttactctctcagatgaatgactgtaagactaactgttgtctggctttcatttctgggtacggtctaaaacaggacatgaactatcaaggtagtacatgtatttgtcgagtaccggttcgtttccttgtactttctttttgggtttctacctcattctgaacttttcttgatatccctctttatcaacgcgtgaaattctgattgttgttcaatagaaagctagtctgaaaccaggccaggtgatagaatgccctcattgtggttcgtcctctttcctcctctgtaccgtttcttcattgtagatattcaatcttctgtctctgtccaacctggatctttttcctgtgacacaaatgaaacaggatgcagaggatgcagtagtgattcgtgaagaccccatctgttcttcctaatgaaaaccttgaacctcctgaatcataccaacccaactctcggacttgacatcgactcgtctcagacctaccggactttctagactggacattcttcccgtcctcgtttacatcctattctctgtcccttgtctctttcccatcctctctctcttctctgtctcactcaaataaagtaaaagttataaccgtatatcatgtttatgtcgcattgagatatctttaacagccaatcaacttcaaaagaagacgtgtgtacttcttgagggatacaagacctagcagctgatcattacagattctgatggtgaaagaacagaacagaaggagagttagagcaagatagaaaaagtaggagaaccaaaggggaaccaaagagggttagaaacaggagcaaggaaataaaagtgggagacattgttcagagtgttatataatttatttttgatgtgttttcaagaaacatacggaggaacagatatgaacgcgacactatatccaaagagaaacaacaacgcaagacaaaaaaagaagggaagacgaggagaccgcccaggacagtgaagttgggcctgggagtgaacatcatgccaatgaggagcatgattagcaacctattggttgagacgaaccacagaagataaagctcctcgttcagttgggtaacctgctcatatccgccttcccactctccaaccattcaggtttgcagagcttttctctcatctcgtagagtaccttgtatctccctctgattgttccttctgtcgtgtcgaccaccgtgcagacttcttttgttgtcttgggacaaccccacagatgagtcgtaaagtagagcagactaccgacaacggtgagcggtgaacgaccgtcgatcaggccgagggcctttccagcgatgagaacatccatgcaagctccttggaaacctgggtaggtcgaaagaccaagattcgaaatgaatcgaggaagcatttgggaaatcactctggtctctgattcgttcgctgctgcatccagaaccgcctgtgacaacgggtcgcccgtcgctgctgccaacgcggcggacgagatcggaggaggcgcagaagatatagaagatgaattcgatagagaactcgaattgatgccgttgttgttggaagagacattggaaacagacgtggtcgacgtcggggtcgaaggaagcggagtcgatggatcgttgatcgggatcgaaccgtttccagaggctttgacctcgaacgctcgttccaatgctttatagcactggcctaataactttttgggcacctctgtcaacgtacagatctctttgaatgttctaggactgtttcccattcgacaggcgatgaatatgcacgccgccaccaccgcctcttgaggtttccctttcagaacgccctcttcgctcgctcgtttgaagagctgcttggcagtatcggtgatgttcttaccgagagaaatcttttcgcacaaatgaccgatgtcagaaaatgcggaggatatcgtcttttcagacttggaagacgacttgaacgccgctctttgaagttctcgagagagtccagaattgttatccctgaaggaaatggaggtctcgaacgtctctggaccatccaacgggttggatgcggaaccgactcgggaaggatcgtccccttcatcgtttgcgaacgtcttttgtttttttgttgttgttgttattacaaaatcaaggcaaacccagaaatcagcacatgtgaaagtacgtgtatgtgcatgtctgacacaacagggaaaactcactctccattcactcctggtgtcgacaatcttgtcacccagcaccaagccacaacctccacagactaaatcacccgagccaaattcttcgataatctctggtctatccggttcgcattccggacatatcaatctgacggatagatccgggccgatgatctgacgaaagaggaaatcgccacaagaaaccgtcagatgagatgtctgctcgaatgcacacccaaaagacagaataagctaacctgcggaacggcagccttgggtccggcctgcagatgctttgctcgagggaacggttgatagccagacatcaaataagaagaatgaaggagatcgtgtcttttttgtttgcttttgacttgtttccgggtgtcttgtctatacttttggtttctttaagggtcctatcgaaggacggcttcttttcttcttctggcacagtacgagcggaaactttgttttggtttgtataatgaattcacagtcgtgttagtcaatcgtggagggatacttcatttttgtcgccacccggaaatgataaagagaaaagaggtctgcgagcagggaagaaagaaggaaagagctatccagcacacgaagacatcccataactggctagcatcacaaccgtctgtgtcttttcaagcattcgcacacaggtttaccgagagaaaaacaacgaaaaaagaagaaaactctcgacacctcaagaaagactggaaagagaagaagagaaagaacccaccctttctagttcagacggtgtgaatgcccagacagctaaaaaggtgggttgtgtcgattctctcgccggattgatttatccaaccgggatgaaataagaacaggaatggctccaataacactctttgtctctcctggcggtccgggaatgaagcagattcaaacaagagttccaaagtttgtcttctatcgaaaacagacgatggtcggtggtcaagaagaataatcatcgtgatgcttgtatgtgcgggtgatatgtcccggggcacgcgtgtgggttacgcgcttacaaagcttcccctagacaactagtacttatggcgtcacaacgttggacggtcaagaaaacggcgtacagagtaaattaaggccgatgtacgttgctcgatcagagtaatagatgaagaagaagtgatgagagcttggattgggaaagaaaagatgaaatattgaatcaggatggagcaaaagacctgacggatcgctctctcaggtttcgtccatgcgagtgcattcaaaaaatggacgagcctctcgcgatatagatgaagagaacgagagagaaatacccagcgcggaaagagaaagacatacatcaagaagagacgtccgatcagctatgggaatagaatgaccggagaaggatgggatacccgcttgatcttcttcccacctctccgacacaaattgagcctgcctcattttcgccattgccctcactgctcaatcaattgcttaacgacacatggactgctttggctatgagcagaggagtgaacgcagtcgacagtttgtattcattcaagggcgagagagatctatggtgaagtattgcattccggtctgtacaatgaagcgttcatagcaagcaatccttctctcattcgatatacaagagcaacgtaagacccagcttcccactctgggatgatccgaagaaaggagacaaaagcccacagaggccatcaaacgcaagtcaccgccgacagaccctagacaacagctgtttaaagccggatttttttcgaactctcttagatagttcacttcactctcctttcatccctcagatcagttctctatcttgatttcattgtaagtcaacgtcctttgctagcgagaaaagagggaaagaaatttcaagtgaagaatatagctggcaccagaccgacgctcgggtgtttacgcccccgagcatctgaggataccatttttgcagagccttcatacgcgacgtgctcctgatataatttctttccctctatcatttattggttgtcgaacattttttcttaccaaaaagataactgatcattggttgttttcgttcgtgacctttcagttgtgttcatgtgatatgcgaatgtttaatactgtctgatgaataaggagagcgtgttgcaacaagcattttgaaagaagggaacatgagcaaaatactaagatctctaatagtttgaagtatccattaacaagcaaatgaagcgcttcaacccatcggctgagttgtacacagtcttgagcgctcaaaaatcgtcacattgggtttatggttagacaaacggtcaagaaaatgaatcaccgcacactccggccgactaggcgtgttacgtgaagttcttgaatcttcagaatcgcacagaaccatgcaatcgagacacgtaacaaatgacagattatgacttatgaactgttcatctcaaataaaatagcaaaggagaagagtaaagaaaagaaaaggaagaactagctctaaatgaacgtttctacagaaacagggtcccacccgctgaatgcctttctactctctcccacctgttcatctgttcccaacaacccatcgcccatcgcccatttcgctttgacgagcgacaggaagtcccctttggccttgaatctggagagagaatcgtcgactgatactcgaacgactcgaagcttggggccagcggatgactgtttcttttcaatgtaaggtatgagtttgatgagtgatgtacgggagccgctcagtcggaaagtctggccagcaaggtctgagatgggaatggctttgattaagtaatacagaaaagatcaacgtgggaagaacggtcagtatcattccgtgcgtcaaatcaggacgagcaaaagtgagtacaggcagatgtagtagtggaatacgcactggtgagagcatgagtgacgaaagaagcgacatcgcctatggatgtaaaatcaatcaacgggtcatccgagccgacaatctcgacctgcccagtattcactctatcattcaccagaaacaatcgccacatcagtcatttagtattgagcacagaaacggaaagagagatgacaagaaagtcgcaaggcttacttcaggaaaagggaaatccaatcggcgaacaggccactaaaaaacttgacgtaaggcaggccgatattatcgaggtagagctggacttctcttttcttatacattggtgaatcctgggtaagtttggtcgagtccatcccaaactcgctaaaagtgggtaaagaacgagcgcgaatggagagttcatgaaaacgagaagagcgacaaggtcagtcttgtctgtaaccgacgccataaacacgacttgaaacaagatacaacaaaagataacaagagatgatctcttcctcgaacgaaggctcttaaggactcaccttggaacgaagagcttgacgccagcagctttgcctgcatcagccagcacggtttgtaatccgaggcctccccctgcaagagcagagacaacgatatcaacaccttgaagtgcgctctcaactgacaacggatccgagtagtcgacgagagcgatctgagcacctttggttctgagctcggtcactcgtgggaggcttgcctttcgtttcgagaagaacgaatgaatccccaagatatatagtcagcgactcggcaccacgacacttcatgtaagtgggaagatgaagagttcagacgaagaatgtacttactgacgatgctcggacgagaacaatcaccttgactttcgtctcgagaagtcggttgacgatggccgagccaacagatgctttggtcccattgttatcggtcgctccaccaaccgcaccagctacggcgatagtcttgacagggtctgattcaaaaagcatggtgctgaggcgaagggtatatgcttgttttggaatattgatgtttgttgagttagctggttgagtctgaggaaaagatcatgagtagtcgatacacaaaatcagtgttttatatcttttgaagagccgggcacggacatcattcgaacgataaggttaggtccaagaggaaaggccggtgacttgtccttgattctcgtgagccgaaaaggtctgccaaatgagatgatctcatatccccatgagtaagcctgaaagaacgtgcaactcggagatacttagattgaaagagagcaagccggcatgctgatgaccgaggagatgcaaacgatgctttgtcagatgtttgcttattcatcttaatatcagtcctctcatctcctcggtcatcattcctctcgttcactgacagaacagcgatgtcttatgttggaccgtgtcatcaaatgtatcttcctatgaaatatgtgcatgttttcacaagtagtagagatgttagcaggcctgatggtcaagtcgtgatcgacgagggagttgttgagagtgacaaagtgggagtctgagatattatgaggtcagctatctattggaactccatctctagtcagcctttacatcagtttcatcagtcgtatttacactcaacttcacatacactcgcacactacataccaatggtctgctcatctttatccttgctatctggccatcccatatatgcatgtctaaacatctacttactctctggtttgtctttatcagaaccaacacttgtcgtttccgttcaaaacgaccgttccactcgctggtccgctggcaaactccttgcggacgtacatcaccgctaacttcaaagagcacagtccagaagcattcaagcaagatatctctcatttctgtcttgcgagagaggaagccgtcgagaaggggattcaggttcatcgggaatccgtaagcaagctcgtcaggtgagtgttgtgatctattcttttcgaaacgtcactgctgctgaatccggtccgacacgcatgtatatacctaggtaccatgcccatttgaactacctacttggtaaactcccggccgacgtcagtaacgctagttttctttttcccttaaaagacctctgctcgctgaatcttacctaccttctactgggtgaatctagatcggtcaacctttcccctatacgtctgcctttcctccgccgttcaccttccatacacccgcgcctgtagaattgccttcgttagcccatgagcggtttgccgtgctcttcaacctaggagcatgctactccaatttagtcagtcctatagatcatcatacaggctcccacacccgcttcgtgttgacaagattgcttcgatttccccttccatccactatttagggaggccaagaaggtaggctcaatgcggactcgctcaaacgtgccattgcagctttccaggtgagcttactcttctcgcgtaatcctactctttattagaatacccagatcttccagactcacaacatcgttgccgaaaattcactatcagaacgcagcaggcgtattccattaccttttgagcttgataccggataccagcgcatcgcttgactcgtttggctcatccgtctacgacttcaaggaggggttcatccgaacactgctctttctcacgcaggcgatggcacaggagtgcttctggcaacaggctgtgttgggtacgtccgtcgtagtgttcagttttggtgatctctttcaaagaaggaagagccgctctgaaagatagatattgggtcatggttacaacagagaaatacaagaacggaatcgtcgccaagctggctatgaaagtatgtttatagaataaacaaatagagatttcttgccaccaactcctttcaagtgtgctttcttctaacttccggtcttccttaggtatcggatctgtacgaacaggctatcttggcttcaaaagcagattctccggctgcttcttcgtttctaccatctgtaagacaatcgggcagtttaattgatgccatctgctcattttttatgaggtcttgacgtcaaaagaccaaatcgagtagacaggctcaaaatctttcctttttctttgttttcgtgggggtgttttggtgaattccatgtacttagaactggacggcacttatgaacgtcaagcagcttcacttccaggctgtcgcgcattgtaagtcccttttctattttactcccatacgccaaacagaatgctgaccgatgaacaacgaatacttgccacaacaatctggcgaaatgataatagatcggatgggtgttgaggatctagagaagaacagatatggaaacgagattgctcggttagaagtgagactgaacctctcgctctttcatatctattcaaaatctttccgttcagtcgcgtcgttctttctctgacccatctcctgtcccgtacatcttcttcttaatacaggccgctgaagggctagtcaagaagacgctgggacaggccaagagtggagtggtttcagatgctgtcatcggggacatcaaaggattcctacaaatgatccaaacgtctctcgtccgtgccagaaaggataacgatttgatctatctctcacttgttcctcctgctggtgaactcgcttcgatccagggcgcgatgatggtaaaacccgtcctcccggtcgaagtgggagacggtctggattggttgataaactccgacgggggacttggttgggagggtctggtcgactggggggttcatgttgctatcagtaagtttcgtatactcggattaattcagatttatcactgagacatatatccgctgtcttatcccgcttctcaggtatctacgatgataggaaggatagcttcgtaaaagatgaaatcatcgcaaagaagctggaaaccgatcagttggttgctttgtgcgtcttctatgcctatttttgatattctcctctcaattgactcgaacgagacgaatattcactagcttgacattcacaaaacaaattcagaacccttcaatcgttgaatctcccgggctcactccaagccatcgaacgtccgatcggtttgccaccgtctctactgggaatagccgatgatataaaaagagagaagggggcggacagagttagagggatgatggaaaacgtgggcacattgagagctagggcagatggaagcttgaatacggttcgatcacatctttctttgctttcttcttcttctttgaaatatgatctgacaactacattccttataatgtaataaaaacctgctctttccatcatgcctacaacactttaaggcgcttgacatattagaccaagaggcagaagaagacgagagtaccagggccaaatatgcccagaccggcggatggtcaagaccgccgtcgttcgaagtaaacgaatatttgattactcaggctggagtgtacagagggacgttgactcaggcaggagacagtgattcgttcgttctctacctgttttcttgttcttttctgatagggaaaagattatgattaagagttgaattgagttttgtttttatcctgtgatagaatcgtaaggcagaaatgggaggaatgggaagagaagatagagattttgggaggagacgaggtctgtcttttatctagtttcctctgtcgagctctctgatactgacgttgaaagcctgctgtgtcgacaacattaaaggaatacctaactgcttcgattcctcgcctcccatccggtccatccctcacctcgacaccggctgcgcgatcactccacactctgctggagacactatcggacttgactgctactcggactcgaatagcagactctgcccgatcaatggcggcaagggatgacgtcagatcaaaggtcatctccgaggccaactccattcaggcgggctcgaaggcaggtgaggtcaaggcagagtggtttgaaaaattgtttgaaaaggagttgagaaagtatgaaggactggagagagaaatggtggaaaactcagatcaggcgaatagaacgctggaggagcttagagttagtcttccttcctcttgtttttttgttcgatttgaactgactcgttcgctattgatcctatacacaccatcagactcagaatgaagagttcattcactcgaggaaaacatcccctataatcaaagctagggagaaggctcttcaaagttttgatatcgctcatcagaaatacagagaggtcgttcaaaatttggaagagggcatcaaagtttgtctctcgatctttttcatctctccatgattgaaaagatagtcattgattttttcgcttctccatgtttccgctcatctcctcttcccacagttctacagcggctttttggatattttgagcaagtttcaagatgaatgtcaacatttcgtctggggaagacggtccgatgtcatgtcagtcttgacctttcttcttctttcgcttgcaagtgtatgaccgatcaatacgatggctgattctctgctgggtcttgtttgactatgcaatttactattcgtttgatagagctatcaccgctgcgctcgaaaacgctcgattgaatcctcctccgcctcaatttgagccggaaccggaacctgaattaaggcagacctcacacccgagtcctgctgtatcgcgtcctcgaacacagcctgctaccttcagcttacctcatccaaactcatcagactggacgaccgagacttttgctcctcctttccctccccctcctccaccccatgcgccttcttcggctaatcttgttgggacgccggctcgaaggggacctgtagctggattgtctaaagagagtggagcggagggaagtccatcaaggagaagtactagggttagaaatcagcaacaacaacagtagggatctaatggatgtgtgtgtatgtgtgtgtatgtgcgtgtgttagaggcgcattcaatatatctatctgaagtcgtggactgataacatgaagactccttcgaggcgcaaatgtcaggatccgggttcagagggtaacgggaaggttacaagaatgtaaccaggcagggaatagggctggcaagaaggaagttcaggctctctagcttggtgactgtgacgagagcgcaaggcagggaaatcgtatgaataaggttgatacaacaatggaacaagagtactagggaaccaag

SEQ ID NO: 374 - DNA, 15851 bp, Xanthophyllomyces dendrorhous
catgttgatataatgagagagcataaggaataccgaagtaggagaaacaacagaaccaaaagaaggttaccgaggtgtaacactcaggtcacatccctgacagcaaagatgattcgtgtcacgtgatgcacgctgtacagcgataactagatattgcttctgaaatctcaaccctaacaaaacaccatgcgagccaactctccatcatcacaaatcactcactacccagatcggtatcatcaagacagagctctcaggacagccggtcagtcagttagagaaggccaggtttcagacaccgagtggacgtggttatagatacaaaaagccatgtccgtgttgatatatacgacgtccattctacttggtctgatcgctctgcaacaagcaacgacctaccttgttcctctctccagtctccttttgttcctccctccgaccgccgtcttgtttgtgctctccataccaccaatcactgtttgggttgcttggattaccgaaagctgggcagacttaggtcaacgaccaacgaatcttgtccgtcgaaaggacaagcatcaccatgaacaacgagtcagacgacggccaggagagggtccttcgaatagagtacggacgatctttcaaccgctttcgtttggaacgccagctgcttggtctgttgtacagcttcgatcgagatgggagaaggtcaagcctgatcctacaactctgggcttcattgaaccatcacttaatgcacatgatcatcatccttcaatgccggccatccttgttcaaccgtttaattcgttgcttgataagatcattaaagagtttgtactcgtttggtacactcgaatatcgccatctcctgctctacctgacaaactcgaaggtgtaattcgacactcggtcggggaggtgatcaaccgatatgagaaggtcgatctaccagctctgctggttggaaagatcatccctcatataacgactcatttatattcgttctccaacgccgaacgcagcctacagggcatgagacgtcagcgttcatccacaattggaacatcctcctcggctacaaactcgtccacaagaaccacaacgaaacctgttggattacctgaaggtgtagatgtctttcttacggagtcatacggacccaatgcgcttcatcctgcgatctttggaaaagcgctggatacaaaacccgctagagaagctcatgtgagatcactcgttcaagggattctaaaattgattttgccagagaaggaagtgcagagtgaaacggtattgattgtagcgagagaggtggtcacttgcgcggtgttgatgcccctgatggatatgttgggcgatccagacttttggaatagattggttgaccagcaggtacgcaaattatatcctgcttcgtcacattaaacagaataaaggttcgatcaagtggattttacttctctatcaaaggccacaaactacatccgtcaacagaggctggttcatcagcttcgacaagccctcgaacttcaatccctttctccacacacgcccaatccagcgctttctcctcgaaagactagttcaccttctaaatcagaacggtctatcaaaaactctcatcttcgatcttcatctccaacttcgacggggtcaaagtatcgaatctcgagtaaaacggaccccaaggatttcgatcggtttgttagaaacatcgggaagatcgagagcctgatggaaatcagaagattgaggagtgatatagatagggagatcagaagaacaaaggtatttctaggtaagtgcattgattattatacaaatgcaatatacaggcaaccattttgttcacaccaacctctgtccaaaaagagaaaattggtgcaggcgcgccagattcttctcaagatatacccaaaggacagagaggacatttagaaagactgttctttgcaagagactttatcgagaagaagattgccatgatatctggtgatccttccgctgtaagacatgtgtttccttgttatggaagttcgtctttgttcttgtacttcgaaactagcgctgaatcagaccgtctatggttatttctagccctcatcctctctcgatctgtctccgtcatacaccctctcgacgaaccaaactattgatcttctatctgtcctgaccaatccatcatcacttccgttcttcatggagtttatggagcgacgatctaaacttcttcttgtgcagttctggctcatggcagagagctttaaaaatccgctagacgattgggaatctgggaatttttcagatgatctagacgatgatgaaagagcttcagaggatagtgatgatgataaagaggaggagagaaatggcccaagacgcagtaagatggatagggaggaaagagaaagggtagaagtcagtagaagtgatttacggatgatatgggaggtgtattttgaggaagatggcgtgcttggagagagctcgagaggaaggtttggagagggaatcagaaggtttgttcggggaaaagggcgaagaggactgaaaagggctagacgttggtatgtagcctgtatcttatcttcttttctaagggctgcatcaaaatatgatcaactgattttcttggacaacttcaacctaatgacacagtatgttccttgctcaacaagatgtatatgacatgatgcaagaggactattttcctctatttcaaaaatcagacttacactttaaagcggtttcaaatgttccatctagcatcatcgccgttccacccgcatctcgggtgacgttcgctcctcaacctccagctttccctcatcgaaatcgaacgtcttctttggaaatgtatcgttcaacgcctatggcactttctgcttcgacatcatctacatcatccaacctcaatacatcttcagccttccctaaccgaagctcatatactgtctctccactctcttcaagtctgactgacttgagaactccaacacctaaggctgctatcagccctcagctctcactcgatgcgccaaattttagtaaagactcctcgatcaagagagagtcttcccctctacctcaaggaaatcatctttttggaagatcccattcctgggcaccgacacgtcgaccgttgtttgctggatcaacagtctctctaggaagtgattcttctaaaagctctcttggctcggagcaacctacactgagacaccatgcctcgcagtctagtcaacaatttgatttcctggtagcattagatccggaagtgtcttctgcccgaccccctctgttcgacgaagatgccagatcatctcgcccttctatggaccgaccgccagagatttcaagacgaagatcaacttttagtcagcacagtcaagccgaagaagacggatcggatgaagatgactttgtccagattcgaagggtagatgctattcaggctgctctgacgtctatcattgccaaggatcaatttcttaatcctcacccaccttcatcatcgtcctcctctactatacaagtttctccgaaaagccgcatatcacggatgtcagaaagaaatcgagctggatcgccaggatcacctgttgggtcctcaataacgaatacgccgtctcctgaacacatcatggggacaacgtcagcccaagcccctgacgagccactcgataagtcgatccttccgactcggcgtaaaaaaatgttcgaagatgaagatgaggacgattctgcgcttggatctagcgtgttatcagcccaacaaaaccggtctgaagaagaagagcttgatggggagagagcagacgaggaccaaggaagcgttcatcttgctgtagcttcccccggagaccttcatctgcccggagaaattgatcgactagagaccaagattgaaaagctcaacggacaagagacgatattgtatgcgttgattagaaaggcagagctgacggggaacgaacatgagttgaagctgttgacaaagtcattaaacggcttgctgagagagattcgacagttagattttcagatgaagcagtatcagcaacagtgcgccctcctttcgagccccgttctctcttcttctccattcatatgtttatgcttatcttttgttgatatggaacagggagaaagacaaccgagtcgatccacaacgaactaaagtatctataccgagcaacacgacggtggaggaggatggaaaaccggtgacccgatatctaattgaggtccaacaactagtcgaagatggttcattctctcatggttgggtcgtagccaggcgatacaacgagtttcatgcacttcatcatgatatgaaagatcttcccggggcgaagaacctatctttgccaggcaagatgttggtaacgtcgatgtctgccagttttgttgatgcaagacggtcagcactggaaaggtacctacaggtaagtactggttcatttccatatagtcttctatttgctgttgtaatcgattgtatcatctcacactgagcatgatgggtggtgtgtactaccttttctcagaaactcatcaacatcccagaagcatgtgtttccaaggactttcgagcctttctctctcagcaaaccattcatcatgtctcttctcaagacgagccatctctagtaaactcttttcgcccacagaacattgtgaaatccatttacagagcgactcgcttggacgacactctttttgccgggccttcgatgttggatttgatcggacatggtctacaccgtcagacaggcgagtttgcgtcattcgccgcgttcgctggtttaggcacgacggatgagatcgaatcgactgtatcaactgacccgaatccccaatctagaggaacaggagggagtggtatacctgacatgctcaatctgccgcctgaactcaagccgctagatggagagacggcatcttcctgtgagtcgcgctgtcgcaaatccagatttgactctacttgaaaacgacggattgactttcttcttttttcactttcttggccccctattgattaaacaacgaaagatttcacagcgcccatctgtgatttatttgtggagatctttgaattgaaagagaacaactggctaagacgacaagcaattgttatcatccttcaggtgatctactcagaaaatccttcggataggtgtatgtgttttgtcgagatgcagctgacacattacttttcacttcttcttcttctttcttaatcaaatgtgttttgcacttgacagcaagttctcggaggcactattgagaggtaacactcctctcctgtgtctgtcttctacctgttgtgcatcgaagtctgacgtcttgtgtcatgaatatttgcgcacaaaaaggaaacttcgagaggtagtcaagaaacttacaggcgcttcttctatcttgacctatctccaaacattacaagagtccatgtggccaaacgggggatctcggccggtttcggtccctcgaacagaggaggaaaagaatcatacgaaagaagaagctcggaaaaaactttcatccctcctcccgggtttgtccttcttctcagctcttgcgttcatgtctgagaagaaacgagatctgaccgccgtttttttttcttgctctgaacatgaactctacacacctggtcctcagatgtagcatccaacttgataggaagatcaaacgctcgccgaggcgccaaacgaatgttttcactcgttcaagatcaaaggctcaacgagcatctcgtattgacaatcatcgatgaggtttgtttctttggtttcctcgcttgcgcttgaatttgttggcctggttgaacacgttcgctaatgaatgccgtcggatttctcttatacttgtttccaggtggtatatacattatttcccgagttgaagaaacattgaagacctcctccttctcctgtctcttcttctcatttgtattaataaaaaaacacccttttgtttctatatatggtgatccatctcataactcgagggatgtttctctttcttactgataggctttcactaaagactttgtggcgcaagatacaagcttcgggcaatcgaagcaaaccgagagatatgaaaacggcatcggatgaaatacaaagttgattgtcttctcttatcaacccatgaaaccgggaacgacgtagggtatctacaagtaaagaccctctggggtgttttcttgctttcggtccaacactcgatctcgcgctgatccaaagtcctggatattcaaatcaaaacatcatttagaagggcgagagaaatcagtgaaatgaaactgagaaaaacagaagagacaggaggaagaaaaattcctgaaggaccgaagaaaagaggactgacagccttggtaaccctcattcgcctctctcgtagcgccaagagacctgcctctgtgcaaacggccttgatatcggctcctgagagatcatcctttgcaagaatgtattcttccaagtcaacatcctcggcgagcgtcattcttgatgtatgcagcttgaagatatgtcgtttcgtctgtttggaaggaagtattggttcatattcagtataaaggatatttcgaaaaagatgacgaaagtcgagcggagtgacataaaacgaaccttcacgtcgggtaacgggaactcgatctttcggtctattcgacctggtcggatcagtgccgggtcaagagactcgatctgattagtggccatgatgactttcacatctcctctagtgtcgaaaccatcaagctggttcaaaagctccaacatggttcgttgaatttctcgctctccaccagaagtcgagtcgtatctgccaataacgaatgagagtacacactcaacatttgatgatatttcagcatcatggtaaagatatgggaactactcaccgtttcgtaccgacagcatcaatctcatcgatgaaaatgatactcggcgcattctcctcagccaccctgaaaagctctctgaccaacttgggaccatctccgaggtacttctggatgagctcggaaccaacgattcgaaggaacgtcgctgatgtctgatttgccactgcttttgccagcagagtttttccagttccaggcactccatagagaatgactcccttcggaggtttgatacccatttcttcatataattcagggtgagtcaaggggagctcgacggattcctaaatgtacaaaatccggcagagaccagaaaagaccacacaaacaagtggtcaactacgagactctctcaatcgaaaaaataaaaggagtcagacgaaccttgatttcctgaatctgagtttccaatcctccaatatccgcataactttcttgaggcgccttgtccaacttcatgactgaaaccatcgggtccacatcatctcctaacactcctacgatcgcatggttcttgttgtgaagtaggactgagcatcccggctcgagcaagtccttgtcgacgaatgagagaatagagacgtaatactcggggccggtagcggaggaaatgatggcatggtcgtcgtcaatgatctcttcgagagttccgatagacataggggagcctcgaagatcatcgacagcagttcgttcttccgttgtcttggattcagttgcctgaggttgaaggagagactggttggtgacatattctgaaaagagaaagagtcgggaaacagaggagttaaatcgagtagaatatttgatagagatacaacagaaggaagaacaggaaacaagatacataccttcctcaaggagcaggtagtccttgattcgttcttgctttagcaatttcaaccgacatcttgttgttgggtacacggctggcagcttcactctggcatcaggtcctctctttttcttcttgcccactctggtggggagagggggctcccatttcttctgttcttttttctgtatgcccgagaagggtatcagttgatgtttgagggagaggtaggtgagtacatgtcaagatagagcgatcatagagagatacgcaaagacagaccttgtcagcgtcattcttgtctttgccctgttggccatcaggggccatacctccaagcgagtttccctgtgtgatttacaagcaaacgcacatctgattagttcaacggcaccgagcggtgagcgaagcatacagaacagattccactaaccatgatgagacgatatcgatgtgtgttgggtggatgaggtcgatgagttgaagggcgagcagagatgaaagatggggaaggtgtcgtcttccacgatggcagctgtgattaggtaagcgccagccaaatgtatatatgaataaatacctgaatacctcataaggcacttaatccaacagatcattacgtaaccgatcgggtcgatcgttccctcccaatgattcgtcactgttccgattgggtcgatttttttccagatactgccaactttttacctgctgccttcactgtccttccaccatcactcactcgctcgtctactcgtacttgccttcgatcatcttgcccatggctctcattagacactcacagacactagccagggtcgccagatcggctcctagcttggctaggtctctcgcgactccttctgcaaattcaaaaccgttcgttcttgcattcgttttccttgtctttttcctctatcttctcatcttctcacctccgattgtatcggcctgcgcgcttacttgtgaattactctgcactttcattcgtgttgtccatcctagaccaacgggttagtgtcttgttatgtcatacggtctactcccacagaacaaacaggctagcggatatctgtcacacacaggctgacccacttgttcacctgctcacaacaaaaacaacagcgatcgttctcatgaacatgggtggtccttcgacggtcagttctttgatcgtctctggccttcgctgtctttttgcctggattacagccatctaaaccacaaatcttttttttccttgccttgatcagatccctgaagttggacccttcttgagtcgtctgtttcacgatcacgatctcatccctcttcccttccaaaagtacatggctccctggattgccaagcgtcgaacacctcaaattgagaagcagtacgaggctatcggtggaggctcgcccattcgccgatggacagctgtccaaggagagatgatggtcgcccttcttgacgaactctcaccatccactgcgccccacaaggcctacaccgctttccgatacgccgaccccctcaccgaagaatgtctggctgaactcaagagagacggtgtgaagagagcagtggcgttcactcaatatccccagtacagttgttccactaccggaagtagcttgaatgagctttggagaggcttgaaggaggcaggtaagaaggaggccggtggagaggttgggatcgagtggagtgtgattgataggtggccaacacagccgaagcttgtcgaggtacgttgggcgttcagtgatcaatttgtcgtcaagaataacttcttaccaagaacatgcgcttatcaacctcccttctcgcaggctatcgcagagagcataaccaagactctcgagtcttacgagcccgctgtcagagacaacgttgtcattctcttctctgcccactcccttcctctatctgtagtgaagtacgtaccggctgatttaccactacattcgagtcctctttttgcaaaaaaacattctgaactttttgcgtcgctgtgtctctctcttcttctagccgaggagatccttacattactgaagtagcagctacagtactggccgtcatggaacatttgggcaacaagaacccgttcgtctctccttttttgtttcaaatctcttctgattttatgttttctgaagttctctattcgtttctccttccctgtatgtcttatctttgaccatcagataccgactttcctggcagtctaaagtcggtccttccgcatggcaaggtcctcaaaccatcgatgcgcttaagggacttcaccgaaatggccagaacgacgtggtcatggtacctgtggcattcactagtgatcacatcgagaccttgttcgagcttgatcaagagtacggacaagagatgaaggaggttcgtcccgttcttttctttgtctctcgttatctatggagcattttaccataccatactcgtctcgttaatcgctaacgtttgtcactttcgacctcattcagctcgggatgaacatcactcgatcaccatccctcaacgactcgcccacctttgcccgggcgctagcagatctagcttctcagcatcttgccgacgtctcttccggcaggcacggcccgatcagtcctcagttggcgttgagatgcccgggctgcacgaacgacagatgcaaaggaagcaaggagttctttgcaaagaggggtttggaaaccgttcaggcttgagcggccgaggtgaaggattggaatcagagtacacctcttttctccccttgtgcgttcgtttgttcatacattcgagcaagggccatctatttaacaacagaagataaccaaagatcaacaacaacaataacaacaacaataacaacaatattaacaacgataataacaaaacgaatcaacccataatcaacaactcgcgaacgagaaaaaaaacaacccacacccaacgatccgtatgtttggagtttatgcaatgtatcttagctattcatcactggaagtctgtcctcgatggagacaagaaaaagtccaacgaccaggcggaaagattaaagagctatagaaagaagcgtgtgacgaaaggttcgatgaggagcaaatgaattgatgactcgataaattgatgaattgggaaagatggacatattgatcagaccacctttacctagagacagaccataatatccttatcttcatctttatcttgttccattctgttttctctttcgttcttcgtgagagctgtaacaatcaagaacccgaacttgatcgtgtgtcaagaaaaagaagactaagccgaacttgaagataaagatacaacatagatatcccaagtacggtgtgtgaaagaaaaagaaatcttaggaaactccttggctaaaagcctaaagaaaataactacagacaaggcaaagaacaaaggtcgacaggctaagcagaggctgtagcggaagtaggagtgggggcaacagcggcaacgacgggcttctctgcagttgtggccgtgctcgatccagctgccgtctttgccttctttctctttttcaaaagagctgcacataacgaggcgtgcgagaaaaaaaaaagaaaggaaagaccactccaattaatcagccaaccttgaccgagaagagagaagcaaactgagaacggaagatgagaaaaaacgaaccagcagaaacagcactccggacgttttcgttgatctccctgctttgctccagatactctgtatcatcaaaccgatgtttcttccccgcgatctgcgctagatcctccgacgtcaactttgtcctcgtcacttgtgctcgctccacttctggtcccgcgccggacccagatggaccggccacaggcgatccgtcctcgttcgagtcctcatcctcatccccgtcctcggctagagaccgtccggtggcgagcgcgtcggcagatgaagagatcccaagttggcgttcgagtgcatcgagttttgctcgagcagcatcagtctttgtctttttgtagtttgcttgtacgtccaacagttcggccatcctatgtgcgttgcaaaagtgattgaaggaaaggtgatcaggtcaacacacatatcatatggatagaacagccacttgaccctccaaggccaaaacacaaagtcggaaggaaaccagacgtacttcttggcctccttgatggtactcaatcgtcttccactcagatctctacagctgtcgttgttactggccttcttactactcatctttcctcctgtcgctctgagcatcgctccaaaccctccctttccacctcggagtcttgccctgacctccacttcaacccattcttgagagtttcctacagagctgtcggcttccaaaggacaaaaggaaaggagggaggaaaccgtgtccgagtcaagaggtcgcctggttccagattggaagtagacatcggaaagcgatccaggaagaagactggaaagtttggtcgagggtgcgacccggtggaccgtagttggaccctcaagggatctgactaggacgttgacgatcccgaactcgggattgagattatcttgcatcgtgtgtgatatactttgaaagcgaggatgggcaggacgtgactggcttcttggttggtggcaaagagagaatgtcctgaacgaggaagattagggaaatacagtctattttgcaaactgtgactgtgaccactgtgatattgttacgcgccggaggctcactaaaagagaacggtggacacaggagaacgactacatgtcattcttatagggcccgacaaacttcaagaatgaaggatccaacaagaaaactctttgtaaacaaagaaagtcgagagactggtcaaaggtccaagaagaagggaggaggatggagtggtggtggttttggggaaggatcgacggatcgacggataaaaggaaggatgactacggagggagcgatagaggagaaggaagggggcatagtgtttaacaatggaggaacagagaagacatagtagtcggatcagactagaaccaagggaagagggatcgaagggcgaaaacatagggatctgaacaagggagcaaagcaagaacaaaaagacggaaaacaagagtagaccagagagattgtagcaaagcccaagaagatgaaaaagtagaggggtttatatagttatatagcataagctacccagatcaaacagcaaggaatgtagacagagaagtcagcaagaggagcagatgttgactacaaacaacaaacatgacaatgaagcaaagagaaaagaaatgctcacaagagaaagaaaaataaacaagagacaaaagcaaaaaaaagccgaagacgatacaaactagggtacttccacgatgtctttgaggatacaaaaagaggcattcaacatgcaaagaagagaacaaagtgaaagaaggaaaataaaagattgcgtatgtcgtttgactctcctaaatcccttgttgcaagattgggtcaagtgatggaggcgatgcaaatgacagctaagggcgagcgaaaggatgggacgttcgtgagcttttgaagtgtttgaaccaatgcaagactgcaagaatgcgaagaaagaaataacttacctttgacaaggaactaaaggaaaacaaagttaagaacaggcaaggacagagacagtctgaaagatgtaatggcccgaaaatgtaccgaagaagaaagagacaaaaacgatgaaggtgatagaaaaaagaagtcgagaatgataagaaagaaaatagagagaggagaaaagcgagtcgatggacaagcatgacaagagtatgaaacggtggtaggcaacttttgaaaacctggtccacctgcatgagagaagaagaaaaagagaaagagaatgatgagaaaaaaacctacatatatgtaatagacgacaacggagttgtaaacattaggaaaaagaaacatgagaaaaattcgtcaagattgatgagaaaaaagataggtagagaataaagtcagaatggaacaaagcagctcaatagagagcaagagaaggacgcaacaaacgaacaaagaaaagaagagaagagagatcaaattttgagaccaaaccggggcttaggaagatcgcctgccaaaggcgaattctggaagacgctcccggcgtataatgggcccttggcagaattgtctgcgccagactcgatcgatccgccagcgagaccaagcgtagaaaggctgatcgacttcgcgtgcccagatgaggccctctgattgttctgagttaggtggtgagcacgaggaaacgtgttgccctttgctggcctagtagcggtggacgatgttggacccgcgaactgggcagggggagcggaagaagacagagaggactcgaaagaggaccgacgctgtagattggctgtagggtttttcttcttagataccacgaccggggccgaagactcaaacaatgcttgctgccaggtcaggttggtcgcggaagggggtgtagagatagaaacggcgggagagggagagatcgatcgagtttgcagccgattgacctgagctcggggtgaaggcatttttggagtcggctttgttggagcagagggaggcgaagtctgctgccactatgaagcaaggcgaaaatgacaaacaggcgcgacatatcgaaaatgtacgacatgagcggtgaatcagatgagtgaacgatataaagatagacaacaacaacaactaacggtcaacacgtcggttcctcgcttctctagaggcatctcccactcttcactctcatcttcctcagactcttccttcatcggtctgactcgggctcgtccagcggagattcgggaagctgatcgttgattggaagaggcctttggtctacgcttgtgaacgggttcggtgacgccagggatggaagcgtgtggaacatcgacagtggggccgggcggattaccatccggtttggttcgcttgtgacgggaacgtcgtggggacttgctagggacatctttgtctgaagcaactttgatggaaggatcgacagcagaattatcggtaccggtagttcgttgggcaaaattctagataaatgaacgtgggattgatgataagaatggatgagctggatagtcaaagggaagtgaagagaaaagagaaaacagcctggctgccgacatgaatatacacaaacctggtgtttatgcgagtgattcttctttggtgcaggtcgacttgcgaacttatcctccaaaggcttgctgagggtgagaagaccaggaatctggcttgctgccactactgttgtggctgttgtgcccttgacgggagtagacttgtgtgactgccgggcaggctttgacgggtgggtggtagtggcggcggcagtagtatttgtagaggtggtattgcccgatgaagggacgacagcctgaacggatgggtttattgtgttcctgaggacgggcctaggagaggctgatgctgtgcgaaacgagctgttaagggtgtgggagtgttggtgtgtgttgggctttgagttgaaagcgcctcgatgggatccatgattggacgggactacagacataggtgctatttgtgtattaggtgtggagtgtttggtgtaagaggattaacggaaatgatcgaagtgagaggcgagcgaaagactggatgagaacaaatcagacgggaggagcagaagaagaaggagagagagagagaaggaagaagaagggaagaagggaagaaagaaaaagggaagatggatgggatggatgggattttgggatgtggtggatgttgggatgtaaagagacaaagagggagactcggggaaaagaggaagaggcccgtgaggagaggaggcgccacaaacacgctgtggttacgggggtttcaccgtgtgggatctgcatccggtgctaaaattggcgggctgacggcgcgctgacggttacgctgcacagcagtaggagagttgagctcggtaagtaggcggatcatcacgtgtgtctgatgtaatcaggcacacccacccacaccgtaaatctctaaatcgtcatccgccctgatttctcgttcctggttttcatctcgtccggatatttctcgtacacccacacacacccacacacacc

SEQ ID NO: 375 - DNA, 25017 bp, Xanthophyllomyces dendrorhous
acacacacccacacacacccacacacacccacacacacccacacacaccacatctattcacagctcatgccctcagagtctcgttcccatcggtcgtctcacaagcatggcaacaggtcgccagagagtgaaagaagacaccaggatagaaagagacggcgaaagcaagaggacaaaggtgggctcaacgtcgttgacgacgaggatggtgctggtgtttggatcgaaaagactctggatgaggtgagtttattctctctgtctcttccctctttctccaaggatgcaaatcctcaatgaacctgctcttcttctttttgatccaatcaaacgatacctctttactttcaccatcccaggacgtcacaccttcgattcctacttcggcctcactctcgctgaactcccatgcctcacaatcaacatctgccatccttccaccctcagtcacctcgatcactgcttcttccacctctactcgggactcgtggatgcttgataactctacccatccagcttcagagaaagattttgccgaggggctcgaaggacagtccgccggagggggttcagactttttcaccgctctcggcaccgttcagagttcaagaaaggaaaaggaagccgtcgccaaacaggtcatcagagaggaacccaggtttcatagaagagagatcaacactcgattgattgagagtgaagccggtcaagatgtcactccaagtctcaatcgtgagtcgcccttttctctcgactcctgataactcttagaagaccattcaaatccattctttcggctgctttttctaccaagcctcccgcccagctccaggaggccctgggtcgcaatggcgaatgaccaaacttcgaaagacgtacgaactcgcagaatcaagtcagcgtccgatcgaacaagtcgccatcgagcgatatggctcgatggccgactttgatgaggctgtcaacgagcgacgagtcctagatgaacgagcaggcaggagagaatcccgaggtgcgaccagttcggccacaaacaagggatcttcctcgggattcggcaaagggtcttcttcaggggcgagcactccctctgccggaggtagattcatgtttactaccgatgcgaatctgtctaccggcaacggaggtagcagcagtcgaccaggttctcgagcaggtttccgtcgacctggggaagaccttggaggaggacctgcctcggatgggacacgcacgcctggaggagccggtgaacccttcttgccatcaaacaactcagccagtggacctgccgggcgaatcgagaaccttcgaaggcagtcttcgtcatcttccttccagtattcttctgcgccctcaactcccattccgtctgttctgccccctccctcatcaaccaccaaacctataagcttgtcggtatcgtcccaacctccactctcgccctcttcgctcaataagctccaggctcgtgtactcaaagctagattgatggacgcgtccgacgcggaagagctagaaaagagctacaacgcagctgtcgagcgagccagagaagcctccgcccggccgacatccggtcaacaagccaatacagacaacaacaaagctggccatgctcatcatcactcgaaagaccagacgacagtgcagatggttcctactctcgatggcatgggtcggctgtatgatatcggaaaggggaagaaagcagaagaacggttgcctcccggaaatagacggaaaaaaccagaaaaggtagagggttcttttttcctatactttacggttgacttggtcgccttacttacatatctcgtgttctcctctctttctttctttttccttctttgcatacctctggtacataggtcgagaccagggatccaaagaccggagagatgctcagattgaacgcagacgacgacacgaccaccctaggtgacctcgttagacaagaacggtttggcggtggttcggccgaccagaagaacctcgacgcagagctcgctaggtcaatcgcaactgatggaaagtttgatgtcagtcctccacttctcccttcttcgtgttatcctttgtctgcactgacgtgtgtaatggttcctctccttggcttgtcgggtcttccttgcttccacagagcaatttggactatatggacgagaacgccgacaaattggccaggaaaaaaatgaagacagatgcttccaaacgactctatgctatcaacggtccgttctcatctcttcagagctttcgctgtctcatttgctcagattcattttatctctctttatctcgttcagactatgcccggacaaagaaggcgctcgacaactgccagttttgtccacagaatgaaggcgatcccccaaaggccgccgtgattgccatgggttctcgagtctatcttgcctgtactcagacagaagaactggtggatgggcattgtcttattgttcccatgcaacacaccctcaccactcttgagggagatgatgacgtctgggaagagatccgtaacttcatgaagtgcctgatcaagatgtttgcacagagcgatcgaggagtcttattctatgagaccgttctatcgttcaagtatcaaaagcatacatatatcgaagcgtccgtcctgttcttactttcctttctcttcttccacacttacgggcatgtgttaatcttcgagaaaccttcgtattgtatcttgcgcaaaacgcagtgttccggtaccctgggaccaatgggaggatgctccagcttatttcaaagtgcgtaccactatcttaattatattacgcgatgaccgactaatcaaacaactcgacgttgacacctgaacatccatcttccatctttctgatactttcggtccttaggaatcaatcctcgcgtccgagacagaatggtcccaacataagaaactcatcaactttgcagaccggccgggcgggttccgccggtcgctcgtacctaacctaccgtactttatggtccaatgggattataaaggcgagaaaggttacggacatgtgatcgaaggtgtttccgactccagtgccaaggctggagacggtgaagatatgggcgcggtcgacgaaggcgacaaaggtggaggcgagtttcccaggtttgtcactctctcactatttgttttcggtctgtttgtctgtctctgaggatatagggcgaagccctggatttggaaacaatgctgaaaaagagacggttccccttggggctcaatgttttctcattccccacagatactttgcagcagaaatcatcggaggaatgctcgagttggaacctcggaaatggaggaaaccgagaagggtggatagcagacaagataaagctcggatcgataagtttttgaaggccggttatgcgaaacatgattggaccggcatgcttggtcgacaaggttgaagaacatattgagcggggagggaacgagaagaaaagtaaggatgacaggggatgaaagattgtggatgtgatcactcccctttggagtcttgcccatggtgtatttgtatcttgctttgccttgccttgctctgctctaccatgtttcaaacaaagaggaaaagaaaggtatatatatgggtttggaccttgcacattaaaaatcagagggagagaatgtgtgtatgtgtgtgtgtgtgtgtaaaagaagaaaaacaggaaaatcatgacaatcgaggatgaatctctcctttgtcttccgaaggaatgtttcgttcctcatctgaatcatagccttttccttcaaggtcttcgtaaaagtctggtgtcataccctgtcagagagaaaaggtgaacaaaagaacgatcagcttgccgagcaaagcactgaggaggaagacgagagaagcgtacagcaagacctcgatcgagctcattaaatggcccttttagtttcccatgaaagttggcttttcgtaatggaagcaatcaaacggccgaggtcattagttcgtgtaactgacaagacgactcaaaaccaagagaggacgaagacgagagtaaagggaaaaggaaagcacttacttcgcacttccttccggaatgcctggacaggatcgacgttttgaaggtcacacacccaagtgaaccactagatatttcatccggtttgtccaattcgttcaatttcagtaggttagtactcatctctgatgggtgaaaaatatatgattgtcaaccatcggagaagagatagagatgacgtactttgtggcctgatagagggtttataagggataaaggaaacaaaagagtgtatcagaggggaaaaggaacttgatatagtggtttcggcaatcgacttgcctgcggtgacgtctgttgagaaggaaaagcgagcaaggattgagtacaactcataggtaagagtccttgtctcttatgtttaagaatatatcaacaggcagaagatagagagacggacgggtgacttcgtctgaatgaattatttccaacgtctgtacggcttctagatcacctgcttttcggaatttctcgatagttctttttgatcgttggaatagaatacccgttttccaattggtgaagttgatttgttcagcttgattatgagagagcaggatggttgtgggcgatgacttacatcgggttgacatccaggcctctcgctttttacaccatgagtaagaccagaagtaatttttcaagcttcacagttagcagatagcgcttgggattgtaatctgacaaaaccagatatcggacaaagcacagaacctgaaatagacagaaagacagacggtgtaccttcgtggaccatatgaatgatcgccaatcgagccctcaaagaatgagaggtctcctgagctgactgccagagcccggcatggacaggatattgaccgtattggatccctcgtttgttcaataatgagacgagtagtgagaaatgtttggcttcgtcttctgctacctggtttcatatttagatttaaaaaaaacattaggtcagtttgttgttttgtcagaaagttatatggaggtgtattttaacaaaacaagaaaactttgtccccacctttgcccaatctggtacaccgttgtgaagacaaaaagaatggtcaaaattcattctgaacaacaagagactaaacgatggagaacccatttcgaacccacctaggtagaattcaatcggaagctagacgatttatcccagcgttaatgcagacaactaaattttgcatagatcctcaacagacaatcgagctcactcaccgattgaccgttgatttcagtaacagcaaaccgagcaatcacgtcccaggcgagatcgatagcccactgttcaatattggccaaagcatctgtgcagcgcgggacaagaaaagaaggaaagaaagaaagaaagaccaccaccaccaccacatgcgcacatatcaaggtcaacaccgacaagcttgttctgaaagtaacagcaaatacaaattgatcagtacatacgcagcatgagtcctctagatttttctgagcctcctttgcctcgttttcccatccgtccaggtgcgaccgttcctccgataccttcttctctaggcggaacatcatttcctacaacttcagcagaccatttagcttcttctctgccaacaagtctggactgatcattctttgggtctcgaatgaaagcaagcgcttccctcgttctagtcactttgagcgctgggttggatgtctgaaggatctggagagcatacgtcagtattgaagttggcagtggatgggcagggctgagtgactcttctggtgttgtatgcgctgtggacggaggagagagcgagagagactctatggagggcagctcgacagccgtctgtggttgaagagcaggagaccccatttcgacaaacgctgtgtatgtgttcacagtttgaagaataaaaaagcattctagcgtaagtgtctatgcacggtcggatagagtttgtacatatcaatattcaacagagcacaattccacgcttaccttccgacaccggttcgacctttgcgagctcccaatctgattcctgaggtcctccgggagactctacatacagtgtatctttctcaagctttgtttggtagacacagagcctcattcctgtttctgagctgccgtcttttagattaaagtcctacataagagaatgtcaagagggcgtgagcgccaaggggagatttttcgagaaagagaagaaaaaagtaaaatgagacatacatattgatgccatggacaggtgatcacggtatcttccacatcggcctctcccaaatcggcccctaaatgaggacaggttgcctccatcgagtaaaactcgggaacagcatcacgaagagacgacagtcggaagagaagcaacttgtgggacttgtaggatgggtgggctggtcgataccgctggaacaagagggtatatctagtatgtgtcaaaaatgtcgacagccgacctacgggaatgaacgtcgtcattagaaagtgatgccgaatatacaaatatgatagtacaggcaacgagacaagtagggaacaaatggaaggtgaaaaggagaggaagctcttaagaataatcgaagcgagaatcttaaaccgctcggatgtagccgggttagggttagtttgatctcaaactatgcctctccttgattatgacattggcaatgactatgttgctcctggtggttcattcaagaagaggtgatgaatatacttggctggttttgaatgatcaagaggcgattaggggtgggtgatttcgtttttccctttcccttgtatccctggcgcaagaccagactctcttcaatccttcagaaccaagatacaaccgttgacaatctcttcattctgtcatctcggctctcatttgtgagaaatagtcacactagatcagtgaacaccgtttactggcgatctgtgccttcctggacggaagaataaatagttggaagaatcataagcgaagagaatggtgatatcgacgcagatatgcgcagcgcagaactgataaaagagatagattcttttacttctatgatcagaggaccttcggaaacgtatcctagctacttaaaatcaggagaagggacatatggggcatcggaaaagcactctagagagcgtaagatgctttactagaggccgcctttgcggtaacgatacagaaggtctattcactcatctggtatagttctgaatttgatgccttgcttttcgacgaatactgcatcatgatagacatcccggcttgccgtttgaactgatgatagaaatctccaaataaataaaatctcatccttcattcggatctgcatacagctctcagagtcctctggcgttgttaattgacttatcacaagctttcccacggggccgacccagacgacccaaaatcggatcagatcaatgacaagacagccatggccggggtgaacgttgagagttacggatcgttgtcaaagatgtgggtgaagtatcttgtgacccaaagggtatgttgtaagcttgaacacgaaaatgtctcaatccgctacttctttgtttctcgctccagcgtatcatcatgtctccagcgcatctttgcgctccagcatatctttgagtcttcagtatatatcgtaccagacttctagggtttgagaaccacacatatgactggctttcccgaccacttgtagataaaaaaacacaagcttggattcttcgttacttctacttctatccttccttgtttgcttggtccaagtgattaaagctatcctgcctctcagtcccaagaacctgaactcctctccctgaaacctgagagccttgtgtggttactattcttgtgatccttctgttaccagcccagctcccgtcctttacagttaccaccgcaagctgttctccctgatccctggcatgttatgtatcatataccacgtgacctttcggttgccccgtagccatcaacgtgggtgactgtgctgccttacgtttgttcgttctttgaacgggctatcgtcctagttcattctaccaacacccattgtccataaagaactttacaacatccaaaagatctttttctaatctattccatccggtttctcatctgttacaaatttgagctcaagtagagcgcactagaaatgtctccacctagtccagcacgtgaactacccctgcaccgacggtcttcctctgcaagtgcagctttaccaaaagttcaaccttcgctacacctcgaaccatcctctacctgggatgagatttttccacctccgactgccgacagacaaggctgggcccactatagacgaccgctgagttttggtgtggttggtttattcttatttagcgtgagcgtgatcgcgcttcttggcgtcggaggccctaattccagatcagacgacagacgtatgggttccggaggaggtactatcatccacggtggaaacggcgcggatgtttcgaaccctggtcagtttgtttgccacatctttgctctcctttgtttcctgttcgctccttgttattctttcattcgttggaatgtttgaaaaactcaaggggcaaggcgacgacgttagaggaagccatcgtgactgatgattggacgttccttactgcggccaaacgtgttgccctgtcttttttaaactcttaccttgtatcgccgttgtcgctctcttgactagcagactattctcaatatgtttctcttcaaacgatcccgtcatcggcactgccgttggacaagccaggtcataggctgatcatcatcggtgatatccacgggtcaatcaagccgctcaagaaacttctaaaaaaggtcgattatgagcatgatgaggatacatttttgcatgtcggagacctggttggtaaggggccaaagccgctggaggttttagagctgcttcgaaagtacaaagttagagggtaagttcgtcggcacttaactcttctggttcgtccagattgtagcgcgttttggttgacattatctttacgatctcgtcgttaaacagggtaagagggaaccatgaccaaccggttattgagatccgaagctggatggaacacacatttaaaaacagaaagacgggtaaagttgactttagctcaatcacgcttgcaaaggcaaagaagctcgggttcccagaggcttgggctaagtgggagaacgagcacttcgagaccgccaagtatgtgtcgtcctttctgaccttggctgtgaagttgaggaaacaaggctgatccacagtgttgtttggggtaaaagaacaatgtcgaaagaagattatgcgtatctgttatctctaccgttgaagcttcaccgtatgtgtttcgtgcttgtgttccctcatgattaattctccccggcttatcgtccatctctctgtacagtgccttcggttcatactttcatcgctcacgctgggctgctccctgtctcgaccgcttcgacacctgctgactctaactcgaaaccaaagtggaaatcgccttcgctacctcggttgcaagcagagctgtcgcttctgtcagacgtcgagccaaacacggatccgtgggtgttgttaaatatgcggtcgatcctcgccaacggcactctcacaaagtcttccaagatgggcgagccctggtcggatttgtggaacgacgagatgaaagactgtcgggatggacgttgttggccgtcgaacgtggtttatggccatgcggcctccagaggactagacgtgaagacgtactcgtttgggctagactctggatgcgtgtacggaaagcagctcaccgcgcttgtgttgggatccgatctggactcaaagtcaagtccaaaagcggtcaggaagggaacagacgtcatggttggcgagttcaaaggaaagctagttcaggtggagtgcaaagatctggattgagtcggcatcggataaaacaagtcagatcactcctcacatctctctgggtcacctctctccgccaccccctttcttctctattcaatatcaacatgtttatatataatgtgcatacatcgatcctattcctctacaatttaccaaccgtgttgtcataactggcggtttccttctctcgatcctaaaacaatccatgggaaattttgatcatagtaaactcatagaacgtgtacaatgtaatccgtcgagacagaatgagccgcgatcttctcgacgaacacatgtcttaggaagaagtattccgatggcatatcgaagacaaaagattgagggcgatgataatgaaagagaaaatgaaaataaaaatgctatctatcgagtgtatatatatctgatctggggccaaaaaagatgaagaacttctgataagggattcttgaatcgttatttattggtttcgtgatcatttcttccgcgtgtctgttccgctggccttcctccttcctatttctcctctgtacaaaaaaaaagcagaagaaacctctacaagtttgcttatgctcttggctctgaagaatttgtatgtgtagaggaggtccaagagaaacagaagaaaggcgatgtgtaaagaccaaggatcatatgtgtggatgataagacaatttcaattagataaatgacacgggctcttacgcttcgttctgattccagtttattctccggcttttcaactgaggctcgccggtcttttacatcatcggtattcatccagatatctcgtctgtatctatccatctatctagtatccagcctgaatcaacatgtcgatgcagggtggaatagtagatatattgtataagatccgtatggcaaggtggaaaatctccacgaagaaagagactaaaggcgtatactacgccggaaagggaaagctttagaatcttggcggaaggccgcgcacgctgatggcgacactgacgttgatattgctaccgctgcggctgcaacagaaggagtgcgaatcttcaatctctcatcattttatcgagccttatctttcctttagcgtttgacatcttggatactccatcaaactttgtcatggatagccaccagtggagacctacttaagcgagtcgtcccagaatggtttcgtacgtagcctttttcttccttttctttccttccacttgtctttcataactctccttcccttacctctttccctcaccgaccaaatcaaacctcgatagccagatgtcggaagagtttgacgagaaacctgtcaaactgggcaagccgatcaccgcctcacatgatgtccggctcgcttcggactctcaccatggcgagatctatgatcccagcaaggaatccatttggacccgactcggtctctctgccgagtcctacaagcgtgctcccggtttgaccgcgttagttgtttcgttcttcgttctattctgttttttctttcttttttcttgtctctctcttagatctacagcgctaacaaagtccacccgattgtacttcatagtggccgagccacccatggaacggctgacatcgatatggagaaagaagggaaccagaacatccttcaagccaagatgaagccaagacatttgcaaatgattggttcgtcttaggtttctctttcctggtgttactttttccgcccttccttatcctgcaccgaaactttccgctcatctgagttgaaacttatgacctcgatgcttatcgcggcatgttcgttttgttttcgatatttcccgtcttatccattcaaacaattcaccgccacttcgtcatcaccatgaaattccttcaattaatccatccgatcaatcagctgtcggagggtctatcggaactggtttgttcgtcggtaccggaagtgcccttagcgtaggtggtcccgccggagtcttgatcgcctggatcctgatcggagctatgtacgtgttcactcgtcggccttcttatcatgacgcaggtatcctgaccgatcgcgattccctcttgatacgtccaggttgatctcggtcactcaggcacttggagagatgtccatcgtctatcctgtgtccggaggattctacacattgacagagcgaatgcttgattcttctttcgcctttgctatgggatggaagtgagtgttatcttatacttatatcttcgcctgttgtatttcatccatattttccgtcccctttttatgcttctttactcatcacaacccttttgtctcctgcgatccagctacttcttccaatggtgggctgtgcttcctttggagatcactgttgctgtcaccaccgtgcagtactggtcaggtgattcaattcctgtggccgcgttgattacaatctttataggtgtcattattatcgcctcgatattcggaactcttggattcgctgaggaagaattctggagctcatgcctcaagctcgcaacggttgtcatgtttatcgtcctcggtatcgtcttgaactgtggtgggggacctagcagcggagcttactcctcttatgtcggaggtcgatactggcaaaaccctggagcatttgccaatggcttcaaaggtgtctgctcagtctttgtcaccgctgcgttctcctttgccggaactgagcttgtcggattggctgcatccgagacccctgaccctaggagtagtgtgcccacagcaatcaaagctaccttctggcgaatcaccatcatctacatcacctcgttaaccatcatcggtctcttggttccctgggataatgaaaacttgtacggtggctctggatcgaacgcctcgccctttgtcatcgtcatggatctcgcctcgatctctggtctcaaccacttcattaacgccgtcatctgcgtttccgttctttcaatcggtctgagttgcgtctacgctggttcccgaacgctgaccgccttggcagagaccggctatgctcctaagatgtttacctatattgataaggccggccgacctttgtattcgaccctcgccgtgttgattgctgcccctatcgcttacgttaacgttggtgcaaccggggatactgtattcgtctggttactcgccttatccggtctatccaccttgttcacatggctcgctatctgcctttgccatattcgattccgacgagcatggaaggtccagggccactcggttgaggagttacccttcacagctgccaccggcgtctggggaagttggtttggtgtcgtcctcattgttctcgttctgatcgcccagttttacatcgctctctggcctgtcggcggaatggctgatgatcctggaaccgtcgcagaggatttcttcagcgtttacttggccgctcctatcatgattctctgtatgtcttctgtttctcttctaggccgactgcaaacgaaatactgatcaagaatgaattatttttatcaagtctatgcgattggtttcatctggaaacgaaagcttccttaccgtgcgcgggatatcgatctcgataccggccgaaagtcctggttgacggtagaggagatgagagcctaccgagccgagcgagctaaggctcctttcatgaccagaatgtacaggcagcttttcgccagctcgtaaaaaaaaggaggctacttgccaagtcttccccatgtcgtttacaaaactctatgtgaattctcctaattatgtacatctcgatgcatcctcacttttttacgttacccatcttcatcgtcttctttccgttccctgttatgacacatatcagtttcactagtagaaggcctgttctatcatttatctcctttcttttcgttgtgttacaatgttcactctattgaatagtctcatcgttctcctcttccctacaaatatataagattttcaaggctttccttttctctttcttcactaaacgatggatgaatcctttccgaactttcagagtcttccaactcgtacaattaaacacagccagtcgagaaaagaacgggaggattcttatattaatacaactctattcaagacccttcatcgaaacaaacccgatattccgagtaaacctgagcagtcttatcgcttcctcatccttgtactggaacctgccgttcgcctcctcgttgatctgtttgatcgtcttatccaactgacccagaagaatctcatccttacgtttctcagcccacctggccatgttgagttctcttcgtttggcggcttccgagctttcaaactcgtcacccctattcaggatgatgacctgccccttcttcgaaggcgacgttttggatgttatccgaccgagtcgaccggcgaaatgtgtgtaatcagcctcggaagcgatcgaggagctgaatatgtaaacagccgagagcgaggggatatctaaccctcggacggtctcgctcgtcgcgacgtataagagtgaggtatcggctgggtcttcggaaaacgttccaccctcgtgaccggaatcacccgaggcgaccttctcctcagactcccctgtcttctcctcggattcgttgactttgggccttctgttccttgcccgattaggatttccacggacgagagttggcgtagggacgatccctgctgcttcctcattcgaaagtccggtagagttttcgatcagtacatatctgatcccaagatctttcaaatcaaattctgcattcttcaacgcttccttatcgggcacaatcaaaagcgatcgattctgatcacctagtccgccgttcatcgcatacacctgtgcgaaggcttccatcatatgaggttgagcagtcgtgccacaaggcttcccgtccttgtctgttggtaaagggtgcgcagggagtggctcggtcgggcttgcggttgttgagaatgtgttccgaattgaaccagcaggagaaactgtgatacagtggtggtcaactgaagaaggtttcttcagcctatgaggggcaacattgatgttgctattcgagttgaatgactgagctgttatattggctcccggacgaacccaagcttcctgattggtgatgaagttcgtgaaatggttgcttattgtggcgctgcaaattaccatttgcggctttcctgtaggacctcttccttgatcctggatcaatgagaatagccttctgattgtccttatcgcgataggtggtttggttacgaacgcctcgaacgctctgcgtcctgcattctgggaaggaatgttacacattgcatcagcctcgtcgatggcgatcgtctgaacatccttcagactgagagcattctccataagcgagttggcgattgcattcggggttgcgactagaatgtggggtggcgatctgaggatggctcgatactcctcaacatcaatctcctgagacgacttaacgacaagcgtcccaacacttgtggcaagataggcctctggcacgatgagcgaggcccattgtttgatctgattggcaagggaggtcgaggaaacaatgaggactgaggtgatgtgggtagagcttgtacgggggagcgaaaggagagccaacaacaaggcaaaggttctgttttgcttttgggtcagcacgctgtagcgtttttcatgcagaacaaatatcaagaatagacagagaacaggtaggaacctactttccctgcccggttgagtctcttccgacaacatctcccctagagatgattcgttgaataaactcctgttggaaatctgtaagttccttgaacttagggaatgcttgacgcacagcttgggcaacgacaggtcgaacgcctgatacaagcaacgagtcctcgcccagcttggctttggtggtagggatatcaagctgagcgttgtactttaatcgccaaaagaaccttgattagattgaagaaacagtatccaagaagaatttgagacggtagatgatattcgtacttcaatatctaaatccaacccttgcacccgcttccgtctcgccagtttttcccgcttcgacatctgtttactgaatcgtatctgttcttctttaagactctgcttcatcagttcatcggcttgctcctgcctaatactgagctcatcgagctctgcattgttccggtctaatggttcctgttggaaaggcatcaatttgccgatattgatcttgcccttcatcctttcctgtaaagattttgatgatggcggcggtcgtctaggggggaaatacgggctattgaaaggaggctttgcgcgggaaagagtgaactctgacaagctggttgtcggcctgaactccatgtcatcagttcggatattaggaggtgtcgattcgatgtcttcaacagatttctgggtttccgatcccgaaaggatggggctgagaggattaaatcgaggaaacagtgtacaggtgcatgtagagaaacagcgagctgcaggcactctagctcgtgcaagaagaacggacattgctcttgtcgagggggccaaaagagttataccgtcaatggatatgagtgtgagcgtgagtgttctcgagatttttttaccaaacgagaataccgagattccgttcttcagcacagcttttcaagatattgtcagacacgtgactcgacgcgtcgcgtctatcgatttgccacttcaaagcgtcatggcatgaatcccgtcagagagatcgaagcaggccaggacagacccaccttccactcgacaagttgttctttctttgtgtcttttactcttgctgaatggtcaagttccagtctccgtttctaggccaatcatccaagtcgtctccttcgacggacagtctcaagagaaaggctccgaatgatcctctagtggctggtggatcgagcctaacaaagaggccgggtccgactcgagctgtcttctatggagtaaatgcagacaagcatggagacagcaaagagggagatgtagcaacatactggtactatgagaatcatcctcaacatcattcagtcattgagcctggcgtactgacagatatctgcgcactttggtggagggtttcttggtaggagcgtacagtggtaagctcatcatgtcatttgtgccactccgtataatttctcaggtactgagtttgactttgtactttgtcacaaacaggcgaagatatcaaaccaagaaggtaggatcatttaccaacatcacgctctattttagggactccgcttaccgcaatctgtgtttgcctcttcgtcttcgttcttgaagcataaggtacgtttgacaagattgaatctattgcgcatatatcaatatatgcacccttccttccgaaacatcaaaactaacaatcgcatcatgtatactgactcacagacttgggatggagatggtgtgctcgtcgtgagagggtcgagatgttctctaaaagacgatagtggaaaagagtacgaggtttttcaatactttcacgtccttcttgttacggaaactgatctccttctcactacagtatcggttccgcgccattctcagccggggagcttagtagtggagatcttctcaaagtttcaggaaaagacgtcgaaatcgacgcgccaatatcagctcaagagtaagtattgactttgatcaaggagtcgctgatcatattgacgactctcaatggataacacttatatttcatcttttgctatagctatctatcaggtgagttcgactttcaattttcataagattcattagactgatggtcacattctgatgtcatcattatcatcgggataacaggatcttgtttcggagccaacaagtctctaactgggtccgcttcaatacaaaacacaaatcgcgtatctggtccttctttcaagcctatggtccctcgaaccgccaagatgtcctctcttggaacttacgagtctaagacgagaggtccatcggatgaaccggcagccaggtcttctgtatcccttgcggcatctactttgccaatatcaacaggacacgttttggatataccccggataaagccggatcctgatgcccaagaacaaatagtagaggagtttcatcagaacggtctgctagcatgtcctgagacagactcgaaggcaccaaaaccgcctagtataatggtcaaggacgaaccaactgatttagaaatggcagagactgtcgtagatgctatgccaaatgccgctttggaaaaattaagattcaaagcaaaagagaatccgttcaaggcgccgacaatgaatagtgtcatggccggaatgactgttttggcagaaaacaggaagggcaggtgcgtctctctatttggggttcgttgcatccttgacctgaaattatgagcctgactgtgtacattttctatgcttcttagatttgactcgacaagagaaggtgccgtcataatgaaacgaccgaataaagatcagcaagccagaaacaatccaaagtatgaatatttatctcctctttctattttatgctatgaaacagtcgattgatgtttttcaatcaactcatagaaaatacgatgtggttgatgtagtcatagacccaactctctctgagaaaatgagacctcatcagcgggatggtgtcaaggtaaatggtcatcctcccttgcactttttgtggtgtcttcgactgatcttgcttgctcttgtattcgttgcctttcggaagtttatgtatgaatgcgtgatgggccttcgtaagttcgagggcaatggcgcgattttggctgatgagatgtaagtcgtttcatacctgagtcgtgtgtctgactacttgatatagtcttctcaatatctttctcatctatcaggggattgggtaaaacccttcaaacgattgccttgatatggacacttctcaaacaaaatccatatgcagacccgaagcacccaggagtgtatgtcctcttctttcgctctctggtgttcagtaacgctctttccatcaaaatctttcttgcacttggatactcacatgagcttgtatcaccaatacttagcatcgggaaggcaatggttgtgtgtcctgtcagcttgaccactaattggaagaaagagttcacaaagtggcttggaagagacggtttggtaagtactcctcgatagacaagtttacagtatctctctatcagatattgtagcaatttttttgcatgttcatcactgatactatctgtaatccatagggtgtgtttgtgggggacggagatagaaaccatatcaagcagttctctaattcgaggaggcatcaggtgttagtgattggatatgaaaaggtacggtgtcttttcacaagtaatcttcctctttccaaactagataactaattcttcttcatcgagtgttgaattactccagcttaggacatgtatacaggatctgaaatcatgtcagcctgctattggattgattgtctgtgatgaaggtaagcccgtgtcttagacttttcacgtcggtatgtaaagacgaagcatagctgaacaatgggatcctctcaaattaataggtcatcgattgaagagtaaggatgccaagacaagcaagatgtttgatgcattgggcacgaagcgtcgtaagggttatctctgtctcttttttctataccgagccttcatttgtttcgaagctgattctgtgcactgccctattcttctcaaaggaattatcctatctggaacacctctgcaaaacgatctgtctgaattctggagcatggtgggtcacccataaatgtttatattttgtgtgcttctccaaatgttaattgttttcatctgcctcacgctctctaggtggacttcgtgaatcccgggattcttgatacacactcgagtttcacaaagatatacgaaaagcccattgtaagttttttcctgaactaatcttaccctctgtcgcgtatgttcaacctctttcgcatgcattattacagataaaatcacgtacgccacagtgctcaaaggtcgacgcagagcttggccaggcgagaggtgctaagctatctgagcttagtagacagttcatccttagacgaacaaacgagatccttacccagttcctaccccccaagcgttagttattcagcctttctaaatattttcatcacagcgtattaactttctcgctattttattgttactttgaatcatgcagatgaatacgttgttttcgtcacaccctcgaaagttcaacttgatatatttgcgaaactacttcaccctcaatctgttcaaagtttcatacggggtcctgcgtgagtatttctttcagacatgttgacgaaattgggaatttgacctttttggttgtttatgctccatatcttctttagccaacaagcgcttcagcttagtgagttttctgccgtctctggttgatagatcttctcattgaccggatctactgttcagtcacacacgctagaaagatttgcaacagtccgatggtgtgtctctatcaacttcatagcttgtaaattagatctgtgcggctcataatgttgaatctttatccagcttttcaaagagaaagattcggtgagactattttatctcttttacgatcatgaatttgatgatgaaacgctgattaaggggtcgcatggttgtagggtgtatcggatgactcgcctgcatctgttaaatccgctcggacgatgattccagatgattgtgtagaccatgatgttaactgcagcggtcagctcctcttctttcctctttagtttctagacaagaagaaacttgctgaatctgcgttgtctgctgttgttctatttgcaggtaaattggttgcggtctctgatcttctgaatcatatttttactcaatctgatgagaaagtagtactagtgtccaacttcacacaggtatgactttccctttgtagaaaaaatcaagttctatcaatctgacaatccctgtaaacctttcaagaccttgaatatcttggaggcgatttgtactttaagaaagtatcgatacgagaggttggatgggtgagacttctgacatttctcttgtttctaagactgttcctaatctgtcgtttctttttatacagatctgttccccaaggtcgaaggcaagagatggtagataagttagtacaagcttgtgctcgtattatagttcatcttgatccgaaccgatctgtattgagcgaatgaccatatgcgcagatttaaccgtggcacgcaagctcaaagcttcattttcttgttgagttctaaaagtggtggcgctggttcgtttccgtcttgatcgcgatgttgctctcgtcttgatctcgtttgtgctgactatcaatgtggacatttcatcggatgtttgtctatattcatcaggactcaacttgattggcgcgtctcgcctaatcatgtttgattgtgattggtatgcaacccccttatcagtaaatcatatgagtcttgttttaagctttgttgttgctatctgtaggaatccgtcaacggatcttcaggctatggctcgagtgcatcgggatggtcagaagcgcaaagtgttcatttatagattcatgactgcaggaagtattgaggtatgtgttccggctcgtgtgttgacacgattcgcagtcgataacttgtactttgattattccaggaaaaaatattccaacgtcaagtcacgtaagccagattcattctatcaagttctgctgtgatccttcggctaacatcacgccgcttccctcttagtaagcttgggttgtcgagctcggtcttggatggagaccaaacatctgatggaaagtctgctaagggagctagcgacagctttactgtcgaagagctccgaaatcttttctcagttcagacaagcactccgtgtcagacacacgatgtaagtctcatcttttgtgggcaaacatctagaattccaattaggttcactgaccctacactaatctcaataccacagcttctcgagtgtgattgtctcttcgagaaagaagaagggacgatgagtctgcaacagtgtttagaccttgaccctgatgaggaatcatctgataatgagaccccttacatatcaaccgccagtaatatcaggcctggaatcgaagaaaagaggagacgtaaagtgagtagactgtctagtggctttttttttgtaatacagctaacaaacatggatcaatattcgtgttcatcaatttataaggctcagaaggaaaaggacgataagctagctgtattgaaggagtggaatcacatagagtgtctcaatcctgtcagcgcagcccttatcgaagacgaaagtcttcgaacgatcattcagacatctcacggaatcaacagttctcgaaccgcgtctactgctctccttgatccaccgtcctcctttcagcccgctgcttcgactctgagcgaggatagctctgaagttgaggattctaacggcggtgatgacgacgaccaacctatccatccgccctcaactcagcgacgcgctcatcagactcaaccttggcctcagtcagacgaggacgaggaagatgtgctgttccaaggtggacattcatctgacgctgaagaagacgaggaggatattccccttatgagaaagcttcagctcacacaatcacatcccaggtattctcagccctggccggatactgacgaagaagatgaatcagagcgcgagagcggtctttccaaagtaagctcaacagagaaggtgaaagggttggacgaggaggtcagcactttggatctggtagaagatccagagagtcctgggccgaatgagacggcggtgaagagatcaaggcgaccggaggacggttggagtggagtggtagatctcgtcaagatggcacgtgaaggccaagggggaaggatctgttttttatttgaaaaggtttcagcagctactctctagatatacagtacaggttctcttgtactttttccccgtcattccacctcgctgtcttgatcttaataatacatctgatgttgtaatttttcgatttcttggttaatatatcatatttgatgttcagtacgatattatcaatcttgcggtgctgacttgaatagaaatcaagaaatggtcacaatcattgatctgccgaaggcgtactttgagccatcccagctgggctcttcttcttgttcgctcgtttcttcttctttttggctccttctgatgtttcagtcgaagaagtcgccgggtaaccctcaatcggatctgctttcccaagcttctgagctaggccttccttcttttgatcctggttgtcatcaacgatggttgattgctcggcttttctctttttcccctttttcgcggctttgacggactgaacttgcatcggggcgggatcctctataagatttgctcgaatgaaacacgaaacaaagaatcctgaaattttaagtgtcaaaaatgaggttgtttttggttaggaacaatcaagaatagttaatatgaatcaactatcactctttatgcgatttgttctgaacgaatacgagcagaacacgggcgcgtttagtaggaaagaaagaaagaaagtagcgaaccatttgttttgtccactccgggttcacatcgaacgacgctttcggccaagtctacacgaccagccatctcttccggtcgtcctcgcctatcccaatcgggaagaaccatactcctaggggcaatcgaccaaccgtgttctttggcttctttcgattctagagcagctaggacgacatgttcatcttcctcgggatgaatggaacatgttgagtagacaagcttcttggcgttaggaactttcataagcaatagaaaatgtgagaaagaagagggtcagagatgatgcattaaagtcgagaaacacaatcaaatgggggttctcacatttcatggcatgctatcgcagtggagtaagagagagaaaattacaattcatagttagctcaagacgacgtgtaaggtttctattgggaggtaaagagattccaatgcaaaatctttcttactctgatcatgtttaattggaacccggctaatttatctaatctctctttcttggttgtatcgttttcttcctcagctgtttggacaaaccgagcaagattcgacatggtaagacaataaccttgagtgtcttctctacaaagcgaaggaagaatgtcaaacgaaccttcttcagtcagaaagtccaaccggttgacgataccacttcccgaacaactcggatccaacaacaaatatttcacatccctccactctgcgccatatggatcagtctccaaaaagtctctccttgttcctccaagttcgacatttgtgcaacccgcccgacctatcatcatttctagcactttgaatcttttaggactcagctcgaaagcatgaactttatcttgtgctttgggggaagatattccggcgagaagactagcatgcgcaagtagagcggaaagatgggaggtcttgttgcctggcgcggcagtggcatcgatgacatgtgacggttgggaggtcagagatggttgaggggcgagcacgtaagcagggaagcaggaagctttgtcttgcagaattagatgctaagtatgaggaaaacatcaattgcatgaatataagcttttgacactaagagtaaaggatgcaatggtttaggtgaaagacgaaaacttactcccgaggtatatctaaatttaatttcaaaatgacaaagagtagagcacagctgtgagtttcagaaactgcacactgtagacagagcatcttagagacttacgatacgtgttgggtcaatatagatgaagccgccagtgcaaacaccagaaggtttgggatatgttcgtccaaatgaaaagattttctattaagatatgaagcaaaaaaaaggtaagatactgatgcatcccagcattaaaatcggctgagaaagtaagagtaagaacgaacgtagggattggatccggaaaaggacctttgtccaagaatgtgaagaagccaccttcctttgtttgtagaaaggcaatcagttcctccggctcgatcaagttggtattaattctggcatatctcgggatctgttctattcttccc

SEQ ID NO: 376 - DNA, 13513 bp, Xanthophyllomyces dendrorhous
accaaggcagataaagaatgcatttgccattttagtgcacagacaatggagagtagtagttatataaacagaaggacgcttctgcaggataaacttcattcatcaagcccgacttacctccgacaccaccaccgatctgaagctccttgttgcttcttacgcctttcttgatcttaagcttgacaagctctgctgcgagtctggtcttgtgttttaaaattgcatccttgatagggccagtggacgattgaatgctacattttgtagatataagaacaaatcagatcagtctctggtacatgaataataaaacggaagtatagagaacaaaagaaagggcataccccggtttggctgcaaagatcaggtcatgaacaagaactagaggcaagttcttggatttcgcatagatgaccttcttgtcgtccttcgttaaagggatcaagctcaacaatgtttgaattgtaggtttgtactttaaagttgagataactaatgccaacagtctttttgagtccttttcaggcctgagaggggcgtgaaaaggaagagagtaatcaagaggatgagtgagaccatcttgaatctcaaaggaggggtcgaaactcacaagttctgcgaggagagagcggccttgatggaagtctgcttgagctcgagctcgtccaactgtggaagtattcatacaacaacaatcaaatcaacccaaattcaattggagaacggacaagttcttgggaatgaaaacctacaaaggaagctgcttggaaatagagattcatggtggctcggttgatggccgaccggttctgtaggttgattttgaaaaccttccataagagacgagcagatagaaagagaagacaacggtaagggttagctcacgtgacatgaactcacgtgacgactgacgcgtttgaggcgatgttgatcgacgcgaccggacgcgacttatttactggagcaagtgaattacccgtagaccatcctgcgtgttcgttaccttcaacatataaatcatagcccatcctctatcgtccacagcatatccgtttctaatcgatctagcttaacaaaacagagaaagaacctctcgtcctggtttgtgtaaaccatcctacttactataatccatcatgatcggaatttctcaatgtctgtccttgtctctgttctttggtattcgttccgagagcttatatacctttggatttgatcatctttcatgggcttacaacctctatccttgaattcagccgtatcaaatatgtttgagcagacgaaaagtcgtctgtcgacgcggttcaatagtccgcctgaccaagtatcaacggaaccgaaggagcctcctcgaggcccggctttcagaaatgcgagtggaggcattgggaatatccagtacaacgaggttggggtgccatggaaggataccgcgcttcatggaatcattgtgagtagacgaagtgaggagagatggcttttccttgtgtcaatccgtatgagtcgtagttctgaatgtcgtaagctgattacttggcgtttcatggtgaccaatcgaccttaatgaactagatcttttgcaccttcgtaggaatgtgctgctttgctgctgtagctggatttcaagcaaaatggagtataggtgtttgtcagtctttttcgattctgttatctcgttcggaattctcctcttacttcctgtcgacgactgtgactctcgacgatgtgctgaggctgtgtgagattctgttctttctcagcgggtctctcggctttcgcgctattcttttcactgtttctcttctttttatctagcttcatgctggccgtacctctggtgtttgacaagtgagcgcatgatcgttgaacgagttcattggatgagccaacattgataaaggagaaactattgtttttttgatacttttctcattttctttcctttgggaaggtttgacaagatgagggcattggcgatgggattggctgtgccgcgggtacagctaattctcagggttaatggagcgttttggacgatcatcctcgctatggctaccacggtgtccggtacgtgtccttctcctcctaaattgaaatggctcgccagttctgagcaaccgtttcacacgcatatatatctacgcgctctctatccagtattctcggagaagggatgcaaagactcgtcaaacgatcctcatgcagacctcggcgatgcatacacggccggtctaacgagttggtgtcgaaccaaacgggccggctcaatctttttctggttgtctcttggtttgtgatcgttcctctgcgtctctgttctttggcaaattcggagtttgacgatgagattcctcttctatgacctgccacgtggatgaattaataaaaagccggctggggaggtctattaggtctggcatttcttgggttgtatgctgctcgaagaaaacatcaaaaagaagccggctttgttcctccctcgagttcgatcgacgaagagcgcgccggattgaacacccgtccagattctctgcacgcgcctactgcaggtcacgacgaggatggcggcatgaatgaagagggcgagggagaagaaagattcgaccagcagcagcagcaacaacagcagcagagagggccggtagaggataggtatcacgctcggtttgatgttgaacctatgaggacacgaccgagcatggatccgtacggtgcgttctcgggaagcgttcctgatggctttcaaggttatgggatggagagctcaagtcaagttgttgtcggtggtggcggcgggagagtttcagttgcgcctccggctgtaaacccttgtgagttcttgtcactttgtcaaaaggccatcaatcaatctgacattcgtcttcgttcttcgatatccacaaatgttctctcggaaagtcgaccaaatccgaacggcgttaacatctccaccacctcgacaactaggattggaacaaacacaacaccaccaccatctacaaccgatgatgtccttcccaatcagtccggtaggtgcccagacgtcgggtccgtcaccgggaccggctccgggtgggtacccaggttatccggcaccgacgccggtgcccgtagctcagagccgcggtcctgtcggcggttactacccgggtcagcctgatttaagttatcagtatgcccaaccaatccagtcgcctccatatacgcctttcccaaaccagcagcagcagccaatgtatggctacccagatccatacggtcgtcagtagaggatgaacgaatagttgttctggtcggatctccttcgaacgcagccgttcgagatgatagatactgctgtctttctttcctttttccttttccccttcactcttcctcatgcatcaaaaggactcttttcttcttaattattcacaatccttggcctcttccctagcttcttatcttgtcatatccttctctccctctctttgcctctgccattcttggtttgtttgacgatgatgaaaccttctatctcctgatttttggttcaaaggacccttgtttgccgcccaaaaagagccaagagaaatagaaacggaggaaaatgtgtaacacaatagaaatcgtcacacgagcgcactcgatgacgtcagatataatcgggtaaattcattttcgttaacgcgccggttcctccgaccgcagagattacatcaacagacgcgtgtgcctttgcggcagaggtacttgtgtgacaattaggacaacctctccgcaaaaatgatctacagaaatctgattttagctgagccccggattgatagcttcgattctttcccttctccgtcccttctctgtccgtcgtcgcctagaactttactttgtcatgcccctcaaaatttatctgatggttccccattgtgatccgcgctgagtgcggggtagttcagcggggaaccatcaagctaaattgggtctcctcccttattgaatcggttccccatccgattttcgttaaagagggcccaacataatcatcgttattcgacttcttcttttccctcccgtcattccctcgtctttcagactttcttcgctcttctcgtcaattcttccctttcacttttgtccctcacttatctttccttgcccctctctggtcgatcatggtcgcagcagcacctggtgtgttccacaaatacaacaggcgagccgtgttttactcgttagtgctccttttctttcttcagtttatcacacatgacctccagatattcatcgtccttcattctcttctgcgcgcacgcatctccacaggctcgtcttcgtcctcggcgccatcctctacggttatgatgggacttactttaccggtatcctcgagatggatgccttcaaacgagactacggaaccctcgtcaatggcgaaatggtcatcaagtcaggcgaccagtccctctacgcctcgatcgtccaggtcggagaggtcgtcggttcgctctccgctggtctcatcggtgacaaaatcggccgaaagggtgcaatgtgagtttgtctgatgttccgaaagacaggtctacatcgactgacaatagcttgcccttgcctttcttacccgcaggtatgtcgctatcttctgggtcctcatcggtgccatccttcaaatcatcgtagtcggctccagacctctcattgtcgtcggacgactcattcttggagtcggtgtgggtattgtttccaactgtactaccctctacctttctgagatctgcccggccgccattcgaggaaccagtacgtctttctggtctcttctctccattgttcagattttaaactaacagagcgcgcaaaatcttcttcagtcgtctcttcgtggcagctctttttggctatcggtcaggtcatcggagctggagtgtcccaaggaacgaaagactattcgtccacgttctcgtacagatttcccattgctttgaacgtcgccatcgtcatcatcatctttgccggcatgttcatcgtccctgaatctccccgatggtgtgtctttctttttcattccttactctcttcttgaccatctggcttataccttgagatttcttccttcttcccgcaggcttatctctaaagaccgaattgaggaagccgagcacgccctcgaccgagtcaacaagagtaacgaaaccgccgataatgcccgagagatcagagtcatgcttgacgccaaagcggccgaggctgctgagtctggaggagaatccagatggggagatctcctcaagggtgcccaaaagaagaagttgttcggagccttcggtatcctcgtctgccagcagatcaacggtgttcagtttgtgttctcttactcgaccgtcttcttcaaacaaattggtgtcggcaacccattcacgatcaccatggtctgcaacgtcgtcgaggtcgtcggagtgctctgctcgttctttatcatcaaccggtttggtcgaaggcctctgctcgtttggtctgctctcgccatggccgtgttgatgattgtgatgggtatccttggcacaatcccgaacccgaccggatctgtgaactccgcgatcgcctcgatgatcatcatcttcgtttgggtcttcaacttggcttggggtggtttggcctggactgtagccaacgagttggcttccggtcgaaaccgaaccaagatcctcgctgtcagtacggctgccttctgggtgagtgcctgggccgtcacgtttacgcttccctacttggcgaacgacgatggtggagctggtctcaacgcaaaggtcggatacatttacggaggaggagccctgatcggagccgcgttcgtgtacttctacatccctgagaccctcggccgatcgctcgaggagattaacctgatgatcgagctcaaagtacccaccctcgcttggccagagtacaagaccacgatcgacggtgtccacaacgagcagtggaaggcagaggataagaacatccagcagggccagcgatttgtcgagaacgccgatgccgagaagggtatggccagacgagattccgacgacgccttcaccgcgcctacaaagttctaaattcagatatagtctcttgcctctcccttctgttttcttaacattttctatttctatagcacctcgagggtattgtgtctcccatgttcccgtttctttcttttcggggttcggttcttctttcatccatagaaattagaaaacgacggtcttccctctttgtatttgtagaaaacgtaccaaacttgaaataaaccatgtttaatagaaaatatcaattccctaataatttggtctcgtagattaatcttcttcctctgcttttctcttgctctttgtatacaggcgcatttggcgatggatatgaagacacgatagtaatcgaacagattttggatatcatgatcctaaatcttctttgagataaagaacactgtgcgagacggtcgagatggcgagtttgtcgagcgttgtaaatctttatccgggagtgctcacatgcacacctcaactgacacgtcgggaaagctgagcttatctatcaagccgtccattgttagcagaagtgatgttgaaagcatgactactgtccatggtgaggttgtcagagcgtatcaaacagtagcgttgtgttcttcagggataggtccgttgaccaagatcatacagcaccggatttttcgggcaggaagaacggagggctaatcatatcactcaggtttgtttatcaacacccaggtagagatcgatgtatgtccccagttccctttgacgtgcgacagaatgaaaaaaacaaaccggcggatgaaccacaaggtccctcgcagaacgaattgggcttgttcgcatcaatcttgttcgaggatgatcgaactatcagaagcaatattcatttatatgtagaaacaaagaaatgcaagaaaccataaggaaagtggatggcacacttgggtacatcaaactcgacgatctctaaatagccgatgctatgtacggatagtggcgagccatgaatgaccactttgcgaaacatgctggtctagtaatcagccagactggatttccagtatgtagagtctcggccattattgccaagtgagctaagttgagtgatctggccgctgatgccaggactgatatcaagaccgatgcttatgctgacgctgaagtagctctatcgacggagacagaccatacccatgacacatgggatctaagtgggtggtggtctggggacactccagtcctgagagatcacatatcgataaccatcggttaggtgactctctatctgccaaggccaaacatgtatatttatagtattgtatctacacgtttcatctgaggtcatattaaaattcgatcagccgaaaaagggtgaactaacgcccaaccacccaactagacatcctaatgtcaagttcctacgagtgagtttgtctgtctagcaagtaaaatgatggcctaatgggaacggccttactgaccgttctgccgtccgctgccatgtctagtgactgctctcctgcagattgggagaactctaagatgggtctccgaatagctggcgtatttatcattctcttcaccagcatgtttggttcgttctagtgatcgtctggctattcagatattcgctctctgacgctactctgtctgattcataccgtaggtgtcctgttacctatcctcctcaggcgaaatccgaggttcgccgtcccaaagagtgaggcatgctttgatattgaaatcgaaaccaagattattcgactggttctatccctatccgctaacgatgtccattcatgttcaaacattgtcatttgctcacgcccataggtgtctttgactttgcaaagtacaccggatcaggtaccttgcttccttccattcagtacattttgcttctcttctatatgtacatgtctgcattctcgccttttctgctcttgttgctgctgactgcgtgttcttctccgacctataggcgtcatcatcgctacggcatttatccatctgttgcctcctgctttctacgcgctcagctctaaatgtctcaaaggcacctggcaaatctacgtgggacttccccctttctaatgcctatctcactctgatactgaccacatgaactcgatcatgtccagccctggcctgcagcgatcgccatgttttctatctttgcgctattcatcgtagaatttttttgcgttcggtgcgtcgactttctcttcccctttgctacccgattgtcacacactcaacataacatccctcctttatcctgtcagaattggtaatgctcgaattcaagcggccagaaatgttgactcggataagtatgcacacacctataacggaacgtgcgcttcccatgaacaagtccctcacgatgtcgaatcagcatcccacgatcaatcttccgttttcccgtatcagtctcctctccctcattcagccatcggacctaaccataacaccttaaccctggaccaagagatcgaattgtcaccatccaaaacatcatacgacccgagtatacctagcctatcagtcaagcagactaatgtcagaatcgatgctggacaagaggaaaatattttagaccgtgaggcgcgggagagagacgcatgggcgcgaatcgtgggtatgctcatcttggagtttggaatcgtatttcattcaatctttatcggtttgatgttggcaacagacagatccttgtatgtttttcatccgttcttctgattctttttgtcttactcacttcaacttgtgctgaacaatccgcccgatcatcgaataaaagtactgtcatattcatgtgagtgtcgctgtctagcctgtgccaatggtaggaacatttctaagcctgcttgtgaacgatcaacaacaacgacagcgtcatcatatttcatcaggctttcgaaggacttggtcttggggcccgactggcatttcttcctctacctgctagaatgaactggataccaattgctatgggtgttttttgtcagtttgatttgccttgcaaattcatctgccaccagtttgtgtttgaactcgtgttgttaacaaaatgcgtaccgtttgttctcattttcgttctgatctgaccaaaacgaacagacgcggccttaacacccatagggatggctattggtcttggcgcgcgatatacctatcagtcaagtgctaacggggcgctgattgctaccggtgtgctagactcaatctcggctggtttgtcgatttaaatcttttcgtttccacctcaacctagtgttctcgagatatttcagatcggtagtctgatcatctctttcccgagcgaaaatactaacctcttcaaattgcttgtcgaacgaaacgtattctatacatctggtatgacatatgaaggaattttgctttggacggtaagtgtgctagcttctctatctggctctcctatgtaaccgcgtttgtatcgttgtatcagatagcttcatgacttaaacccttctttcacccttgttgaataacatctgaactgtgatatggtttcggtgagatcagtcgttggtcgaacttatggcccatgtttgtccttcatctcttgttcatcatctcccagacccgacatccttactgaaacattccatctaacttctcctttcttgacatccttttctgtcacgcgcatcccgtttgcatttcgcggtcaaactatgaaggagttcctactcagcccgaccatgctcaaagagagcttggggagagtgatctatgtattttcgtgtatactttttggtcagtcatttcacttctcaacttcgtagttcttggatacctttttagtacactctttccggctgtagatattgacatgtcgatcaaccttgggttattcgattgattcggccaaaccggaattattacgtgaataggatgtgccttgatggctgtcttaggcaaatgggcatgatctatcaaaacattttgtgccttcgggtaggcgaaagagaagaacatgcctcagggcgttggctgtgctttgttccgacagctgctaggatgataaaatgcagcatcagaccgtcaatcacttcagctgccttctgctgaaaatgttctaacattcgactctgtcttttctcctctcttctttcccttttctttcttcaactttcaccaattctgattaatcgctgcgatagtttcatctcatcttccagcgtcaaactgtgaacttcttcagaagtctatgtgttctacagcatctgggtttagtttctgacacacttggtatctatctgtcgatttagctatcctgtctttctttgtagagaagacatatcgatgaagagacaacatgtcaaagaagaccgcaggttcaaatctaatcacgaggcagaaaaggcgaaaatgagaacaatcataattcaatatgctgattttcaggatccgaagagcctttgcttcatactccggaccgacatatcgtttcggacgagcagaaagaaaagatggatgtatatgagagaacgggagggttgtaggatttcaggcctctatctgattctcaagtagcacaacatcgatctcaattcctggtaggaacaaacaggatggacgaatgaattcacgaggccggcatcatccagaccaggtgttttctataacaagccccggccgtgctcgccatgtgagcggtgagaacccagtgactgagcgtctagatgaacaccgctgggaatagctgcgcggggctcgattgaccaaataatttctatcgagagggtcttaacgtcgtctctgtttctctgtgtatgcaccctttgtctgtcaattactgtcttagagtagtgcgtcgagtgctcactgttgcctctgctcgctctcagacttggcggagcagggaatgtcaatgcgccccgcaacatgctgcaactggtccaagactataacgacaaggggtgggcgaggatgctggtgtctgacactgctaccgctctcgacgctcacgctgaggccgccccatgaaggcgacacactaaacccatgacatatgggatcttggtagtttggaatctgagggcactcaagttcaaaagggctgtacatcgatcatcggcgattgggaatgctcttaccaagcctaagggtttatatattgtgtttgatatccactctccttcagttctaaattcctcgaatgcaacatttcttcttattttgagtagggagagatgcctgacaacagacggaacgtcaagcttgacgtaaggaaataaggaagaacaacctaggaaagaagcgaagatagaataacagccggcaaggactcctcaggccaagatttctacaacgacaccggcacccactgtctccccgcctctcctcaacaggatccttcccatctctttgttgacactgaaaggctcgagcgaaacagtaggctgtcgtcggtctgatgaatgctcattagggcttcgaagcgagatctctactctagctgaagtgttcctcgtcaacactctgcaaagaaaaagaagggctcgcaaaaatgattggcacggtattccaagcgcatgaactgaaaagacagagggaaagagatacgcaagaacgaacctaggcttctctttgatgactttaccggtcgaccgatccaaggtggcgaccagctttgaaaccgaagctggtaaattggccgagtggtggaagagttcgacaagcgtaccagaggtgatcgggtattcgatatcaaatagaataatctgagcaacgaaggacgttacttgaggtaccagctgagcttgtggacaaagcacagacccaattctatgaaacgaaagaggggttcccgccagagttagacagggcgaatccattgcgtataagataagaaagaacaagacgcttacgaaagatggatagggtcaatggacgccaggaagatcgtgacattcgttccagcgacagcccaaggaacgttttcttcatcaacctcgatacctttaccgataaacactcaaaccgcggatgagcttctctctaggttcaacatcgtttctacgatcaaacttacttcgaacgattccactctcatctccaggcaagattctcaatctctccccgacttgaaccacaccgctacacaccctaccggccacacctactccggaagacgtctggcctttgaagacgtttgacaaaggaatccgtaacggagcttccaatgctctcaacggtacttccaaagcatctatatcaaacaagcccaatattggtcattcaaacgattataccatgacacgagagatatgtaacttaccaagccgatcgaccagcgtgggtcctttgtaccagggcatcacctccgctcggtccccaacttcggccaaattaattccctgcatcgcgccgaccgggacaaacgtcgtcttgccaggtaagaacccagattgaacaaggaacggtttcatttgatcttcaatgtcgtcgaatcgatcgaccgaccattccacctaggaccatcacgtgaataatgtctcaatgttttgcacaaggatagataagccccaagaagtgattgagtcaactcacagtgtccaacttgttcaccacaacgatcacgttctggacgcccaaacttcgaaccagaagcgcatgctctctcgtttgtccacccactccaaacccagattcgaactccccggtggaagcgtcgacaacaagcatagcagcatccgcctgagaggctccagagatcatattgggaatgaagtctcggtgaccgggtgcatcgaggagggtgaagtggcggttgggggtggtgaaatggtcctgggcaatgtccattgttacacctctaatagcagacaggcaaaacaagacttgtcagttatttcaatcagcaatcaaaaactcccagattgaaatattgtctggagaggaaaaaaaaccaaccgttcacgctcctcaacagtgccatctaaagcccatgcgtattggaaactactcttgcccatcttttcacttcctcgctcgttggcgatcttttccttctcagaaagaactcccaattcatacaagagtcgacccatcaacgtggatttaccagcatcgacatgtcctgaaggaatagcattcacgtcaggttagttcgatttgattacttggggaaagagatcaagccgcgccgaaagcgacgaaaagaagaagaaagggacaaaccaactacaaccaagctgagcgcccctttcccgtcagcctctttcttcttgacttctcctatgatcgccgttcgttccaacaatgtctttggcagcggcgctggctgggcttcctccttcttcgtgtcctccaggttcattcctgccatatcgtcctccatcgacgtcgtcttgaccgccgaagtagactttatagcgctcggccctttgggttgttttgatttgggagccggggttggagctggagttggggttttaggtttagatttagat

SEQ ID NO: 377 - DNA, 20772 bp, Xanthophyllomyces dendrorhous
tgataaaagcatctttgattgcttttccatattcctggtcatttcatgttcaggctttgaatccgaactacttcctcatattctaagatgtacaagccatcgctgaataattcataaccccctattgtgtcagttaaacaactcaagccctcttgcttgacaccacactagcgaccgctggacctgccgctatcatcgcgcccaattttgttccctttctcttctccaagacaatatcgtccgggctcggcccttcaaaagcgattttaagctccatctgtgcatcttccaaagtgccaccttcgcccgatagatgcatcgaggccatgaatagattgctcgaaaaagatcctcctgcagagcgaggaagcaccgcgcgttctatcttgagaagtgatggtgtttgggggctaacaagaatagaggcgaagggggaagcatcggattggagagcgggcttgaccgaggatggagaggacacagcacgaggggtgaaaagtggatttgttgggggaacaaagattggttgatgtgcaggagaggggtccagaggatgcggctttccattgggttgtggcggcgagataggtgtagcatcgacaacttgagaggtattggaaggaccttttgctaaccgagccgcttgcattttgagttgtaatttggaaagagactttcctgcaggtgaagaagcaggagaactggtggcagaagatgcggcaggagatgtaggtaatgcacctgaggttccggcagctctagatttggctagcatggcaagtttggagagcttttggggcggttgaagaacttcttcgatatgagaagaagcctctctccgagctgggatattactttgccctaagggggacgggacatcggggatagccgttttggaagcagcgttgctcttggcagatgactgacgagacagagaaagacgttgaagtgctgtaagtagaacaggtggttcatccgactgtagagtgggatcttctgtaataatcgaaaattagaacacaatgtcagtttcatgagggaaggcctcatggcatggtcgttctcgtcgtctggaagggccttgaaaaagagggggaaaacccactctgcccttttgagaggtctgtgattgattgcaacagcccgaacctcagacggtttgcatagttgatgaaaataggatatatgccggatggacttgtcgtttgtagaaatgaaatggacctgcccccaggtggacgatagttgtggggagaaagcaacgccactcaccatttttctttttctcagccttggttcgttcctccaggagccagctgatggtcttctctgcatcgaagtaatagtaccagagagaatccttgatttctttatcagagaacccagatgtctcctgaggaccgagggtggagcggacgtgagccaaggcagagtccatttggactgtagagaaagaaattaaaagtaagcagatgaacaagttgtcgagtggaagtcgattggattgaaacgaagagctgaagtatcacatacctctttgatcaaccgtcatatcatctggatcataccaagatcattgaagaaaacgacaagattgaagattagatcgtcatatacgtcacacttgttgatttgatgggcgaaaacttgacaaaccccattcatttccatagtctgatccggaatcttccttcatctcctctgtaggtatgtccgttgtatgagagttagtagctgatacaagccatgagaagacaaaggctgaacatatttcagccagtgagaccttgccaggacgaaccatcgagatcgagatttcgaacgaaacgatgtcgtgacctgtaagcgtttacgggtcagtgttatgagacaagaagcgtgtgttcgaagagaagagcctaaatacattatgctcaagtgattgatcgagagagatgcaatagaacgggtgaatcaattgaagcaaaggctgctgatggtgctaaaatgtatgagagtgtgcgtggaattaggagagtgagaaaaaagaaggatgggcgaaaaaagggacaatctctattatcatccccaaatttgcccaagtcatgtgactcatcggggcaatatttggggtactgatgacgtttgtcgttccttgttctctgttcctaagtatcgagcatgctatgatgtggcgatccgactactgaggggcagaaaggtggtgtggaaggatacatccggtataactccacttgactgggtgtcagagaaagagtggaattcatctatcgttgttgctcgacttgcagttcatcgactggaggacgttccctgcaagagcatatgatactaggcatcggtcaagagttatgagaaacgtggacagtgcgtccccacgaggattctagctgaagaaacccatattcaaagaggaatgaaattgtcccctttcacgtattgagccttctcgagcatggtgtacaagacaagacgatacatatgaatacaagaatgtctccaggtcttaagtatgaggaaacaagtaaaggatgaacgaataccaaacaaaaatattgatgatgcagagtgaaagaaaaggcataaaacaagaagaacaggtagcgatggtcaaacaagctcggagcacatgttcgcattccttacagaacatctcgcttaggttcacatcagtcaaagtttgctcttggacaaacagttggcaactgttgtggtctctctgatcagatagaacaaagcccacgttccactgcgttagaagacagaacaaatgctgacgtcaatcgaatggaagacgacttgatctgttagaaccttccatcctggggtttccacgcgatcgaaatctttttttattactcccgtctgtgctgggcacacagatccgcacgtaggggaagcacaatccggtcgttccattgtctccgcacgatgatgatgctgttgcctgatccatctccatcatccctccacccatcggggtttcgtcaaccttttttttcatctggttttatttggaccttctcgttcgatgtctatataagcaaactattttccatctcggttcaataaactctttcctctttcatactttcacatctaactctcacacacacacatacacccacactttacaccttaacttactatcatgtctagcgttctcgagtctgccaaggaggccattgtaggggctaccggctcccaggaggccgttcgtgatgtccgatctctctcacaatgtactgctcacacaggctaaccttatttcatattctattgtatctgattctctctagaaacagtccaccggcgctttccccggacctgaagcttacggagctgagacccagaagggaagggtcgctggtatccagcgggatatggagcacgttacccctgagcacaccaggctggagggcgccaatggtttggttgactatgtccctgccggtaagctcgtcggcaagaaggccatcgtgactggtggagactgtgagtgtctttcttctcactcccatctctgctccgagattgttaggagattttaaaaactcatcgctctcaaactgtaatctctctcagccggtatcggtcgatcggtcgccgagatgtacgctctcgagggggctgatgtggcaatcgtgtaccttcctgaggagcaggctgatgctgatgacgtcaaggccaaggttcaggccgctggacggtgagtgaaagtcgatcgtttgagtatttcgctgttccatcgtccaagtcaactcatcattcttttctacgctcacagacagttcatcggtatccctactgaccagcgatccaaggccaactgccagcagatcgtcgacactgtcgtgaaggcttggggtcagattgacattctcgtgttgaacgccagtgtgatgtacgctgtcccggagatcaaggatatcactgaggagcagtttgaccgaactttgaaaaccaacttgtacggaaccttcttcctctcccaggccgctatcccccacatgcccaagggatcgtccatcatcatcaccacttcgcagtgcgccttccacgcacctcctatgttgctcgactactcgatcaccaaggccggacaggtcggactcatcaaggcgctcgctcagcagacccttagcaagggcattcgggtcaacggtgttgctcctggaccggtctggactccccttcagccggcggccatggacaaagaccagatggctgagtggcaccagagcccagcccctattggccggtgagtcttgaaatggtgctagaaaggtcgtctaaactatcaactgatcaatcctccctttatgccctgatcccttctacagagttggacaaccttccgagcttggtggagcctacgtcttccttgcttccaaggaggcttccttcatctctggagagaccatcaacgtcaacggaggaaccgtcatctaaacggacggtccaagagttgtgttgttatcaggatttttgaacgtcattctgtagcaactagtagtgtttattatcatatgtatgatttgtctagtcaatccaagacgatgttctcgggtgcgtctgatctttctttggcgggtccagctggggccccggacagacgtcatgctttcggccaataaaaagactaaagttgtagtttggccgtttctacaagcggatgaactgcgcgtcttccgatcggtttttgccgaaatccactttatgcttgttttttcggatactcgatttccgccggactttacagagttctctccttccggttgaaaccgctttgacccacagagtgttctttgggttttcgacgtttcttgagcccacaaaccatcattaaatttccgactgaccgacaaaggaaacagccgtttgtcttggcttagctattgtttctccgccggttgcgaccacaccgagttcatgttgtctcggtgctgcagaactcctcaattgatattttgtgtcgaaggcagtcttgatataaaaagtagacgtaggtcatgatacgctcgatatccttgctggttctcttcttcacaaggcctcaacttatatcttgtgttccattcacaaccacacagtccctcaaacttcttcacttgttcatcccatcgtcttggatctttgttctatatctgtagagagctatactcacaatgtcagacatcaaaaaagttgaatacgaaatcgaatttgacgagaaccagccggaggacacaaccgggaagaatgtcgctggtgtgatcgaggacttccccgaccgagctcggctggagaagaaattgtttgtccaaagactttcttgatctcttgaacctgtcactgtcgctgtcatgacacatgtctcaacttgagctgatgacttctttgccttgtctggtgcaggttaaggaaagttgatatgaggatgagcatcctgattgttatctacattctgaactacatcgatcgaaacagtcagtttctcatctttcccctctggtcctctcattctgcgcgctgaatgttctgtcctttcctctttgcatatgaccagacttatcggccgctcgaacaaaaggactcgaggcagacttaggcctgaaaggacaggagtatcccacattactctctatcctctacgtcggatacatcttagtgagtgatcgtttaccggttctgtactatcttaaaccatgtgcgcgctcagttcctttgatcacaagctaaccttcgtcctctttgatggactgtgcttcacagatgcaaatcccctcaaacatgtttgttcaggctacaggtcgaccgtcctatttcttgcctacctgtattgctgttagtatcgagcacagactgagtaacgcttgcctcatgaaccaacacagttgacgctttcattttcttcccttctctcattgtctgaatcgttagctctggggaactatctcaatattgaccggtatcacccataactttatcggagcgctcctcactcgattcttccttggtttcgtcgaaggtatgtattactttctctctgccctcaacagactttcgcatacttttgttctaataaagttccatctcttttctcttattcagccgccttcttcccgggtgctatctttatgctttctaagtggtataagaagagcgagcttggagtcagaaccgcaatcttgtactgtggtagtttgatcagtaacgctctaggacctctcatggctgctggtaagtcctgaaatccaccttttctcatcgtttctgtctcaattgttgagatgtttgctaatttattcatcactgttcctctgtcatgcaggtattttgtcgggaatggagggaaagcttggacacaaaggttgggtctggttgttcttcatcgaaggcgccttgactgttttcgtcgctgtcatcgctttctttattcttcctgatttcccgttcgtcctagtcctgcctgcgccttgcttcagcaacctctagatcagtttactgacacctttcattatcctgcctatcggcttacagtcataactctcgcggatttaccgaggaagagcgggcgttggctcagcttcgaatgaaggaagattccggtcgaccggatggagaaggaggatcatccatcgagggactcaaactcgctttcacggattataaagtctgggttatggcgtgagtgttctctctctttctctcttcctcagacacttttaaacattttctgtattgaacctcgcttccttctgcctttggttcactgttcagtctctcccttacggccatggtagttggactcagtttcaaccaattcttcccctctttgacccagactttgggttacaactccaccatctctctcctcctttgcgctccacccttcttcttcaccaccatctgcgctttctttgtcgcccggcattcggataaacttcaggagagatatctccacatcgttattcctctcttgttgggagtggtcgggttcgtgatagcgatggccacagagaacacggccgcccgatacgtttcaatgtacgttttgattcttcacagtactggtcacttcacgagatccctctcatgctcaccgtcttgtgttgtgttacgatcatgttgagaacaggttcctgatggcacagtcgtactctggctttgtcgtcttctacgcttggatttctgcctcgttccccaaccctccgatgaaacgagctatcgctatcgttcgtcctcttccccattgacccttatccttgtccttgtagttgcatgccaatactgagatccttgagatccaaaccccaaaaacaaaatacaacacaggctttgataaatgcgttctcccaacttggaaacatctcgggagcttatatctatccttcagcctgggggaaatcatatcttaagtcattcggaatctccattgcctgtgcgtttttcatttcctcttcctctctagcttgtacctattcttctcttccgtactgactttggtaaatcctctttctgtcgttgacgaatatccaaacgaattaggcttcggagcatgtatcttcggtcttacgttccacagatacacacttcacaaactcaaccagcggatcgaagcgaacgaggcgattgcggaagaggacaggccggcaggtcaggtgatccctcatgaaatcgatgttcccagaggattcagatacatcttgtagttctgagcgtctttctttcgtctcttgctgtctctttttttgcttatatgtaagggtcttgatctcgttcattccatatagttgtgctttcaggtcagactgggcttccttgtaattgtcttttccttcttttttttcgttgactcagtaacacgtgtcaacgggttgtataccatgactacagatatagaggactgatagggcaaataggcaagcaggtgccggagcagatgatccgaggcgtgtggtcgtgaagacaaacgatagagaagaccttgaacgaaacaacgcatacgacaaccgagcaagaacatatcacaacgagaacgaacaaggaggcggagcgaaagaaagcgcatataaccggacagaacatgacaaactgaatagtaatgacgtaaaagcccaaagaaccaaagaaccaagatgaaaaaaatatgaagagaaaaaaaaacgaaacaagatgagatagatatagagaaattatgggttcagaaggccggaggaacagctgatattgttttgttgtgcttcgttaatcttgtgattactatctaagagatctgtttttcagtcggctctgttgtcgccgctgacacatcggccttctcaggttgctctacccgctctggcccactttcttctttctccttgattcccagcgccagaccaagataccgatcgtcctccttttcctgtccttttttcaaatcccaatctccggaacctccaaattctgcaaagataggtgatgttgcctgtaccgcagcaagagctgccaaggacggtggtctgacgaacccaagagtgtgaaccgggggagatgggaaaccgacgaaggaagaagcgagatcgtggtcgtccgacactgtcgagtcgttgagtgaggatgatctagatcggtcggccatcaggtctttcggctcaccctgaggtggcgtgagaatgaaccctggcgcatggttttcagtcatgaggaccggtggactccaagtcggtcgttcagacagcttattggtctttttgtctgcaaatctttccttttgtccttccttctctgcgtttctgtcgttatcgatggctgtctgtgggttatccgtctcgagtttcgtgatcaacaaccgacctcttctcctctctgccttccaatccctcatcctcttgatctccccatctctatcagccttccaagatacgtccggtcgattccataacgtgctcggcaagataggttcttctgtggaaagcgcaccggcgtaggccatcgcgactgttataggcgcatgtcctctagtggttgacattcgatgggtataatgaacttccagatttggtccgacaaccatctcgccgccaagttgattcatatgaccagggttgagagtaatccctttgataccttgttttccttgttgagtgaagccatagacaagagagtgctgggttagaacttttacgtctctgctttcgtatcgaatgggaatctagacaagtggtgaaattaagaaggagagacagacgaaccaatgtttctcatgaccgaaagggttcccgtgaaggtagtatgttgtacgtctgatcaaagcacgagggaaatgaagaaatcagcctctttcaacgagcaaggttgatccgataggcaaaattcaagatacatacattctcccttatcttcttcaggtcccccatccgcggtttgtctggtcatgcctaatgctcgataaagcctatttcggaaggagaaagatgagagatgatttccatcagaacttgaactagtcgctcatccgagcggtacacgattcgagcagaagaacgaactctaaagagggatccgtgaataactggaatggtgatttgaagactttcttctgataaccatggatcacagtgtgcttcccgtttcctatgattatcactttatggaaaggatatggaagaatatgtaagaaagacaataagacaggctgttgaagaatatagagacatacatttggcacctgctcgttgaatggcctgtggatcaacctcacgaacaatgtgatacataaagtctgtaacgatgtattcatcaaacggacagttctattcagtttactttcagcaaaaagacagaaatggtccgattaccttgacaaagtggacagaaccaatgctgagcgtttgagcgcatcgaattgaacaaagcaggtaagtgatctaggggataagaggagagaagggaatgagattctcctgatgccttacccggatgaaagcgacgatagttctttggtcctgaatcagatctccgaaagaatgtgagattccatctccatcgacgacttcgcatgaaacggctgtattgaagcgcgtaaagttttacaattatggtctgtatgagaatgcttgctgatatccaaatacaggaggatgaaaagagtacgaacctttgaacatgtcttgtttcgttggcggtcgatccatatcgaacatctcttcttctaacctcttccgctcctttctctcctgctttgtctctttcctctttttctgtttcttcatcgacccggtcgaactctttctactccaacctttgcgtagccccaagccctctccgagcttccactcactcagaggctgaccctcagatctctctaagccaaactgtatatcctctggagcgtcgcaaagagaatagccattgaccgaacgacagctggaccccaactcgcctgggctcatcagatcccgacggactcgaaccggggaccaatcagggcttgaacttctgctcttgatagactcgctgatcgagtcttctactgaagaaagcagggaagaaacctccagacgccgggtcactgtcgatggagtagacgcctgagaagtctgtgcctcgaccgtgtcctgatcgccgttgtgagattgaggggataacggcaatggagaagacggtgtgacaggagctgttgaagatctgttttttggttgaggaaaatcatccggcctgacaggcacagtcgacgatctcttcttctttttactcttcttgtttgttatatgtctgggattggtgtcaggaaaaggaatcgatttagaggccgtgttcggattattagacgagaacctagctctgggctttgcggccttgcctcttgccgataatccgccttccgaacggaacttttgccctctaacagatttgtatttgttcgatttagacacgaagaagtaggagggcactctggaagcgagctctcgggcaaggatctcttcagcagagaccgatgtcagacgttcaggcacaaaaggaggactagagggaggtagaggggcaggtttacgcggtggtttgaaacgggcggttggcagaaagttagcaggcgtgatgggaggggatggatcggctgaattgggtacggacgcgtaaaggtcgtgcgtccgacggacataggcaaacgatttatgaaaagagtttggacctgctatttcggtcgatcggccagaggaggataaagtgattgggacaggtctctcgaggactgatataggcaacgggaccggtcgacccagtttcggcggcgagttgagagagaacgttgtcgaagggaggatgagggatatatctggttgcagattaaatgccattggtttccctatcggactggccgtctctaagttgtctccgtttgtcaacggaagctgggatagtctggaaagaggcgacacagactctggcgagtagggacgcgtcgtgagatcatctcgacgaccgaaagaagaatttatgtctattgagggaacagacggcaggagttgttgttgttgttgttgttgttcttgttgttctacagatttcgtctttatcgagatcggacttgcgtcagcttgttcggctagaagaaggctctcgagtgatctggatacggtaggaggtagctttcgaacgccttgggtagaaatctttcgaggagaacggatgtcctttggggaatctgacgctgatgactgtccaaccggacgacctgtttgaacgggttcggcagatgaaggactaaagggaagaacgagtgacttttgcctatcaaacgcaaccgctttggatatcgaaggcaagagagagtccgagtggacctgactggctgttccgaacgcaaagttgaactttgactgaggcggcggagcagacatggccttgaagataccagctgtgtggaaccttttcggacaaaactcgagatgcacagattccctctcgaaggacgagataggaagcgaacgaaggatgtgaacgtcggggatgtatcggtggttaaagaaattggggaaacaaagaggagcgatcgagacggaaagggggtgaggggtaagtgagagttcaaaaaggcacaggcacacaaaagaagaatgaaagtgacgatcagtccggaaatggccatagtaccttgctgcgctctctatcaacagacctgcaaacaactttgctagtgtcagtgacatcacccggtctctatagactccaaggtgtgcccgtctttcattctctcgagcccgacttttcgccgtggaaccagcgaatgaatttctccgaaacagattcgaatgtatatttgaatgtctccttggcccgcattctactcctatttctaacccctgattgtcggagcagactccgacgatttcatccaaacggctatctgcccttgatcttttttgagcctatgaatcgtccgctctaccgaatcccgcgttacttctgatggtcctataggcaggcactggagaagattggataaccattaaaagataaaagaattaacaaaagttatctaatcaacgccgagatgatggttattattacaaaacttacttctacgagtacacacatcctgttctctttcgcaaacctccgttcgatttctacgctcagacagcctctcccatctttcctctcactttcgtccctatgttcagctgactccgcgttcacactcatctatacactcatcgcccatgccctcgaaaacatttctagtggacctcgtgaccttgttgaaaacacagaatatttcttagtcccggacactcgacccaactaactccataccggaccggatggagcaaacggtccggacacctaggaatttcacaggctgagaatcaaaaaaggaagggagaatactcatctgtgtgtcatcgtatccaaattttctctctccctttcttcctctccctatgttggtctctctcctatttatagaatctcttttctcaaagatcaagagctacctttgaagatgggtcgtataagaagagaccatatctgtcggtctttccttccacatcactcacttctgttgtccatactttgatctcctgctctgttcgaaacacatcatgacacatccggccgtctactcttccatcctctccattgtactggttgccatatcaggcactcagtccaccatcgcttcggccatccccgatagttctctcttcagcccatcttcctcatccctacaggccagaaactacaacgagaccaatccaatcagtcaatcttatgactggctcactctccagtacttacagtatggagcccaaacagagggtttgatgtcatgtggtacgttttatatctccaactcaaataaaccgacgctcatcttcttcatttgcctcctctacctcctgtccaactttcgccaccaatcatactagttgttccacactctggtggtgaaaaagatgacacgccgaacttgatgggtactgttgcaagctgtggaatacaggatgtcgagatcgtattcgccaagaacgtgacgtacaacatttattcgccctttcagctggccaatctctcgaacgtgaagatctcgattgaaggaaacctgcagttctgtatgttctatccctgttgcgagcgatgtgtcaattcgtccttgacatccagaaggcactcgtcgttgaactcgtttctcctgcgccatcgttctcacagcggaaaaccgaacgctcatccagtctcaagtcgcaaacatcacggctagtactgtatgtccttgcgtcacctctcaatccgaacaccacgttcgaaaatctcctctttctaacctccgactttctctgccgcgcctgtcttcactcttcatatatagaaatacgggaaggcttacatgcagttttccggcgagaacgtgacgatcgctggatcaaaagactctggttctggctggcttgattgtcacggtcaacaggtaagactgcttttcttctctcgttctctttcttcactcagacgcaaacagttccttgtggttagatccgtgttgatgactgatctgtgtacctcttacaaatcagtggtgggatattgaatccgtcaactacacaaactcagctttatctgccaacagaccgcagacgatgacattcgatgtcaaaagtggtgcgcttctggatttaaagatttacaacaacatcgcttggaacgtgaaactgctgggttcccaaaactatgtggttagtggtataagctctcagatgcctaatctcattcgactattctctgcgctgactcctatgtcttatttgcttctcaaatgatgccttgttacttttaatagaacaacacctttacatatgcagtctccaatagtacagggtaagcccaaggcacattttctcagttttctctcgttcttgaaagaaatctcatcacgctcataacgtctcttcaggtatcctttcaataccgatggattcaacatcggtgccgaggatgtcttaatcgagaacagtgtcgtatatggtggcgatgatgtcagtcatatctcttcctttaaatgtccgccttcgttcattcaggctgatgattgaatactgtatgaaacgcgtagtgtgtggctattgcatcaggttcctccaacatcgtcttccgagagtatgtctttctctattcgtactgtttgcgaccgaacttgaaccccttgtttatgcgcttatctcttctattccctttccttacagcgcattctgccgaggtactcatggactctcgattggctctctgggaagtggaggtgcggtgtctaccgtagatggtgtcctcatcaaagacgtcaagattgaaaagagcgcgtacggcgctcgattcaagagttgggtcggaggaagaggttacgccaagaacatcacttgggaaaacatcgaagccagacaagtcattcaaccgatcttcatcacaacttcttattacgatcaacaggtcggtccgccgactgatcctggaaactcatccaccgaaattatcgactttaccttcaagaacttctggggagatatcgacagtttcgctccgaagttgagtgatgcgacttgcgtgactgatccatgttggaactatgtcgaaggtgccgatggttcccaagtggtcattctggatcttgacaagtacaaactcgtctctggtctaacgttcgagaacgtcggcaactttgtcgcaaccaaccggaagacgacctctgtaatctgtgatccatcccaactgaattcgaccgtcgtggacggtcttggaatcgtttgtcaggatggaccgctcgagtcgacttgagctaggttcgtcttaggaggaaccgcatgtaatgccagaagcgaagtgttgtattaattcattgtagtactgtttgttcttgagttgttggtcttcttcgcgtttgtcttgtacgcatcgccctggacattctgtgtatttctggtattctgtcagcggctatacatgatgatggttggagtgaacaagaaaccgaaaccctaaaagtaatccgcccctactattccttgaccttcgagactcgttagtctcatccgagcattcttgtctgttcccaatgtccgacatcatgttctctcacagctatacctgtcctgccatatttatcaactaaaaccttttatttctgtcttcatagctcatctctttgactgaatctgctctgaatattccgtgatagagaagaatcgtgcacggatagcctgaacatttggttcctcctcagctctcttcagattcgtctcatccttttccttctcttttccagactctgtcgttattcgggaatagacatctcccatcagaaagctttccaaacacaatcatgttttcttccttgttttcttcgtgtatgtcctcgtcttcttcctcgcccagcgcgcctattcagagagatcccttcggaaagacccggccactgctttctccacccgactgtgtcaccgatcgttcgcctcccgatgccgatatccgtgtgaaagggtgtgtgttttgtgagctggataagaatgtgccagcctcgtcagttatctatcaggatgaatcgttcgttgtcttcaaagatagaagtcagggtgcgaaacaacatctactgtgtataccaagagcacatggttcgtctttcctctcttcttctctttctccctctcatcctcgatatcagtgatctagttcattcgctcactacgggagagtcaaacatgtgttccaccagtggcgaagagtgtgaaatctttatcaagccgggatatacccatgcgtaagtcgatctcattcgtagactcgagagctttctgggaatatacgctaatgcgaacagcgttcatgtcagaactgtagtccagaccatggctgccctgtctttagatgcccttggccgatcgacatccatctcctctctcggacagacgaaactaggattccatatccctcctttcacgagtgtcgaccatctgcatttacatgctttcgagcttcctcacaaacgactggcgaacgttgagttcaagtcaacttggttgagtaaacccaagctgggtaaaggctggggttggtttgttgatatagatcaggtcagctccggtctctcttttctttttcttctcttctcttctctattttgccaacgcgatgtgtttagtccatcgcttccctaattttaggaggtcagaatcaactttttaaggacttgactgacgatcgtgcgcctcctttgaatctttgaaatacattttgtatagacgatcgatatcttgaagagcgggcagaatgtaaaaattaaaccggttcacgttggacaaaactgaggtcaataacggctccctttcattgttgtatatagaggtgtttgtgatgctattagagggggcagtatctagctcccagacccttgtttctctctctctctctcccttcctttaatttttacttgtacgtgaaaatgaattgatactataatgacttccgattacaaaggcatgaaccaggatctgacaaacaaggcgacagatgactaatagacagaggaacaaactaaaaagaacgaacgacagataaacactacagcgtaaagaacactccagtcgtacggaacaccagacggaaccagaaaaagggatgagaagtaaaaagaaaagaaaagacttttctttacttggagatcgcgccaacgacctgatcggtcacaactttttcaaccacgtcctttccaattacctctgccgcgcgcttggcaagactgatagtcttttccgcgctaggtagcgcttcttggacatccttcatcgcttggaccgacttcgctcggatttgatctgtactagggacagagatgttggcggcggcagcggccgttggcttaaacgccttggagaacaaaagaaggaggaggaaagtgtacgactcgaactgatctttaagcatgaagaggatccctgcgaacagtcgcaacagattaagaagaataaagtatgcccaagaaggacaagtcagcatcttgaattcctctacatgcactacgaatagaacgaaactaaccttgcgaaagaacggccttaagaatctgggcactcataccctggtaccatcccgtgaagccctgtgagaaagaacctgtatgtcagtatatgaagtataataacaagaacctaagagagtttttaattatcgaagctgaccttcttgaggtaaacctgcctcaaaacattcacagcatccccgtacttttccttttctgccaaattcttttgctcctcttctcctgtgactagctcagtcgatgatgtcttgacgacttgagcgtatgagacaggtccggcgggagattcattggtcggtctttcgatggaagcaacctccgagggtcgaggagcgagagaggagctataatcgacagaagttgaactaggaacaggaacttgttctgatgaggtggttcgagcttggagtcggactttggccatgatctgaacaaatttaagagtagcatagaatatgggcaacaatcaatacgccgggcccaatactcggtcaatcgaataaatttgacgactcacgtagggataggtaacctattgcaagcattccaatgaagaaatgtacaaggcttaacgacctgatccatttgaaggaacattaaatcttgacgcaaaaaatgatacgtacaacggtggccagactcttggaagtggctcctaccaaaaaggccatacccggagaaagcttttcttttccagtggatctcagagcggttcccttgatcctgtatatcgttgagcgtatggcctatcgttagcaaacttcaattagaaagggactatcagcagaagaaacatcgaggagaatcaacgtacctttcgaaggctccgtaggtgatagccggattgatagtcagaaccaatccaggcttgagtcctcgccaaagtccggtgattccgtcttctctaatgacctctcttccaacttctaggaagccggtcttgtccgctgatccagagagctgttgtctggtggcaattacggccacagggatggtgaaaacttgggcgaacgcgccggcaacggctccaaggaatagttctgccgcggttgaaagtgttggaggaactatggaaccggatttacgagcgagacgcttgaaatagagagatcggaccagagagtagaagaagaagtaggcatactctgttggcaaagaaacggtctgatcgtcagttcttagtctcgtttttgaattgataacgaggtgcattcatacgcatagagaatgtgttcaacatattggcgagaaacccctgaaccccggtcatgcgaaaatacacaagtcgtcagcctaatatcctacagaaaaaacatgatccttctgtgacatcgcttaccttgtagtaaccagcaattccctcttccttgagaaccctgactagaccggtgatcacatcatccgccttcttggatgtaacggcaatcgaactgctaacctcgccatctgtcgacttttcagaatgcgcgttctcgatagctcgtggttcatcttccgatccagccgcctggatccgagttttaatctgagcatatgaaaagaaacgaaatcagaatctctcatatgaactagaccgtaaggatatagccgaaaggagcacgaacggtgtcgagaggatagatggatctaggattcggttgtggccgtaaagtgcgtgatgaaggaaaggaagaaagacaggccgccgctcagcttttctcatcaaaccgactgaaatctgatgaacgatcagctcacgcgttagcaaagacagctccaagtgcacctgccaaagcgtgcctacgatggattcgattcacccgatgcgatcgaattagatcagccaagcgagaagtagtactaagtgatggttctgtccatagatagaactgagagatagtcccatggaacgatagactcacccccaaggtgaaagttctctggcttgtttagatacagacatgtaaaccttctgtttttcgaaagcaaaagggaaaggcaacagggaaacgatattggtggttgagaaagaagttgcaacccggtcaagagaacggaacgttgggcgactaccggcaagagttaatagccgaaagatgattagggttacgattacgtcagctttcgattacgttagatatcgacctgattacgtcagtcgctgattacgtcttccgttcgactacaaacccttcagcttcttcgaagggccagggtatgggaacgccctgtgaattgattaagcgggcggaatgaatagccatgaccaaggtttccctaaccaggctaggcccctgaccaacgacaagcccgatcgagtgtttcatcatgcttcctgtatgctcccattgttcttctagatttgtttcatagagcctttgcaggtatatttttctcccatgcacattgtctcgctgttttctctctgcttcgtgttagagaatcgatgctgtctagaggtttaccaaccaaaaataaacaccaaatgttaaaatgatagacaaaatgacatacatgggcaagacggagtatatcgccgagggaagaccattggggacctcgctgaccaagctgttacatctcggatgcgaacaatctagagatgactcgctgggatcttggacacttgggccaattgatggcgatcgggcacgggctcttctccggaatcggaccaatttgctcgaatcttgcatgcccgagtgatcgaccggcagctatttgactattactcgagtaatgcggaggtgattgaccttatcagaagtatgggttctcatacagcatggccgaccttggttaccaatcattgaggtggtgggaatctcacaggaactcaccgggcatcgagccttcaacgctcggtcagccaactatccagctagccatctggccaattgttcctctcctcgttgtatataaatcaagcattgggcaagatgaaagactcaacatcatctgctcttctcacacttacaccaggtcaacttcactcatcagcgtactcaagctcttatcatgtcgtctttcgacaatcaaactcacagttcaagccctgctaatttgatgccagcgcaggacacgcattcaccagacccctctctaagcggcacgatgatcggtgttgaggcaccgaagaagacagggttgcttcaagaaaagcccgcagatcagccaagggttctacctgaaagcccgataaagatttctcagctgaagaaatggtcactcctcgccctctt

SEQ ID NO: 378 - DNA, 5096 bp, Xanthophyllomyces dendrorhous
gatccactttgggttttcgttttgttttactctgttttcattccgatcctcttccttcgggtgttttcttctttccgaccaaccaaagaccataattgaatcagcggaacacggttctcgaataccgaacgagatgagacagaacagataccacggtgaatggtgatatatatcaagacatattaagcgaacgaaggaaagaggaatttaaaaagaaaacaaggttcgaaaaggtagactgtgtataccgaaacaaagacgacaagagggtcaagagtaagaataagaataagaataagaaaacgagtaagagagtcgaaaggagtggaagatgaaaaaaggactacatcatatcaacacacagaacagaaaagagaaaaaaagaaaaagaaaacatatttcgatatttaaagaaaaagggaagaacggaataagttcaaaaaagaatcacccaacagctataagatcgatcgactgatcggttgaaagtttcgtctctagattcaagatacccgacgtagaacatcgaacaatcaacgcgttcatctccccggagttctcccacttttaaagggcgtcgtcgccgttcccgtccctcgcctcggtgtaggcggaggaggcacacctgactttctccctttcccttgcacactctcctgtacaatcgcttctgataaaccctctatgcttgctcctacgcctgctccaacggctgacgtcaacccaagattcgggccggaggtcgcgttggacacggtggatgaggttgcgagggagagagctggattaagagaaacaggaccggttgtaggtggtggcggtaacttgttcaacgtgtctaccaaccgagcggtctcctctgttatactcggtttatctttcgaagccaatacccgtaagaatgatcgaggcgaggtcgacgcgactggtgatattgatgtggaagtgagaggctgattcgttaatgatgaggaaagtgaagtggaggtaacggtagtagaagggccaggaaggacggtctgagggagagaaagtgaaggaggaatagctggtgtggttcgagaacgaagagtttgtgtaagtgaagtgaagatttgatcggtcaaccgggtggtctcggtcgataggtgagctgccgtctgggtgatttgattcataaagtcaacctgatttttttcacatgaacagacaagaggatatcacaaatagaagtttatgagcacaactccatagatttccccagcgtggatggaggaaaagaggactgccacaaagaaaaggcgataacaagggcgatacctgatattctaaatcctccggcccgtcgatttcgacttctctctccaaaacctcccgaacgtattctgcgatttcggcattactcgtgtcaagactactgagatcgacagctgagcttgttgatttggtagctagagcttcacatgtttttgtttgaagggcgtttgccagcttgacggctgctgaccagagagcttcttctgttttccctctagtcaggagcaaggcgatgaggaagaagagaaaaaaccccgaaaagaaatgtattgaatacaaacgagtccgataaagcaaagaaaagctagaggttcgacatactttttgatgaatgcctcaccctcttgttcagcctttcggttcaagacattcccaggatgaggtcgggtcggttttgagagtagattcattggctaaagagaaatgaagatgagattgaaccgcgtcagttgatgctttcgctaagaatagctagaaagtgacacagggggagaaaagcaaagaaagaaataaacctgtgaactagacccctgagggttcgtatccaatttcgcacccatcaaagcctttaaaagcgcgtctaccacttgccccgcgatctcatcaccttgagggtttctaccgtcttctttccctttccctttccctttccccttcaacgtggttccaagtgcggaagcggtggtaagactgtcggctgtgaggcccatagcagctgattctcgatgacctaaaaagacaaggaggtgtctcattcgaatggcttctgggaactctccatcaatatgtttgtgaaacgcggatgtagggatcgagtggtgcggtgcagctttggagatagggaaacaagggttgacagagtaagaaacgcgtctcatgaaaaggaaagaaaatctgaactcactaggttctcctttcccaaaactcgcacttgctctctgacctctctttccaaacgagcttttccgactgacattccgcctcatttcctgatttcgtttgatcatcggtgtatcacttatctgaagtggcacggtcgtgtctccagtgacgtcctcgtaggtttcgttactattagatcgttgaggaggtagagaaggtaatgaatagtttgccgattttgagctattggtcgcgtgaagattctgtcgagttgatttggaagctgaggatgtattggtggaagtggacggtttaggtttggatgacgaggggaccgggggcggcttgatgttgaggaaagagagacctttgggcagttttgccttctgcatagatatttgtaagcaggttgaaaggaaagtatcgaggaaagagtcagtcgtcagttttgacatccatgcctgtatgtaaagcgacacaaaaacaagagcccatacgaacccctacgaccttgcttctctttgttctctcgtctgcaacctggtccaccagaacatctgacgtgtttgacgcgatctcgtccccagttccctgccttgaccctggatttatactactgtcatctgagaccacgcgccttcgtttaatatctaatctgtcgaatctagggggagaggccatggttcgggagaactgacgcggtgaaagaggaggggggaaggcattcgaggacgaagaaacgggaggaggcattgggtcttgggcaattggtatcggattgactagagtggttgcgtggcatcagacatggatgggttagatgagtgtcgtatgatagacgtgaaattgaatacaatcgaacaacagccccggagatggttgtagagaaggaaaagacaggaaagaatgagagagaagcacgaaagcaagacgcgtcgaaggaagggggacgtacgcttagacgccttctttggtttcaaaatcggtggtatcgactcgacatggttcatgaacgatatatcgtgtgattgagaatgaagcgcttcgataggaagctgaagaaagagtgtgaatatacgaggtttatccgtcagttggtttccgaacgagacgagctatgaagaagagttaaaacatgagaggatctgccaaagcaaggcaaataaaaacccagaccaacactcacttcctggctagcgatccttctcttgtttctagcagcaataccaaacacttcttcttctgttgcatccaaccctgggagtccgagaccgacagaggaagcggaagcttgggaagcacctgctatcggacgcgacgaggctgaagaggaagacgcgatgggaggagccaaggacggaagcggatgactgcccggtgagttctctacggacgaatctgaaccgttcgatggtctgtatgatgttggtcttctggctgccatcatctgggactctcacaagctgtggacgatgctggaacgagtaccaagcagagggagtgtgccaaacttgatgggatggccgttctgggttgaaggaggcaagagaacgataagaaggcgggctacaacaagggaggctgtaaccatacatgtaaccgccttcgtaaccatggtcattccgcaagggaacaccctctctttccatccttggtttgtgtgtttggtcaggtatactgatatgtttgcgcgtacacgatgaagaggaaggagtggctcagtgagcgggtgggtgcatggcaactggtgcttgggagtaagtgcatgtgagggaagaatgttgaagagaaatgaaactttacgactcctcataagctcacacacacatacacacacatatacagcagtactcttataaagtccttccagaagacgttgttcccatgctggtcttcatttgttgcgctgtgtgcgttttcaaggaaagcatgggagatactatcaagagtcattcatacagattcgtggagagaagacactccattgagatgcttgattgaccagagcgagtgtagatataaaagaaagactgcctccgacatctgacgggtagagaaacgagtgagcaatcagaccatcagctcatattccacttggccatccgtactggcgctctcatacacccttctacgttcgctacagaacatgctgagctccggacatggcaaaccatccagcctcggggataccggattcgatgaagggatggccgaggtgactgagtgatcaaaccagattgtgttggaaatcagccagtcctatttcaacccccgaggttgaatatcatacaccgtccattttcttgatgctccctccccaacatactccgacaatctgtcttctaattaaccctttccttctaccttctctttaactctgtcacgtttgatctaactactgtccggcctcggtcaggaattatacattctgacggcgccaagcccgatagtcgtgtgcacaaggccggatcggacgctgatatcttgattgttcctaacctctcaaccccaatgtgtagagagcttgtgctaacccagactttgttccttccccattcatttctgtgaacggtgaccgagatatccgtcgtttgggtctctttccttttttggtttccgttgtggacagtggacaggtgtatatatactgatgcttttcgtccgagagtcagatcaaaggctggccgtccacacgcaagactcgtcgttttgatcggtcgtacatccctctctcgagaaccgcttgcgaacatggacgacttttcaccatctccatccacgtcttcctctgcccgttcagtcgacttgaaacatcaaaaggacccatcttcaggagagggcgctagcctaccagacttgatgcctgaaaaccaagccaagctttcccagctgaaaaagtggtcactcctcgccctctt

SEQ ID NO: 379 - DNA, 1237 bp, Xanthophyllomyces dendrorhous
acacacacacactctctctctctctctctctctctctctcttcaccgtcagccgactgaggactgacatatgttgccatctgacgatacgctcttcccgatcaccagcttcctcgccctgggcatcctcaacctcgtgatctccttcctgcccgacaaatactccttcttcgtcctccgcgcgatctccggcatcgcaggcgcctgcctcatcccggccgcgttccggctgatcgtcgccgtgttcgagccccacgagctcggcaaggcgttcaccctctacggcctcgccggcgcactcgccaacacgaccggcacgatcatcgccggcttcatcgagtacatccccaacggcggccagggcgaggcctggcgctggttcttccgcatcctcgccatcctcatcatgccgctcgccatagcgtcgctctacgtgatccctgcacccaagggcgcgatcgccggggcagacgacaagtggaagcggctcgacgtcgtcggcgcgttcagcatgctcgccggcatcgtcctcctcatcctcggcctcaccctcggggcgtcgtacgggtggaagaaggcgggcttcctcgtgccgttcctgctgtcgtgggtgctgatcgtgttcttcttcttctgggaggccaggctgtcggacgtgcatgcgcttctgccggccaagacatggaggatcccgaactttgctgtcttcattgcgcttgccttgttcatctacggatggtgggcagtcaacttcctgccctttgtcgagctattcgtccaagttcaccatgatagagctatcatcgccgccattcgactgcttccacaaggtatcgctggtgcaatcatgactgctgttttgaccacgtacccgcaacttacttcgaacccgagatggccaatctcggttggtttgatcggcggttcgatcgggtacatcctgttcacccagtcaaaaggagacattgttggctctggctactggcgatgggtcttcaccggtggcttcatcggtagttcgggtaacgtcattgctttcaccggtaccaatgtagccatcatgacatctgtacctccagagatgtctggtgtcgccggtgccgtcctccaagtcgccctccaggtcggctcggccgtcgcgctctccatccaggccggcctgttgacgatcaaggaggggaacgtggataactttgagaacgtcaagatctcatggtactttgagctgggatggaact

SEQ ID NO: 380 - DNA, 14729 bp, Xanthophyllomyces dendrorhous
ctttgagctgggatggaacttgctttggctcgttgggttccctgcgctctacaggccggtcaagaatgatgtaagctcggctgaagatggagcagagcaaggagtcgaggtcaagtcgtaggatctttggaaggtgcctcaggcgaaaaaatatagagttcttgttataatatatatatgatgcctttaatttgtctatcaacgacttgttctataaagatatctgtgaaccaaggtgctacaaagtttcttcacagaggttgcgctctctacattttgaagagagaaggtatgtcgaacaatttctggatgaatctggtacgcaaccctaccacgcgacgatgactaagcatcaagatcttctaccactcctcttccaacaaataccctatagagcctcataagactcgaccgccattcgatctccttcttttctcgacatgtctgatagatctcgctcggcttcacccagaagacagtccaaggataaatctcgctcatcaaggcgcgatcgagacaaggatagggacaggtcaagggataggggtagggaccgttcgagagatagatctagaagtagagagagggaagtcgaccttcaacaggaatttggggtagacgagttgtcggaggacgattacttgtgagcaatctacatcctctaatcagcccaatgtccgatggagagctcaccgttcgtctgtcgatcaactgtccatccttgggctagtctcaaatcagcagagttcagagtgtggctcaaagaagaaaagaagaaggtaagtccattttcgtcatccatccttcgtatctccagatgggttctgttcaaacgttactgtttatgttcgaatcacatctcgactcccgggatgatagtatctcgatcaactcgccggagatgacgctcggcgatacttcaaaaagtttgtcaaagcgtggaatcgagggaaactagcaagtgggtagttgttattggtactgtgtttctgctcggtacacactctcacaaacttgcgaccttctggtttgaaacaaaggatcattctacgcaccgactaccgcgacatctatcccatcttcctctcagacttcctacaagtggtccttcgcgaccaatcgatccaaagtggatactaccgcactcacttctgccagactagctgtcgacagcgccacaaacctgtccactttcgccgtttctggcgcatccggtccggagccgtccaggtcgagtggaggcgggagaacgatgggaccgatgattccaaagtcattcgctatgatggaggctgatcgaacgttcgagagggagaccgagcgagatagggagagagatgagaggaagagagagagaaagtctgcgagagatgaagagaaagagagtcgatctggtggcagagaaggccggatagagaaacgaaaagagtcagtcggttcatcatttgcgttcctcttcctttccaaatccctccttcgatagggctttgaaacaggggttctaatttttttccccatctggtcgaacctcaggacgaatgcgttcaatcgtcagatgagagatcgttcacctggaggactcgaggtagatgaatctacgttgatgggtacatcaggtaacgatgatttcgccgcaaagtatgtcctttcgtttttctttccatcaacatgttttctcactgaaagagaaacgaaagagagtctaacgggaaagacactttgacgcaatctccgaatgtaagaatcgccgctagggataggaaacaggcagaggtgaacgaacgtagggctcgtcaggccgagtctaaaaaacaggcatttgggacgtcgtctaatgcaatggccgagaaaaacaaaggtttgtctttgtggccgtgttgtgtcctctttcttgttggcttattgctcactcatgatttattctgaatatactgtattcgtttggtttgagaatcaatcagccacgatggctatgttccaacaaatggccgctcaaaagtacggggctggaggaaacatttgatgaataagatatcttttgtcagtctctctacatgcccgcaaggttctgaggtgtatatctcctagaatctcgaaacacatcatctcgcttgtctatattcagagattttgccagtcatgaaaggttcatcaaggagaagcagtaaaaaacaatataagcggcaaatacaaaacatgatcaaagatcattgacacaatcacacctggctggcagccagttcaagcagaagggtcgttagccttctgctgaacatatcctttgtcatgctacagaatttccagaacaataagattagataacatgtattcgtttctttacgatgacagacgagagagacagacaggcgctaaccttggcttgaccctccagctgctgttgcttatcgcccgtcacggcgcctgtgaatgatgtcgagccaaatgccggaaacccgagtcattatgaggttaattttcaagttcttccagccaaagtccaaaaaatgaaagatattcaaggaaaagaaaagcaagggaagaggcaaagtgaacgaaccgacgatgttctctacttttccactgattcgatcactcgtaccctccacgtattctttggtctgggcagctttgatttcagctgattcgcagagagaaagaaagaaagaaagaaagaaagaaaggacatcaatgtctgtactcagaatcaacacatggctcaagctatatgcacgagcacggtgtagacacacgcgaccagaagaaaagaaggaaagtgatctcgtaccttcaccctctgcgtgctgtttctttccttcggcaatccacgacgatccatccaagccaacagcgttcaagccagctccgatgacggactctttgatcgttccagtcacagagttgatctgtcctgtggtctggttgggttcctgtgggtgaggcgagatgaagatgacgaatgtgtcagatagcaagattcgttatcttatctgatgcacgagacgctatggaaaaacacaagtacattggtttgagaggaagcagacatcgttcacgagtgatgcactattgatagattgtgttgatgggtggcaagagggagtatgagatggttgaatgtgaaggagcaacccccgacacatagaggttcttatactctcgacaatcacggatgtcgtcagatgatcgcttgaatgtgcgtcatggcgagactgagcttcagaggattaagtgctacgctacaattaacatgcacgattgtttactcaacatcgcagttccacagatgagaacaatggaaaattcatggctgctgagacggtaagagacagatagatccattgacaaaacgctcattctgatagtttgatatcccacttttccatcgactctccaattgacggacacagatccgccggtaggctatctgcccagtcttccaaaaacaccgaccgtcgttcatcctcctctgcgattttgaattattgacattgtcataatgtcgattgattcagagagaaaggaaaacatcagttgatgcattcgaaaggacggacagacgcaaaaacaaagaattttttttaaagactaaccggcctcccatttcctcataatctcttgccatccactcactacatgttctctttccctcctcgcactctctctcctatcaacctctaacaagagcgcaccaaatgcttccctatactgaatgaatgacgtgttgagatcttcgactgactgaaactttgattgcaggttgggcaaatgagctgatattatcgtttggtgagcggctttgtgttggtttagagtcggagttggatctggaaccgtcagcgggtggatggctataggaggtcgcaaacttgagctgggttgtcaaggttggagagaagtaatcgagaattagtagggacggattaggttgtgaggctttcactctagcttactcaagacgaatcatggcttgatgcatatgttcgatatcattcaaaataagcggcagatgagcggtatcctccatcagaactaatcgttcaacaaaacaaaataaaaagaaaagaaatgaaatttcatgagtatgattaggacacggtgctttcaaaagttgaggtcaaaaagatcataccttggagttcttcttcgtcctctactccatacctaccatcgtcccgtccatgatctgcctcgttctcccagcctgcctccttcatcgctcgggatacctgttcccagtgccttgttagaccatctatctcttgctcaacagcctcaacaattttgcttcgctcagctttcgtcttccgaattattgtctcgatttctcggtcggtgatcactttgccgttcaataagatgacggcatccgtcgaggatagaaccgagcttggtagtgagagaaggacttccaattcggtctcgatcgcctcttgttcaagatccaattcgtcaacaagccggtctagaccttgttcatcaataaaatcccgtagcgtctttgatttctccttcgatgaaggtagttcagatgccactacggaacgggtagatgatcggtcaagattgtccccaaataaagaagaaagcgagctggatgaagctactagattctggtgaatcgagggaggaacaattgtttgggaaagagacaacagagtttgagaaagggagagcaagagatgttccctggtctcgttcgctttctaaatacgtgtgaaccggaagactcagtctcatctgtacatactcccgcacgcacactgcaagcggaaacaactcacctcaagctctccgagcaactgatgattttcactttgcatctttatcgagatacctgagaggacctggatacagagtagaaaatagaatatcaatgatgtttcacagaatttcaagaataaaacgtagcatacagaccgagagctgatgttgcctttccgccttggtcgctatcgtctcggcccatagggaacacccttggtcgactttgtcgcgcacgagaagaacctgggaacgaacatgctgagcttgagaaagtgctcgtttagaggttagcacgagatcgagcaggctcgtctgagaggacatgttgagttgagcttgatgtttggagatgttggtgatggtgatgacgacaaaggtgacgaaagaaaccgagcgagtttgaatttatattgggaactgaccgaacaacatcaatcactcatcgttcatcacctcacttcacctcacctcaccttctctgatctcatcctgttctctctttattcttcttctttctcctcgtgaaatgaacggtcaacttccagaatgttggggacacagaggcgcctcagcagagtttccggaaaacacattcgctagtttcgaggccgccatcgccgaaggcagtgactgtatcgagagtggtaaatactccttccttctcctctctacctctccctagtgaaactctgacatgttgattttgatttttgttcacgttctgcgcgcctctcatcataccagatgtacacactacatccgacgaccgaatcctcatgttccatgatgtttcgctcgaacggacgactgatggatctggcattatcgccgagctgccttgggaagattgtatcaggttcgcacgttcttccttcagtttcaacgttcaggtctgctcaccgagtctgtttctctctatctgtatatatgtagcaaagtacggacgttgaaagctcctcatcagccaattcctctgtttgaacaagccttggacttattgatgcggccagatgccaaacatatcaagttcaacgtgcgtcagagttcattggtcaagcggcaaaccggacctgctgaacacttttgactttggttgcatgtctggtcgaatataggtggatatcaagccctcgaacgaaccagagaggttgtttgagctcatggccagacttgtcaagtagatacctcaccttggtccgtgtttcatcagatagagagatgttgctcgactgacggaagtcaaactggacatcaatcaggaaaatacctaattgggaaactgatctcgcccctagactcatccttggactctggtaatggtccttcgttgtcgtgttttgatatcattcgctcagtgcttacagcatgtttccgtttgtctcttccaacatgttgacaaaggcatccctcgttcatccttcccgccaaacgacacttgcctacagcgacccttatccatatcaccgcctccctttccgttgctgatgaatactttttcccacacgtcaccggattttctgtcgcgtttcccttgctattgacctctaccggccagaggtttctagataaggcaaaacaggaaggaaagtctgttggtgtatggacagttaaccgggtagatgaaatgtgtgttgcctcaaaattgggatgtcagtggattctgacggatcgaccagccatctggagaggcgtccgagatagagtctgtcctttctgctcttttctcgtcatctctcccccctcttctgggcttttcaggctgatcgccatcttttctttgtagcttggacaagactttgagtcgacttactcgaaagaagttcccagttctttctggtattccactccgacttactatctagtggcccatgtatgtctagaccacacttgattcatctttcttggtgcctttctatcccattcaacaagcaagatgctccaaatttaccaagcatgcgcgcttctgtacctgcgtgaaaacagaaacttctcaactactacgctcgaaagaaaatcatccgtttcgcgggtccgttagttcgaatcccatcccctgcttagagcatggatgttttccctgtacttggccgtctttcctttgggccctctcaccaagtcggatcgttcaaagatcactcgatgtcttcgaagaaaacatcagctccaatatcattttatccgcttctcactttttttcccccggaagaacactttagacagacttgcttctctccaaatttttctcttttctagacgcctgacctttctttatgttttcatacatctatacatacgtttcctttccttttgtcttcctgtctcctcttcagaaaacctgtattcaatcaataagacaggtccttcttttcaaacctgttctgactgttctacttgcagccacacaaaatgtgatagaaacgtctcattcgatacacaacacccttcaaccactcatccgaccgaccgacaaatctcccaccttcttcgcctaccacaaacgcgcaatataagacaaagtaagagaagattttcacaacgaaagctacacgaacctcccgttcgccttcgcccagttccgcagtctacatctgttactcgcccctactccatctccgcaccaactcgtctcctgataaaatattaatgatggtttcttcgttgcctccgagagatcgatcctaaaatttcagaagtctccctcaatggccgccgtctccagtgttcggtgtcggcgttgacgttccaaacaagacgccttgcgggggtggtcctccctgaggtccgtttggcgggtaaggatacacatgtcccactgtttattcaagacacaaaagaagaactatgtcagcaaagttctgatcaaaggcatcttgacgtggagcgtcgacacgtactttggggactgatcatttgaccaggctggagctggtagtaacccatcggagcgtttcgcccagatccgttagcgaacccctggggctggccatatccagggtctggaaagagtagaacaagaaggcaggaaagaaggaacacaaaaagtgtaagcgatttccattgtctcaagatggctcgctcctacaaagcaaagatggaaaaagtaaacatagacgactcacgaggagcaaacatcccctgggtgccaggtggcatgcctaccatgactggacccattgcgtagggtggtccacctgcctggacacccatcggaggcgggaattcacctcgacctcctccgttccccccatttgttccgtttgagaacatctgaggaagatatccgccagcaggatgcattggactagttccttgagcatgagcgaagccagcgttcccttggttgcccgggaatgagccagcagctccattgatagacattggggactgacccatctggtaaaggacgtttcggcaacgacgatgcacgatgaatttctattagtaattatagatcaaggcgaacagattcttttatattttcgtttctaaagatgaaacgaaatgactaacaggaccgttgaaacgatactgagggtagtagcctgagtaaccaggagggaacatctggccctgctggtgttgaaggtgagcatgcatgtgtccgggcgaagagcccatgtgaggggtcatgttattgcccatgcccatgccagagtggggatggccgccgtcaggatggaattcctgttcaggcatagtgaatacaagagggaacagtttcttgtatgacgtcccagggaaagaccaattggaggctacaaacaagattatcacaaaaatcatgttgacgcacttagttcaatcagatactcaaagagacatcaaggctcaagaaagacttacgataagtactaggcaaagagagcttagacaatcgatgcgggttgaagtcttctcgaacattgacaggcaattcgaaccgcttcaacggcttggtgccgaagaacgggttgggtgtcgaagatactgattgagaggttgaggctacaggttgaacgggagataagctcggctgagcaggcaacttctgaagagactgaggtggaggaagctgaatttgagcagctgattgcggtttaggcgtctcatggaaaggaggctgggaagaatcaagattgccgtaagaagcgtatcagctcatgaactcaaagcgcaatatttagttgatccagctgcttacgatttgtcggacaggaggggatttgacaggagtagcctatgagaataagaagaaatacaagatcagttcgtgtccggtttcatttcgttctttggtcgtggagttaacatacaggacttggcttgaacacaaaggttggcgcgttagcgttcaatttggccaatgctgcttggctcgaagtcgcactgcctgtcggagatccaggtacaggaacagtaactcccagtgcggattggctcgtcgcgagcgtgctactagccgctgtcctgctcttgtttggattgaatgggggaatgtctgggatgaccatcccgcctctgggggaagacttggggggaatagccctaggggactgagtagctgtcggagggtttgccacaggcgtcaccagagaaggcacgatggggttcagaggagaagttgtagatttggcagatggggaagcattggcggtcgtctgagctgctgtcttagctgctaacgcgtctgcagctgccttctctactatggctttctgcttatcggaatccttggctagaatagggactaaatcggaggggatggccgttttgagctagaaatcaaaatcattgttggagtacgacaggtcattagcctgatatacacgatgaagaaattaggacatgctgaaagaactgaaggtgctgaccttaaaatcctggccaaatttgaccaactcctttagtctcttatccttctctgtcttcgctttcccctctagctgcttcttcttctgctccaacctttgtcgatctgacttgacaaagtcatggaatgcggaaagggccgacttttcaacgctctgaatcgagacaagggcatgagatcagtaggacgtcagatcatactaacttgagaatcagcaggcaagaagtatcataacttacaggactatcctccgcggacatcttgatggtcggatttccctgttcagctgttccaacattaggtattttcagcttgctgggctcctccttgtttcctgcagaggtgtccgtcttgttcgctacgccattcttcggagcagttaaagccgcaggggcagcacctgatggggcagggacagatggctttgagagaggagcgatagggggagttccagccgagggtcgtcgtgcatttggaggtacgtaagcgttggccgaccggataacgcccgagtatctgaagcagagaaggtttacataagatcagaagcgaatagactagatgataagttcggcttggcaaaagaggctgatagccctgcaatcagaaagtatgaggcttacttctcctcttctcctaaggtcgagtcttgtacggcctggtttcgctcttcctgcaagtgcgggttagaggatgtggtctacatatgaaccggatagacgagatgaatgttgatcagtaagtggctcgtaaagtctatttcatcatgcttgtatgttctacctatgacataagagaagaaagaagtagtatttacccctaagatctcgtttgccagcctctcggccttcttctccctttctctgtagtcttttccagttcgatcaagcttcgtagtgtagaactcttcatcaaagtctgtccgagttccgaaccttttttcgttctctgcaaattgatcccatgatttcttgcctccaccgttgtaagtgccgaatgtctcgaggtcagagtccatcttgccggtagtctgaacaggcaaatcattagaccagggttgaagagttcgctcttctccaaaaggggtggaatgagagatatcggtatctgttcggaagccttaatgatggaattcgcgcaacgatgagtcagtttgaagaagatcggcgatgacagtgtatcgggctatctgctagcacacatccaaccacacgagatggaaacataccatctttgccgcctctattcaaactacccgtagcagatccgggaggagtgatgcctgatgccagtgccttacgaacctcgctcacgtctttctcggggaactccatctggcggttaaaagcgttgggaggcatgttaacgtccctgacattcctcatgatcacagtcctgtcagagttactcccctcgcctgtaggcgtaattgattgaagaattccctcatagataattgacttgtgggtcaatgcgattttggatccctgtatgagacaatcgcaggggtatgcgtcgagagagacatcaacagtatcagtttgtttgtgtacaaattataaggtcaagacaatactaacgatgagctccgtgaggctgggcgcagagatggaagaagcagctgaaggaggccgagaccccgacgagacaacagctgggtcatccaatactgcagacacacgaggggcagtcgtgggagcagcagacggtgtggaagagatttcggtcacaggtgctttatcgacagaatttggggtggcttctttctcgtttgtgctgaatgatgccggcgaggccgcagaaggcatcgatgatttggaaggaggaggtgtaggattagaaatcgtgggagcagccggagctgaaggtgacgaggcaggcagagagggtctcccagcgttcgcatacgatttgaatgaccctgctcccccggcggctgacgcgaacgacataggaggtcgagcaggacgaggcccattagcagacgtcgttggtggtggcagagaagtattcaaggtctgttggctagaactgggagtggtaggctgtggaggatttgctggtcggaatgattgacgacttgaggtgattggatcgaacagggcgaacaaaggaggaacacaacgaaaaagatgttcgcaatagagaacagcgaagtcagaacacagatacgaagctgcaaaacttccttctcccttgctgtctccagctttggagtatgtctatatttgagatagctctacttaccgttgctgaccagggggagctggagatgatacgtttcccccgcctcctccgatcgggccattaccgctttctcgtctcaactttgcgttcttgatcgacatgaaagatgtatccagtagatttggttatactataggtttgaatagtgtcaagggtaaagcttaagccgcaaatggctttgtagttgaaaacaggaggatggtatcagagagatcacacaacgactaggactgtgatctggaaggcaaagagaatgaagatattgttgagtatgaggtctttcgagattagaatggatcctcggatgcctggttggggtaaagcacatacctgaagatgatgacagaggctgaggtattgaaagagagatccttcgtatattacctggtgtgtatggtctgagatgcccggcgaaaggatatcgactgggactcgatcaagcctgttatgacggtttgtctgcatagaaaaagcagaacaaaggttagccagaccaagacaaggccatgatgaacagagaccaacatgtgattgatccagcaaagaaaacgatgccaatcggacatgtctagcggacctttgagatctcgagatggccggaatgaaagaagaggatgtttatgaagaagagatgaacgctcccggagaattctttgacactctatcctagcccaaccagagtacacaggagaacaaagagacaagaaggagagctctagaaggcttggatactcaccaaggaaacgaacaggagtgggtatgttgaatgtaaaactgggaatgatagaaagaagagaagagaaagagaagagacgaaaggaaactggaggaggctcattggaaaacaggcacaactaggcacaactaggcacaactaggcacaactaggcacgcgccgttccattagaaaaattctctaatcgaccattaggaaacccggttgactttttctaatggaacactcgttttccgttcttacatccatccgaacactactcacgccctcgaccatcaccatctcatcacactggccacttttgttgaacgtcacataccttgcacacatcaatggagcctgggtcctactcgtcggacgatttggtcgtggaatctgttcgtatttcgtggaacctgttcttcgtatctcatccttcatcgacccaaacttccgttgtctttcgggctgatacattctctcgtttcctcttaatgtctatgtttcattgatagaccaagttgtcctccgatcaggctcacttatatatactccaatttctatctactgcagaggaagcgttggcacatttgtccatagtgagtttaacatccttgttatcgatcacagtcaaccccgtgtcctcgcaggcctatctaacgatcacacttcgcaacgcattcacccatctcttttgatcaggatgagattaaaccccaacagtccaatctcgaaactacccttcttcagattctcacatcaacatccccagcaccaggcagacccatccgaaaccttgcagccagatgtctagttctccttcatcgagtatccgagaaccgaagcttgtttgatttcatgagagagctcctcaaggtagcatccggagaaagcacaggaaagatcaaaggagaagcgaataaggaagtgcgagtgtacgtctacagtgttttgttatctagaagatatatttagctcccgtatctgatgttgttatggtcataatatacatgccattcagagcatgctggtacgtggttggagaggtgatgagggagttgggcgaaaacaatatgtcgtttatatcagacatttgtctacactccatcaagcttctcagagcatcatctcacgtgagtctatctcctttttaggtaattcaatctgcaagactgactcctaattctttcaacagccggtcatcttgaggtataatgccatactcacactcaagaagtcatttatcaaagcgggtaaggccgtctcggaccaggcagccagagacattctcaaacagcttcgaaatggcttgagtgacaaagctctgagtatccaacgtgtctgcgctgatgtaagtgattgttggcaaagtatggtcttggtgttctgcacaactgaccggtgaatcgttcccctctcaaaacctagactctactcacgattcttcaatcaactcctttccttagcaacttgtccgagatcgagccgcttcttaaccaagcgataaagtctctcgatacctccgattcacctacgcgccgctccatcgctctgttgattgctcacctccttgcttacacacaaaaagaaggctccgccccaccaactgttccaagcaacaaaaagaagtcttcgactggaaacaatgacaacgacgaggaagatagccggcccgcccccagctcaacatccgaagcaaacaagacacttttcactctaaacgagatgttcaaagtcctctctgtgcctttcaataaggttggcagctcccgaaaacttcggaacacgttgatcgaggtctatgcaaccttgtttgctactcttggttcagactacgtagaggcgcattatccagagatatctcgacaccttcttatcgatctgatctctcactcgagaaactcgaccaatacttctaggcaagagatcttacttctccggaaatctgtaggggtcttacttcgagttcagattggggtccggctcttgtcagagcaaagtcagattcaagccatccgagagctcactacgaactatctcaaaaaatacccatcgatgcctcccaatcaatctgtgccccctcctcctgctggagttctcgtacctgtcttgacagaagtcgcaggattattggatcagctcggaaacgcacct

SEQ ID NO: 381 - DNA, 24662 bp, Xanthophyllomyces dendrorhous
gtccaggaagtccttctggaccccttgttcaggttgatcattcatccgtctacagccgttcgagtctcagccgcttggtgcttgagatgtttctgccactcaactccactgaagctcgccggtgtcatgggaacactggtgagcgagttgacaaaggagattagtatgtcgatcactcctgtcgctccgtccgacatttcgataagaatgattggtcactcgactgccatctcagctcttgtagccatcatccccgagaggccactctatgtctcatacgatgtctcggcaactatcatggacttagcaatctcgttgttgaaacgtgcgggcgagcacgatgttgcgctggcgagcgtggagattcaagtggcctggacactcattgggtcactcatgacgctagggccaagctttgtgaagttgcatctgcctcaactgctagtcctctggcgaaatgcgctacccaagccaacttcgaaggattcttcagtcggttctcgttcaccatccgagtggaaatttttgttagatgttagggaagcaacgcttgcctctatgctttctttcttgaggcacaactatgtacagctggtcaatctggatgtggctcgaaggctgattgccctcctttcgaacactctcactttcatcaactcgttttccagtctgcactccgaagcactgagagaccagcctatcccgactctctcgactacccctcctacatctcttagcttgctcgaaagagaatccaacttgcgtcgacgaatcttccaatgctttacagtagttgcacagagtccagcggcagagtccctccgaacgaccttggtaagcgccacacttgaggtatttgccgagccggaacgatatgctggatcagcagctcaggcggcaattgccgctagtgcaggaagctttgcaggcgtttgggcggcagtggatggatacgcgtttggagtcaccagtttggttaggggtgacgagttccctggtgatggggaaggggaagaaaactcgaacaccggaagaagagtgagacgtgctacggaagacaatggattgcatcgagatcaggtcgaggttgagatctccagctcggtatgtttgctattagtcaagtgtcctgtgaacaaccctttgactcaaatatctccggttttcattcttatccaaattagcttcatacgccaattctaggatcgttggaatacgatgctttagagctttgcttttcttcctcctctgacgcctctaatctagtatctatcgaacagccgttaccctcccctgcaccagctttgacttccgtcgtagacgccgccatcgagttgtttgctcttgtctttcctagtgaagatgcagaccttcaggcaaagacgatatctcagatggtcgttcaagtcaaatccactaaactggaaaagaatccaggacgtaagatggcagtgtttgtgaactctgttgaggctctgaggagaagtttacgaaatgtcgtcaaatcagggagaccggcaagggatgccatgggtagtttgaaagtggccggagttatgaaggagttactgcaggtaactctatttcaaaagcctgaacctcataccacgacatcacaaactgatgatgttctcttcttttcatatcaggatgcaattcttgatagtgactccacgctgagatcaattggaagtgaaggcattggacgtctaagcagtcttagtgcaacgtccttcttgaatgctcagatccaatggctcgtagatcagattgtcaacaatcgaaaccccgaatcacgggctggttgtgcgctttcatttggcacaatttatacccacgttggtagtttgatcggtggtccactcctcaagacaatggtcaacatattaaactcgcttgcgaacgatccccaccctgtggttcacttctgggctttaactgcacttgccaaggttgtcactgcttcctcattatcttactctccttttatctcgagcacgttaggtcagctcgtgaacatctatctcacagatctgcatgagcccgaagggggaactctcaacagcgtcaatatccgaggagatttgcctgcctatcaggccgtctgcaagattatcagcgccatcctcggtgtgctgggtccagaattacaggaggctggtactgttcgctcgctggcattcatcatggtcaatgagttttcactcgaactcgatgaaggaatctcggtagaggctatcaaatgtcaacaacagttcttgatgtttgctccgaaacaagtcgatgtgcccaaattggtcgcatccttccgtcttcaccttgcctctacccgacggcctctcaaaattgcttcgattgatgctctctaccaactggttcagagggatgctcctctgatgtcaaagatcggtggaaaccagcttgtagaagacttgtttgggttactggacgacgaccccagtatcgaaggcgttcgtgacgtgattctcaactggacaaaacagacttctgctgctgctccctctggatggatcgatctttgtcagcgaatcatgaaccgtacgacggcttcgcaacaggttgccctagccgacccatcgaacgcgcataaacttcaggacgaggaagtgcagtcgattgtcacatctgaagctggaaaagccgcgggaatcaggttgacatcgcggtggaggactcagctatttgcccttcagtgcttgcatgaagtcgttttagctgtcgtggcatccggccgagcggagcatttcaatttgtcaatggccaaacagatgggaatcaacccgaaattgatgctcgtcactcgagtgggagatctcatcaagaccgctttctcggcttccacagctcaggtgatagagatccgattgcaaggcttaactgttctcaaggatgttattcaagtgagctctgacatatgtcgtattcctgtcccatttcgcatcctgatttctgattacgcgtgtttcgatatctgtgtgttcgtagtatttccgagcctctccagatccggactttgaaggggctttgctcctagagcaacatcaagcacctattgctgctgcactcacgcccgcctttagttcagactctacaccagaagttttggcgagtgcaattcagctctgtgctgttttcgtcggtagtggagtagtgaaggaggttgagcggatgggacgtatattgaagcttttgacgagcgcactctcttctttccaaggttggtagctggtttaactatgcggtactgttttgacagaagggttatatcagctctttcgctaaccttgcttcctgattgcaacagatgcgaacatgacctcgttaggagaagtcaaagatctgtcgatcaacgctgcgatcatgctcaagatctcaacgatgactgcctgggcaaacttacagtcgtcgagcgtcaaacagacgtaccttcgaaacgttgttggacctcatcgagccatgctagtccatttctgggtgactgcccttcgagactttgctcgactacgaaccgatccggaagctgggcctggatcttcaataggatcctcggccgatccaatgacaacgggagtgggtcgagaggtcctgttgccctactacgaagcctcatgggcacctatcctacaagcaattgcgaccgtcatggactccgacgatgatgatgccccacttgtcagagctatggacggactcgatccaagcgagacctcgaccggatctataatcgtgtctccgtcggatggagatcgaaccgaaccgactacgaatttctttgtgctatacggcttggcattcgaggcgcttgctaatcaaggaggagaagccgcaagttatgcaacttccgaccgagagataccggtcccattgatcgctttggaagcgctgaggaatttggttggacgccggttctcaggctcaattttgagtcagggaccaatctttgaggagttgtgcacattgttttacagactcgcgatgacggccccgccagtcgctcaggcccggctcgtcatggttctcgcctcgtttgtcaaagactacgcctcgatcttgaacctgaacgcatcctcgtgcgtatgattttttttcttttcccttttagaagagaccaagtgattgaaccaagtcaaaccatggactgacgttttctttttgtctctaatggacacagaacggtcgaacaagaaaccagtcagctgtctcgttgtttggctatcgtgacgtacgttctacgacaggccgtgccgtctttgaacggcaaccctccttgtacgttctatgagccttgaatttatggatatgccatcgtgtggtgtgactgaggttctccatcatgccttccttgctatagattggagctcgacaactgcgttggatcggatcgatctgattaagacgtcgctgacggcatacatgaatattgtggacgtgttccctatcggtcaacgagaggagcttttgtgtgtggccatctatctttattctgatctgttgaaggacgagacatcgaaggcggatctggctggaccgacgatatcgatggtcaaaacgttgtgcgatcgggcgtacagcgttcgacaggctggcagtcagctttacccccgggttcttcacggattactctctgcttgcatattgcatatcgacgagatgagaggtcggtccggtccggtagcggtggcaaaagtgaggaacaacctgttggcgcttgtgttgttgatgacaggtctaccttcggatttgaaggtcggtcgcgcactggtcgaacggacttgtgagattattggccagaaattatcggccgaggaggacgaaatctcgatggccgcgatccagtgtacaaagacgttgtttgtgacttcgagtcgagggagcccggtggttcagcactgcgtgggtcagttaatcccgcacttggtgacgtacgttgcgagatcgcttgaagtgatggacgagccagaagctgggaccaggttcggagggttggaagaagtagtcaagacgttcatcagttttgtgtctgctctcggtgaggaatctcagagtcagtatctgtttcgtccgctttgcttatataccgtgaatgatttgatctagtttgcacttgatggatatgctaacgaatcatgtttatatcgtgggaaatgatctcgattgatggacggatagaaactcgaggatacgtagtgttactaccgacgttggtattgctgatgaacccaaagaagccgaataggatgcacaacacggtcgttcagcagttgctccagctagccgggcaatctccgacttccttccgggaggctacgtgtacgctcgatcccgaggctcggtcgatactggagagttcaatcagacagtctgttgaggcttcatctagggcgaaggaagattctgaatctggtggtgctgataagcgaaaggctgctcctgcgatcgctttgaggagctttgggtaaaagttgaagggattgtgattaactttctaatctttgttgtttacttttttagtgaatgtatttccttattatgtcgctattagttttatcatcatcatcatcatcattattggcaaaaatgtggtttgcatctaaacgaacaaggttgcaaacgaggtcgttctgaaaataaggcactctttagcgggcgtcatccaaggaacccatgacggcatacacctgtatcgatgtaaatgatcgtcggtggggatgggactcaataattcttatcaattgacccgatctttccgaataaaatgaggagggggaggaggaggagtcaaggggagaagaagaaggaaaaaacgccgaaaggaaaaacaaaaccaaaaaagaacccagtccgacctgagtgtcggccgctgaccttttgtccgcggcgtcgctgttaattagttaagcgattctttatctttcgtctcttaacatttcatgtgtcaacatattttgggaaagcaaactgccatgtttggacgatatataaagagggttagctcaagtccgaagaagacgaacaagcagcagccatcatcgcatcatgtgcagactcttgctcttcgtcggacagatccgaaacgaatccagagaatgaccgtcagctgtattctgtgtttagccttttataaactgtctacgacgtctacccatttccacacatggcacatcacaatccacctacgagtcgtgtctccgacactcacacatccaccaacatgctgtcttctatccgaagaggccagactcgggcaaggacaaatatctggcggttcaggaaccgcgtaggcggttggaaccaaattaaaatcaaatatacatcatctaagataccttaggtaacacatgaccggtagaattttactccctcgtatcctatcttttgccaaaaatattttctcgaccgaaagacaccatcctcccaccttttcgtataaagagggtagccgatcgagcagataacgagacatggatcccgatcatcttcatcatccgtcctcgtcttcatctcatcagcagcagcagcaacaacaggaccagcagtcggttcaagctgatggaacttcacccgctcctgttcgtcctttctggttcttctacaggctgcttttttcatttttttcttttcgctcttttttccttcctcgtcctctgtctgcctttagcagccattctttctttttatactctttcttaggctgacgacattctcacgtgcctgcacatgatttcttctattcgcttcgtcttctcgctcatccattcgaatagtatactcggactgaacaacgtggtcggaaacgaaacaatgaccttcctccttctagagcaagagaggttcaaagagcgtttcgagccagaagagccgctcacctcgccgctttggaggctagggtgaaggagattgaatcagaaaatgcagagctcagagagttgcttcatatgcctcctgccaacagggtgagactccatctttcttctctggctacgtctcgcagaacgaatggcactgctggacgcgcgtgaccttacagaagttgcgtgttctgactcggtgtatactcctgctatctctaaccatctcaaattcacgttctcgacacgctctcatagccggctatcagatccggacctacaggtcgtggaaagttgatcgacgttggtgcttcaaactctccttcgagcagccggttggatgaccagtattcccactcagattctggatctcccggctctgaagaacacttctctcatgccaacaacggtaacggttacgaagacagtcgacaaggtagaggcaggaaacgatattctgtcgatccagcttcatcgaggaacccttcatccggtggctctcaaagcttctctcctctgactagagaaggttcgttcggaatccatcagagggcgtcttctcgtccgccaggaggggctgtcccagggatgggtccgtacggtggtctattcagcggtggccttggaaacaacaactcgcagctcggcctcaacgcagatgctaggttcagttccttcctcaacaacactagtctcaacgcaccttcgccctcggctggttcttcatcttcaggcgtaccccggttggaggatatcttccagtaccagcaactcgttcagcaacaggcaggctcttcacagctcaaccagccaactcagcaacagttatctcagttgtctctcgatctgaatgatctataccctccgttgtacggaggcaacggcaactcaaatggtactgcaaacaacaacaacaacaccaacagcaacaaccttcactcgatctcacattcccctcatctgtcccatctggaacaccggtcaaacacgccattctcgcctctacaccgctcatcaacagagagccggtcgagttctcataaccggacatccagcccgagtagccgcctgggtgtcagcagcggtgtcggcttcccttccggtcattcgaattacctagcttcgtttggatcaggtttcgcaccgtctcccaattcgtttaggtcaccttatggctcgactccttcctcaaacgttcctgccaacaacaacaataatatctcaaacacgaatggagctgacccagcatttcctttccacaagccagtcttgcatgggccagctcagactctgagtgtgatggataggcttagagcttgctgcaagctggatgacaagcttgtcgctgccgatccgggcctgcttgctttctgcaacgatatattggcggctgtgaacgcccttccttctgatgccgaaccgggcgtcactgctcaatcaaacggattggatgacgatcgatcgaatcccccccgtccattcctaccaatccggcaggcctggcagattcttcgaacccactttccgcttcctttcgatccagccgtcagagacgccatggcagccggtacgagggcagcagccgtcttgcttcatacctcggccgcagcggaaaaacaccggttgatgcaagatggagtgatcaaacctgagccttctttgaccagtggaccaagagcgttcggagagttcattgtctgcagaaacaaaaacggaattgaggtcgatcaagggttgctcgtcgagctggtcgtcaggcttgaagagggtgcaaggcaggcagctagtcaacctccccggggaaaccagccgtcgcaccttcaaccgcatcagaaccagcagtcgcaacattcacaacagcaacagctaccgtcgcatcaacaccaaacctcgctgaaccaaacccattcgcccgctcagtcagattcatcaatgggcaagcagagtgactcgccgaacgttggtggatcttctgcccagccgagacatccttcccacttggcttcagaagtcatggccgatcgtcagcaacaacagcagggagatgtcataataccgggttcgtcagagggtcaacaggcattaggaaaccataatggaaacgagatcggaaacggaacaaactctcctggggtgtctctttaagtgttcctccatgttcgctacacttttcttgtttttgtctctttataatccaatatcgaaagtatatcgaaaaggcgactgaagctggcaatgagactagatccatttccacccaagccactcataatcttaattcttccaaaattcttcttttattctttcatctgctcaacaaaaatattaatagttggatagattatcttcctttcaaatctacttctcctattcttatttagtcgtctctgcgctccctgtattaaatgctctctctattggcttgcaagctatatcttctgggcacaacgaaagagcgcacaatcggcaggaattttccgcagtctttgacccgttgcatcacgaccggcgacggaacctccatctcgacttcacagtcatctaagcgaccagtcgagtctcgaagtcatcgtctgtcgacgcgtcgagcaccccgtaaagacagctaaacaagagaacatgtacaactatcctggtcaagcccaacataaccaggggacttataactatcctggtcagcaaggacacaagtcagtggatccactccctttttttttctcgtgacccagcttgcttttcctcgtccatgcttctggctcgtccattgttctctatagaacatctttcttctctgactggatgacgtgttgagaaatcagaggaaacctcagagatttggtcatatctgttgttgaaagatcggtcctttaactgacccctggtatcttgaaaatgaaacctcgcttgacgacacatgcaatcgctcttctctccggtacttcagtcagtacggtcctccttcgggcgcaccctatcagcaacaacaccagtcatacggacctcctcccggagcaccacctacctctggaagctacggcggccatcagagctcatacggtccgcctccaggagcgcctcccgggcaatatggtggacagtcttatggagcccgtatgttccgagtttgctttttctcgaaccctgttctcccaaagaggtggatcttcgtggaacagaatgcttatagagcgcgttggatcgtcgacttttgacacttgtagcatctgggcctcctcctgtgaacgattatagtcggtacgtcctttttggttctttggtaagatggatttgctactcaaatcaggaccagagactgatggcaatcgatatggttttttctgaatctatttctggcagaccgtccgcaggtggatatgcctcgaacggaggtagctaccaaaaccaacagtgagtcaagctgaatgtatatcctggtcctgtttctttatactgatagaagggttcgatttcattttgtcatctagatatggaggcagcaactctgggaaccggttctctcctcccacaggtatgttatctcgggattgtccagaaagtgcagcaaattgaacgcttgaaccttcaaactctggtcttcataggtcctcctcctcaggcagtcccaaccactgtccaacattacggtcctcagtaccagtcttccggtggtggtcaacagcagccatacttcaagtactctctctgcaacggtaaaagaaaggcgctcttggtcggaattaactacataggaacgagctccgctttgaacggatgtatcaatgatgtccacaacgtgaagcagttcatcatccgttcgtcccatcagttttatcttccataaagtttcgttctcagaccgattctgacccttgtgcacgtctttcatataggtcaatttggatataaggatgaagacattgtcgtcctgacagacgatatgaccaacccgagacaaattccgacccgggcaaatatcattcaggcgatgcattggttggttcaaggcgcccagccgaacgatagtcttgtatgtactttgtaatttttactgtcggaaaagacgatgatggtcaaaaagattggaactagctcatcggatcggtctattttctctttgccgagtagttcttccattactctggacacggtggtcagacccaagatcttgacggaggttagtcatatatagattttccactatatttctctctgagaccctgtatcgctaacttgcacgtttcctttgcgattcactccccagatgaggacgatggatacgatgagggtatgttgttgacgttaacactcttattatctgatagatagctcagttctgacttctctacatcttctgcagtaatctaccctgtggaccataagcagaccagtcacatcgttggttcgtccatctatctctttaccttttccatttctttacagatgtagaagtcaagtcttacttgaatcttgttctggttgtttccgcttgatagatggtaagcatgaacacgcaatcgtgtgaatctccttacatagaatgcctatgctcaaccgatctgtacgcttgttttcacgccccagatgaaatgcacgatatcatggttcgacctcttccggctggttgtcgacttaccgccatctttgattccgtacgttcggcggttcatttgttcaagcatcgttttgggcagttcatgtggacgaagttgacccaaatttttctctttatattgtagtgccattcgggaacggcacttgacttgccttatgtgtactcgaccgaaggaaagattaaggagcctaatcttctggccgaagccggtcagggtctactcggtatgttgaacgtcaacaatcagcaaacaatttataatgaaacttaatggtttggtcttggtgtgaaatgatcgaaaggtatgggaacatcttatctgaagggagatatgagcggtatgttcagtagcgtgatgagtacggtcaagaagatcagtaactcgggcggagcgaacgccgagagaatcaagaaaacggtctgttcttgtatcttgctatcctgcctgaattcttgatcgctcatctttcgttattgtgcagaaaacttctccggcggattgtatcgtaagtaaagacttagcttaaccaaacgtacttgagcatttcaactcacaatgttgttttgcatcttctcttcttttctttcaaacagcaattctctggatgcaaggataaccagacatcggctgacactcaagaggctggtcgggccaccggagcgatgtcttatgtatgtgctatcattctttgtttccaatctctttttcgttctctgttgttccaaaaactgctgactaaacatatcgttcgtctatcgattgttaggcattcatccaagcgctcagtcagatcacctttccttcctgcttctcgtatcatgttcaagtttgtcgtcggatgcttatctgtttgccttttcaccaatgccagcccaataccccaaacagtcatatcagcaactcctggtaaccattcgaggaatccttagtgccaaggtcagttccgtgtcgatctttcaaatccattcgatacagtgaatcgtcaatctgatgttccatttttctggcgaacaaaatagtatgagcaaaagccccagttgagcgcttcccaccccatcgatgttaacctcgagttcatcgcttgagtgtagaatctttttcttgatacttgtctaccttcccaggtgtactctcgaattttatgctcctttctttccttttcctttttaataacccatcttcgatgtccccataagagcaagaaaagagtgcaaggcgcaagaacgaaagattgattagtcagcagaggaaaaagagacatttcgtttttcctcttgtcccgctccgattgacctttaccctcgtcctcccaacaccccacatccctcttcgcccaagtttccttgtgtttgcttgtccgaccatgccttctcctctgatcagatcccacgtattccagaccgccctccgaaggtcgtttgcctcttctccgcctccggcgaacgtggtcgataaggctgccaagtctgcccagagcgcgatggactctgtcgtcaaggttgccggaccgactggaaccaagatcatcaacaagatcgctcgttcgttctttttttcttcccctgagttcactcacagacagattgagttcttgatgcgttgatactcagagaggcagagtctgtaaggaacgagaacgaactacgagacctgacatgcttatcttttttttgcttgactcttttttctttctttctgctcgtgtgtcttctttcgcttttttcttctttttttcccttcgattcttcgttgctctctccagcctaccagagcaagctcatctacaacatccgagtcgccggtgagctcgccaagcaggtttacattggccagaagcttgctcctcctacctctgtcggagaggtcacttccgcctgggccaacgctgttggcaaggccaccgacaagaactactggtttggaatctcaaagaacggacagtggaccaccctcggcctttacgtgcgttatcgtcttctatctcaggtcgctgctacgtgtttgatgtcttgtcgtgtaagggtttgtgaaggcagttggaaagaaggaggcaagagggtagagggaacgagatgggaacgtgagagcaaagaaggatcgttgggcgtcagaatctcgagatagcatgacggactgtgggcatgatctgatcagacgattttgaactgatcctctttattcattgtactttgcctttctacttatcgggatccatcttccgccaacttcacagggtctccaggcctacggtcttttctccatcggcgagatgattggtcgacgaagcatcgttggatacaaccttgacacccactctgagcactaaatctcttgtcaatcttttctcggaaggcagaagtcttgatcgatgaagggacggcgatgtgtgtcaaaaaaagatggagcaggagaagggaggatcgtgtgtttgggaggtgttggcggtagtactttgaagaagtgataccaaggttttttatctttctgttgtcgattcttttcagtctgttcagtgtatatcttgttctcgttgcttgctcgcttctactgataaggtctgtcgacatagagacagagacagagacagagagtgcacttctaaagcatatatgagaagccgaaaagtcccgactaggcggatgacggaggaaagatgagaacgtagattttccatcagcacgacttctcttccttacgtcccagagagacgcaaagctgttgctgggcttgaacatcgtatgagatacagtccatgttcggctgtgtatatagatgtatgtgtatcaccagacaaacggagcccaataggaagcgagatgaaagctcccacagacagttttagcggtaaaagtgaaacgattccatgaacaccatccatccatcatcacgactctcgtcaaccatattcatctttttttggttcgccctcttgtcgtacagacacgaaggaccgatctcccgaagatggccagattcaggcatccacctcgtctgcccatccagctcgctcgccctcgaccgagtctcatcccgtttcggccttttccgttcgttttatcgcaaccatcgtccggcatgcgtaactttgggatgatacgtcccaaccaaataggcatcagttggtcaggctcagaaagagaaagaggaacactcagctggacagccgggcttcaatctcgagcattccatagtagtccggtcagtcggtatctgtttgtttcgtttttgtcatcttgctctctggtctttcttacaggatgctcatcgtgtggcctgatctacctttcattcttatccaccgggaacatttgatccacgtgggaatgtacaatacagaaacaccaagttcccctgcctgctctgctttttggtctcctcaaggtttatctcgtctattttcgttgtggtttttctgattgtcactttttaatgtaactagaagctgaagtaaagttgatgaaacctttgtggggacggatgatcctgcggtcctctagtcttcgaccgtcctagcagcagtcactactctcacccgaatacttgtctccatcgctccgtcatttctagtcggtcactggaagactcggcggaggctcaaggcgttcaatcctgaacatgaatggtaccttcgtttcagaccaatcgtgtctccagaagctaacgccatttatgaatctgggaaaccggttccggagggagtgagtgatgatgtcaaaagagacctcacacgattggcacagtgggccgctcatgaggctgacttgagaaagacgaacgatgtgctggtcaaacttatctgggcagcgtaggtctttgcttttggttcttctttccaatatctcctcaccaacattctataggtgctggatgcttgtattgccttttgctgattaacttatctgatgtccttccgttttcatccatctggtttatcgaccctcgatagattgggaattccgttagctctgcttgccttggttattctctctggactagaacgagttccgttgacaggccgttggagactcatccttctgtccccctcggaagaagactctattcatgactcactcaaggagcaaggctggttcccgtcagttctttcactcctcatgttggatccttcggctccacctcccaagatcctcgacgcagccgactggcgatgggcctgggtagagagcacgctccgacagctcgagaagggcgcaggcgagtgtcatgaactatactcaactagtgcggagatgaagggaaagcctcgctcggctaaactatcattagaggagaagcattctatagaagcttacccaccggcacctcctcctacgtttccacttcatccgagaccgagagcatcacaacttcttcacgaacatctcagcaacttcaccaacacccagtgtccgtccaaccctggccagacctcgacatcggataacccagagttggaaggcccacctttctcgttgcttctaatcgaaaacaaagaggccaacgcgttctcgtatggttttggaggtaacggtgcggcagggatcgtcatctatactgggctactagatgagatactttcattcaaaccctcctccataactgaagaagtatcacctgcagctcctttcctcgccggacctttgtctcctaccgattcatcgcagtcctcgacatcaccaaattcaccaacacccacaccgtcagccctcgcgacagcacccacacaaccgtcaccatctacattaactaccgaatccactcaatcaaaatctttactctcattcttctttggagatgccttctccacccttctagcaaaaccaagctcaagtccaacgtcgggaccgacagaagaacaaacactgcatcttgcggctatcttggctcacgagatgtctcacttattactcagccatcatctcgagacattgagtcagacgagtgtcgtgctgccgagtatgatgggtcttctcatagacttggcccgagcggctctctttccaataactttcgtatttggacctctatttaagtacgaatcatctacctactttagcaacttccacccgacgtaagagtcagattgtttgatcctgactgcgtcaaccttttatcttgtcttgcggcttgtttacttttcctagtgatgcgatcgccaatttcggaaaaatgagcacgagcacgatcaagacggcaaccgagaactgctcgaatcaagtattggagattgaggctgatctcgtcggacttcggttcgttctcttcgcatgtttctatctgatgtaccacaaaatcctgactctttcttgtctctcttccacaaatttaccctctcagaatactcgcccactctcagagatttaacccctacaaagctgcccaattttggcttccttcacgagcgccaacaggtgttcgtgagtctcccgacaagtcatggttcgccgcgtggcgagggattggtctatcggatacagcttcaaccatcgcaagaaacgagtctcatccaagagatgagctcagaaagttagcggtcgacggtgaattggaaagatggagaaaggcttggagagagaaatcttgatcggattcagttggactggtttgagtaagatcggatttcaagttttgcggcgcctccgtctttctttctttactccttttcggtttccactagtttcataatcttcttcctccgcttccgtccattctcttgttctcttctggccttgatctgcctgggaattacactacactcgtctttcctggactaatcattttgcttcccaaaccattcgctccaatcgtctaacccaatatcccttctcaattttatcttgtcttcgtagtcttttccccccaaatctctcctcatcatgaattagcaatatcttatttttctcaaatcactcaatcctccatagttcatctctttcttttgtttgcttttctcttgggttcgaattatgtcgaatatatatatcttttcttctattactttatgttttctttatggtcttgacactgaccttgctcatataactatagttttctctgcttccccttctgtcttgcgtttctttgactttatgcaattttaatacgggcaaacccccagctcttgtggtgctgcgtagttttcccacacgcagagtgatgcaaagcagctggaactatggtcgagcgtacatgagatagcagccttcaaaacagagcgcgattgaacgaatgcacaagatgagatagtacagtgaggttgattaaggaatacaatacgaatccgagagatgaaatgagatgccatgaaggagaaacgatgaagagacgcaagaaggaaatgaatgcctggtatcatggcaaaagggcaaaagggagaacgagagccggatagactctgctaaacagtagcgaccctctatctattcgccaaacgtgccgtacccaacggccagctcttccctgtcgaaggggttgctccctaccgttgaacttctcagccttcttctgctgaaactccgactcaaacatctatctaacgaatcaacatccctctctaatcctcctctactcatcccaccaccgagaacgaggtacattgacgatcttggtggtatgtcgacgatttccgagtcggagaattcatcagaagaatcgtcagatggttcgtagtcatgctcaagttggtcgaccgtcccggttgccgtcatcgtcgtcgctgcagttcctgaggaaaagtcagaggataaaccacggtcggttgttggttggaagaatgggtctgcttcgtcggatggaacctgaaaacggttatgacctcgtagggatcgaaagtaatacgaagaatggttgggatgaaggaaattcgaaagcccagtcgaatcgtcatgggctggaatagactgttgagaatgagggaaaggcgatgggatctgtggtcgatcgatgttgggggagagaagcgcaagatatgttaactcaagtagatgaaacctcggtcagttcatcatcgaggatgtagatgatagtcactgtacctgtcgtggccgtcgaatgacgaatgcatcacctgttccatacatcctggctattctggtatgaactagttcttcggtcaaagctatcaataccgactgtcatatccggccgattagaggagaaaggtaagagagaaggacgataacggtgatgtctagatgtaagaacaggaacaacttgacgtacgaatatggagagacctatacggggtgcaaggattttcaatccagatagttcctggagagagtcatgattccggtggtcctttttagtgacgttgatagatgcaaggtcatcgctttcaaaggatctgtctttgaacatatatcggtttggaagatgacatggtgggtcgtctgaaggacgggtgaggaagagtatattcagatgccagaacgcctttcgatagtgatatttcggagggacagatcaacaacagcaaaacagtaagctcagcaaatttctcaacactcccatcagagccgataccacctctcagctcaagtctcgattgagaaaagagatctagagaacgtacaagcaagattgtgatctacaaagtttattgtccaagcaatcccgcaatcggtggatacgttgtcagtatctgtcggaacaaagaacctcatgcacaccagatgatgaaagtaagtagaacacaccatggtcgttcctgccaaccaccctcctccaccccggatacctctctttccggcccagcctacccagaacacgatgaccgctctgatacatccccagcctgttaatctccagtcatcgcgaaaagcagccgccgtccctagaagcacgctagatcctagatcgatcacggctaatgccggtaaaatatacagtgcccatccgttcgagcttattgagcgctcagatggtaagaaggatgaggaggcatcctcagaaggaagaggatggataagaaggaacgatgattcagaaccagacctagggagagcccccaaagggttggacattgtatgttttccgactcgaaaggatgttgctcgctcttctcaatgtttctctaaggtcttcggttactaaccggcgtatgttgacgagtttgatcgacacaattgacatatctatcagcagagaaaatagaaaaagacaaggcaaaaatcaagaaatacaggcgaagggttcattgtacgtaaagaaaactcgtcaagaagtggctctaaaagtgccataacataagatggaaattaaatacaggcccaaacccgaaagaggtgtatgaaaagaaaggttacagtggaagaaggaaagcataaacactacactcaagcagacatgacagcgtaggcagaagcggacacagagtcatgcgagatagacaccttgatgttcttagctccaagcgtcttctgaagctcggtagagagctcgacaacgggtccagtagaggtagccttgacctcaatgtccttcaatgaagcaccggctcccttggactcgacaccgagagccttgaagacggcctctttggcggcccatcgtccagcgaacgaagcctgagcagaaggctgcttcttgcagtacgagatctcctcatcggtgaagtttcgggagacaaaggtctcgttccagtaagggaactccgtgatcaactcagtatccacaccaacaccagcgaccgccgggttcttaagagcgagctgcaaagcggcgtgctcggccggcttgggaagaccggtaggaagcttggaggcaaacatgtactcgttcttcttgtccaacgatgttcgaacggacgggttgagaagaacagtcatctcctgctcgggagtgtacggcggggcctccttgattcggaccaaagagttggtgatgagagcctcggagttgtacaagtagctcttttgggatcgaggagctcgcctggcaacgtactgctcgtactcagccgggtccaaagcagcaaacaagtgtcgaggatgcaagatcaagcagtctccaccgacctgtccgaaaccgaatgaggttaccatagcagcctgtagagagacatgctggatgggcttggaggggaagaacaagtgagtgttcttcttgagctcggcagcaatgttgtcggcgttccagttgggagggataagagccgattggaggacctggaagagtccgttgatttgccaggcagcggcggctcccttggggtgaccagtaagagacttctgagcgataacaggaacggcgttacccttggttcgacccaagtgcttgaagatatcctggtagacaccagtctcgttcttgtcgttagccttggtggaagttccgtggatggaaatgacgttgacagcatcgatatccaagttccaaacggcaagagctcgtcggagaggagcaaccgaagggtcctgtccgtccaacataccgtactgtccgagagcagccttctcctgtcgagcggcttccgcctcgatgaacgaaatcttctcctgaacatcgaagtcggatgatccagcctcgatctcgagcttgagaagctcgtgctcgttgtcgagccactgggcaatctgctttcgtcggaaagcaagctgtcgagctctgtacttgatgtcgaggaaaggtgctggggagggaccagagatctctcgggcagcagaaagaacacctcgaccgggagcaggaatggatcgtccagccttatcggtgtgggtagaagtgtaggcgatgataccctggataggggcacccatctcgagagcagtcttggcgctcatgacaacctggataccagctccctgagactccatgaaaccatctcgagtagaggtggtaggtcgggagaactcggtgggctctcgaccgttcttgtactcggtctcggtgttcgaggtagcctgcatgttggcgaactcgtaagaaccctcctcggagaaatcgtcgaatcctccagcaagcatgaccttggccttgccagacaagatggagtcgcaggcgatctcaatagactgcaaggcggtggcgcaagctccgacggggatcttgacaggtccactggcagagagaagcaacaagttgacccaaccggcaacggtgttgatgaagctgaatattcaagtaaagtgtaattttgttagtgtgaatcaggatgccgacaaggacctgaatttactcacgtctcctgaagaatgtccttctgaacgtccttctcctcctttcggtctttgaacatagcactgatggatcggatacctcccataccggaaccgatggcggttccgacctcggatgggtgaacatacttgtaaagctcgtaaggatcggtgactccagacatgaccaaagcctccattgtggcgaccaaagcccaaagagcagttcggtcggtctgagcaatgatatcgtcaggaagaccgtatcggccggcgtgccagccagtagggagttgaccggcgaccaatcggttgaactgaaccgacttggggaccaagattctggctcctcgcttgaacttgacaaaccactctccggattctcgggcccaggtatcacagttgtcgccctgctctcgcttgaacttctcggcatcctcaggagaacactcaaggggctcaagatcatggttgagctggacttcctggtagaaggccttcttcttgggatcgtaaccgttgaacagctcgggctctgtaaacaaggtaaagtaagttgatcagtcaatttgagccgtcgttgatccacaaactcatttgctaggaaaaagctagagatgaggtatactgaccgatgagtcgaataccagcgtgctccaagatgtccttctcgtacttggctcgaacatccttgtcatcgacgggttcctcagtcttagcatcgacccaaccgacgtaagcctttccactcttgagtcgaccgtcgaagtgcttgatgaaacccatgatccacgacatctcgatgagaccctcgatggtgaattctcctcgagcctccatctcccatcgggtcctggaagaaccccaaggtccgacctcagcgaaaccggtgacgactatgaccttatcgaggtcgaccatacctctgcaggcgttgagcttctcgagagtgttgatgtcctccaacttggggaagtcgtacttgaagttggctcgaggcgcgatcgggatcttgtggtgaatgccttcggcgtcgactccgttgataaccttgaaatcagcagagttgtcgatcgcaacggctcgtcggagatctccagtaagcttgagttgggttcggatcttggtggtagtctcggcaagatcaggcaatcggtccataccaccgttcaagtcagcccagacaggctcgatctgagtgatgtcgaacaagagagggtgcatcaaaccaagaatgttgaaggccatctccttggcagagaaagttcggacaccgagcttctccagaccctcggccacagtgttagtgggacccatgagtccggttcctcgagtccaaccaatgacagctccggcaagacagaggtactctccccaagactcagactgccatcgctcgaacaaggtctcaagagagatcttggactcggcgtaaagaccgtcgttaccgaaagttccgtggttgggggaaagaggaaggatgacctgagttggtcgagtgacgaagtgtcgagcagccttcttctgcttgacggctccgaggagtcgcaagagattgacaagcatgactcggtgagcgagctcggatcggtcgtccagtccgtcgatctctcgaccgttctcgggaacggcggcgaaaggaacgatgtagtccaaatccaaagccaaggtcgagtagatgtagtcgaccaaagcctcgacgtcctgcttggaaccctggttgaagggaacgacggtgagggcagatcctcggcttccgaactcctggaagattgtctggtagtactcgacagtctttcggctgtatcgggaggtggtaacaacgacgttcgctcctccagcaagcaatcccttaaggatttcgactccgatagagccctttccgacgccagtcaagagggcgttctttcccttgaagctgtagattttgaggggcaagtgacgtcagaagagaaaagatagcgttgaagagaaaattggaaaaaataacgaacgtagttccagaagtagcaatttcggtcaaaacatccaagtagacctcggtcaacttggaagagtactgccaagcggttccgacctttctcttcaagtgcagcaaaggaagcttgtcggagatctgaccgacagccatcgactcggagatcgccgcgggtcgcatgaactgagaggatgatcgtctggatcggccagcggttcgagtgagtcgagactcatttcgagccaagttcttaacgacctcgccgtaaagagacttgatggcggccttgttacctcgggagatttggggctgagccttgacaagcttgtagagctttgagacgtcgttctggaccttctccaagttgacgttctggttgggagagatctttccaccctgggccatctccttgacataagcttcgagcttcctgacgttctctcgaacgacctcggaatagacgatgtctcccttggcgctgacctcggtgtgaggggcggtggggaaggtcacgtctttgtagacagggtcctccttgagggcctccctgcagttgtccaagagctgctgtccgaattctttggccagcttgaaagtctccccctgctcagaaacacactggtcgacgtggtattgcatgtagtcgataagagtggggtcggctcgattcatgatagcgatgcatcgcgaggtgatctctcgatcgacaccggtcaaccttccaaagatgatatcgtaccacatgatcagagcgtcctgtctgacccagttccagtgagaatcgaagtgtcttgccttggctggctcgaaaacgggctggatacccttgatgtagtcgtctccgtgctcccgatctatgctgtccaacttgtcctgaagggcttgggcgttggccttctcctgctcgtagagtcggtgaccggccctggggtcctgcttgagctttcgcatgtaaaggtcaacgtgctgagcgtggaactcttcttgctcggcctggaacttgatgaactcttccgagttgatgacggctccaccacctcctcccccc

SEQ ID NO: 382 - DNA, 9478 bp, Xanthophyllomyces dendrorhous
ccctcctcctcctcctccgccaccggaagaaagagagatgccagcctgctgagcatacacggcaaccacagaatccaaccaagccttggcctcggcctcagagctcaatcgcttcgggggctccatggtgactccgagaagcaaggcgccatcggttcggaacggaccaagaccccaagtcttggaaagatgtcctttagcagaagaaaggttgaaacctccaggcatctttcctccgatcattcgggagaccaaagcgctagtgcacttgcccaaagtaccggcgtaaccgaagttaagtgcagctccaagctcgtccaagggaagctcctctcccttctcgggagccgaaccgaactcaagctgaagatccgacacgatctcgttctggagggtagactttccaccgacaaggtctttgaccgtcttggagagcgggatctcggccacctgcttcttgagcttctgggcgatgatgactcggacggtgtccacggccttgagcggctcatcagggatctcagcagcgggaccggccgaagcttgaggggagggaggggcagcggcagcggcaggagcggctgacgcaggagccgaagacggagcagaagccgcagcaggagcggcatcagcagaggcagcttccggctcggcatcttcgaactggtagtaaacctccttctggttcttggcgtgggcgagaatagttcgagttcgggagatgggtccatccttggcggcatacttgagagcgagcgttcgggaagccattccagtcaatgttggagaaggaccgacctcaaccattcgctcgaattgatagtaatcaaacaagagatcctgagtctcgatccatcgaacgggactggagtgggaaacatatgggtcaatcaaatatatccgcgagacatgggatatgaacggggcaagcaaagactcacgaagcaaactggtaggcgagaagctcgatgaggatgttgtaggcaagtcgttgacgatgttccgaagcgtcccaatcggcgtcaggcgtcgtgcggattaacttctccattcggggagagcctgtaaattgatgagtgtttcttcagtcatgatgctgacaacaaggcgtattgtatgggcatgttaagcacttaccagtctggtcaagaatcttctgcgcgtaggctttggacacctggaatgggtcagcgatcaagttaggaatatacaatccgacgagaagatcggggttcaagtcggcggccgacaccttcttagaaaggtacttgaggaagggctgcactccagaccagaggtacttggagtggaagggaacgtcgataccaggaagaggaatggtggctataggtatagatcacaacggagcgaaacgatcattaaacgaatctcggcagaggaaagagactgtcaagtgggaagagcgcgtaccaaatcctcgctcgaggatcactgaaccatcctccttagccttggcttgagcagttccaagagcgtgatcgatgatttggttaagctgtaagaaagatacagcgtggtcagtgacttggtcaacagacatggtccgagaactgactgagatgactactgacctttgtgcgaagctgctcgactgagagctcggcctgaaatttcttcatgtcaatcttctgaaccttgatgacgttcaacacgtttgttaatgtggccagggccatgttctctccggcggcgacgtactgagtacctgttgacaaacaagaacatggtccaatggtatgtgagccatatgcgctcaaaacttccgatggattcccaccctgttttctccgaaacaggtgaatccagtaggacacacacaaaacaacaaaacaaaaaggacgaccgaccttcgacgttgaagttgacgagttcgagcagcatgcccgtcctatctgcgatcgaagcgacaagctctcggagaagagtctcctttcgggcgagttctgcggccatggtgatgaaggactgaagtaggaattaggagtgtgagagatggagagagaaagagatgtgtttatgtatagatcgagaagcccaaaagaagagaaagaggaaggagaaaagcgaacgaccgaaagcacgaagagatgaagttaggaggaagataagaaaccaaggacacaaagatcgaaggtggatgttggggggattaaaagaaggatggtaaacgtgaggacggcaagttcaagatgtttaatctcttcgcgctttggccgcttttttttctgttggggagacacccggtgggatcccccagcggttgagggtgagtaaccgtgatggggagggtgattccgagaatgttacatgccacgtgtgagctgtgttgggctgtaaccattgaccgccacatactcttaattctttctttactcttaatttcgatttctttctgatggcattctgtctttctttttgaaagagatcaaccgtgtgtcggtctgtgtagattctttcttctttctctccagtttggactagacgctcggatagatgctcgtcaagcccacctcgagagcgctcaggacgttgctggaaagaccgtcgatcgtttccagtcgtctcgttccttctcgcgctttcacctccactcctatccgttctcgcactcagcccacctctcgctctgaacaccaatctggaaagttcgtacagcagcacaagcagtcgccatcttcatcttcatcgtcatcacccaaagttttcaagcagaaatcaccgtctgttcaatctcagacccaagtggaggaaccatgggcgaatgaaatttcttgggatgacttcctttcggacgaagtcacaaaaggaaacaagcagtattcctatcagaagttcgacgacaagggccagccaattggcgaaccagtccttcatgaggatgaccgggtcatcttgtttgagaacggaacgatcgtcgaaaccaccgagtatgtgcccaattacctttgctcacgaggctttcttgaatcaaattcttggatggtctacaagctgacgtgctggagttgctcgttcaaagtaaagcaagctcaaacttaggtgtcgtgcttgacaccgtcctcttccagtctcaaatgaaacttcgaatcatctcccctgaaggctcgatcaactacctcagtcctacacgagtgaccttcgcgtttcaacataagcaagtcagcccgagctgggtcgcgctttgtggacctggggacgcagagacccgagctgacagggtcaactaccgagttggaatcgccaagcgagctcggatggtcctaaaagagaccgagggtcaccgtgtcaggcttgatggagtgatggaaggagcatgggagcgacttaggccgaaggaccagggcatggaaggatccaggcggctcatgacgactaaagaaatcgttagagaagtcatgcgagaccacccgggagggcataaggaagaccttgaagtcatgacctatgctgtccatagattcctgatgacctgtcccgaaaggttcatttgtgaggaatccggacagtggaagagtctgcggtggtggctcaggagtgcagaagaggtacaggaaatggagaaaaccaagcagtgggctcataccaagtgggtctctgattcttcttttcgtgttgcgcttggtgaaaattacctcattcactgaattgattaaccgtccgacatcaacagtgacccaagaatctctgaatttgtttcaaaatgtgtcaccttgatcgatcattctcgacctgccttatttgccatgccccctgctcccgaagaacacgtccttccgagttttctaccccaaaacacatcgcttccaacattttctccctcagatctccaccttatctctcatatccaaaagtctctctcaatctcgaccaagcagattgaccctttcgcatccacagtacctctcctgttgaagcagaccgagcgatatggtgagatcatcacaaaacacacgatccgtcaattcctcgtcgagatcggcgttcgaaccgaatgggatgatcttgcggccctaagtagtagtttagaggttgccaaagaactcgggttgggtaaaggagagaagagaccattcaagctagagatcgatgatgggtctgatgatctaatcgagcaaggcatgatgcctggacctggagaagattcattagcgaacgtaggaagaagttctcccatacagcttttgacagaagagaagcatgcttcttccacatctacacccaaacccgcagccatggccacaaacgcaccgactccagcatcccacccagctaccgtctctccgacttctcgatcctcttcagtgccgctcgccgcccataaatccaatacactgcttggtccggatgagctgtaccctactgatccaatgtcaaacctgcgtcatgatttcggtgatctgcccgtattcgttatcgatgaccctaacgcattcgaactcgatgatggagtctcgatcgagccttcccggcccggattttgttggattcacgttcacattgccgatccaacatctatccttcacccaaatcatcgtctatcgaaggctgctgaacggatgggtcagaccctttatcttccacaaggtaacaggtctcttctacctgatgatgtctccgtcgacagattcagtttgggaggtcaagggctcgatccgatcaacggccagccagctttgaccttttcggctgaagtggacgagaagatgggtgatatagtgaactacaaggtccgagcaagtaccatccggaacatcaaggtgacaagctaccaggcggtcaacgaggtattccgatgtgaaacctcgccgatcgcattccctcttgggttgacgtacattcgacccaaactaaaaaagcctaagcaggcagatcctgcttggttcccggacttgaactacctatacagagtctcggaatctatcgcaattcgacgtctcaagaagggtggaatcagttggtccctctcggactttagcgtcgctttaaacccgtccccgccgccgtctctgcctttggatgctgagcccgtcccaaagttcacctctggctcgcccgtggtggagtatatcgttcaccctcaacgaaaactggcaaacgatcgagcccagctgatcgttcactcatgcatgaccttagccggtaacgtcgctggtcggttctttgccgacagaaatcttcccgcgccgtaccgaacgagtccgtctcctcgtgcggcccaacagtcagcattggaggagcttctcgagaaacgaaagtccatcaccggcgaggtcgatccttacgatgtagctagactcggagtggtgtttgtagccggtcgattgtcgatgaggccggaaagccattggatgatgggtatcgagggtgatgacggaggctacgtccgagtgacgtccccccttcgtcgatacaccgatattctcgctcattggcaaatcaagaacgctctcttgcacgaagccagtcggttcagtgttggtccgtcttcggtcaagaaaggagttctctggaacattgccgagatggaggagatggcttcttcagtcgacctcacggttgccttaggaacttccgttcaacgtgaatcaaaagctttctgggggacgtatgcgcttgagcgatatgctcgtcgcgaagacccgttgccgaacttgtccgagaattttccgccaccgcaaaagacggccttcagtccatcccctagcccaacgatggctaggctaggtccgttcgaagcctcgttcgttcttcaaccttcccaggtgacatatgaggatgccggcacggccaaggtaacggtgatgattcctgctctgggattacagcttgtggcttaccatccggtcacaaagatgtacgaggctggagaacgagtctcggtcttgctcgataggtttttgttagggccgcgctcttctgtcacgggaacgattgtcgagtgataaagctgtatatttgtattagaagactgagcaggagaagaacgcgctcgtcccttttttatatatgtctatgtggaaatttcttttctgacttatcgccttaggtcagggttgcgtcaaaaaatctgaggcggcggacaactcaatgagaaaaaaacgaagattacccgccgttaccgaaaagtctcctacgattcgaaagccatgaatttgagcatacaaagcaaataggccagtcgtaaagcgtcatgaaatatgtctggtattaaggccattaaatctaatcgtctgcgattggaacctacacatggaacacaatacaatcacctccatctcagcaagttatcgagatagacgcgaatcgttaggctaacagaagaaaggagggcttacttcttcttccataaaccgaatgagttttacccgaagttccgtttggtcatctcctcttaacacatcgctcacgaaggatgcttcgacctgaagctggacctgttacccgattaagtttcccaagttgcataaatgtttctttcttgaggataagaatgtagaaaaacaaaggactgaccatttctaaggctcctcttaacacaccgcagagcacgttactaaaccaaagtccgccctcgatagcatccccaggtagttccaccatatccgctagcgggttatcttccagtatcaacgagaactcttgtgggctgcccgatcctgttgctggtgggaaggtgagggtaggtgtgatattgaggaacgatttgaatccaactttagagatgatttcgcctgtttgagtgaagtcagtacatcgttgaagagatgttctagagaggaaatcttcgatcaaccgagtgccaatattgtatcccctttgtgtatgagaaaaatgcttggatcagaactcggtcggagagaacgatgcaaggaaagatataagcaagacataaacgagggtgaatagaactcacatcttgttcagctgcttgttcacctcggcatagtcttcgtagtctttgatcaattgaacgactagagctccgtatgtcatcgtgaaaatctctgtgttctacgaattttctcaaacacgatttcgggcttattgagcctatgaatctgaaccgaaccggtggtcttgtcatgtcaaacgtaccatcttctcccttgtcttccagagatcatccttataagagaaaccaaacgtagaattgtcagctagttgtgagatggccagtaaagctctgaccaaacatactcctagttgcttgtattgtttagcggttgctgacatggttgctgattgtgtcgagtctccgaacgttagatgaatgtttagagaatgcagatcgaccagaaagaagcgttctgcacacaagatcatggccatgactggtgactaaccgttcacactacatctaactttcgaggcactcgagctttgagagagaaacttcttcatctttcacaccttctatatcgctgttaactttccggatatcgctcttactgatgccagggtacagtctgtctatcttaaacgatcaacagacatcgtgctccttgcttctttctaatgctaaccgaccgattgcgtatgaaattgtgccagatatgctaactttgtaggaggctcgaagcacaagattatcgaccggcgagttcatcccgagcgtcacgctcagaagaagtatatcgccgcccgtcggtttccatactttacacaaagagagaaaggtctcgaaaagaaggacgtggcgttctctttcgggtgggcgccagtaaacaagtcgacagagacggatgctcagaagaagcgaactctatggcaggaagggagctctaagagacctgcgcatggccagatgcaagacaaggtggaactgactgccaaaaattcgatggtgacagaagctttagactctgatccaggtatttgcactatcagttcctttctcctttgccaccatctttcgcacgccttggctctatcgaaaccctatttgaatagaatcgctgatgaacgaatctgtcagtcaattcttttgacaagaaccgtcggcggctgctggcggagacagactggataggtgcagaaatgatggaccgagtagttactccattcagagctcctatatgtggtctggcattaggatatggagatccttcctcgcctagctcggtaagcgccccatcatagcatgaatatatgcacgaaattgtgcctatatgcggtctccatctgacgtgaaagcttgaacggccatagaatgcccctcaaccgcatgactcgagctctgttgctagggattcaagtcctccaacgagcaacagtaagcaactaccaccttacaggtttgttgaaccccggagcaaatctcgaacaactagtagcgcgcagcaggcggaagaggaaagacaacattggaagcttgatgatcaatcagtacgggatcatgagtatatgcgctcgaattctgtggagagtgatccatttaatcatcgctcgcctcgacctgatcagcgattctcatctggttatccaattttgaaatctcctacgccttactgcaatccattcctctctatgtctgcccacaaggctatgtctgaagatgtttcccgagaacattctttgttgcatcctcaaagtcaatctcaacagggtcaggctttttccgaatcacctggcttcagtgtcttgaggacatacctttcctgatgatagacttgttcgtgtgttattcaggtccgatcccgatcatgcagggcacaccattagattcttcatatcagaccgatagtttgaatgagaacgacctaaacttggaccagttgtctgcttcctcccactcgttcactgccggccagtatttgttgaatactttccataatgactctttctatgcaccctactcgcggtcctcctcctccgttaaacctgacatcgttcgatacgagtctctcttgccgaatccttttcgtgcactttctattttgacggggttgccggatatctctggagacgcgccctgacgtattgatcaagattatgttttcaaagctgctcctatgcattttcatcatcttggatcatatctgacattctgtatatcaagtcgtatgtgaagaaaaccagagaaaacacaatgtcggtgtcggcatcaaacaagttttccacgtcaagacaatataacgctttccagtcatctttgaagatgcaaacatctcaatacctctttccagtgagcatcactctgattttgattagggagaaaaattctcggattcatattaagcacattgaggtatgtatacagtctcatgatactctaagctagattggtataacgacgggacaaataaccagtcggttttggctacaaagcctctagtgggccatgacagggttttttccctgttctgctccatcttcagccgaactcaaagcgttctttactggtctgtagagcacaaggaacccaacgagccaaagcaagttccatcccagctcaaag

SEQ ID NO: 383 - DNA, 3614 bp, Xanthophyllomyces dendrorhous
  misc_feature (3537)..(3546): n is a, c, g, or t
ctttgtgcccgagaccaaggggctttctctcgagcaggtcgatctgctctaccgagagtcgaccatccggggctcgaacgcctaccgaaagaggatgctcgagaccgacgagacgttcctccaccacgaggttcctgtcagagagaagggtggagagaagcacgaagtcgagcacgtctaaggatgttttcgaaccattcaactcttcattcctctttttgagatttgattgtcttctagtttcattctttctacttgttcactcgtttcgttcgctcatgagtttctaattgccattcaaagctcctttgtcgttcgtttgtacttgatacctcttcccctttttttatttgttctcgttcttgtttctagtttttctactgctactttaccgggcttgttgtaaccttaacactgtgatcacatgtgcacactttttcctcccctcgaccacgcgggcccgttctggcgggtcccgtgactgactaaaaaactatctttatacctttgacccgggtccttcaattcgggctgacccgagtttagatcagaattgactccctctcggcttggttaaacgccgactgagacaaatttgtttacccgctcgaccatctgttcccaaggtttttacaactgacgggatcatatagaccctttgcgggatcggctgctaacccataggcaattcctttttgacttgacaaagcggacatcatttggtatagatggatttgacactgtttgggatcttgttggctcagcatctggtaaagatcggggaaggattggtcgatggatggtcggatctagctaggaggaaaacacgttgaagtagggttgttggatcatgtcggtcgagcctgttgaacgagaaaccaagaggacagggcgatcgaggtcgagaaaagaacccaagatattctcaccgagtattacaacagatgacgaaccgcgcgcgaagtcttctgaagaaatagtcgtacaaccgacatatacacacatacatatacaaacatatacatatgcatgtaggaatacatgggttatcacctgatgggtaggatgattgaacatgaaagactgacgacgaactttccggctttgatttgccgagctctgagattgtctttatctgcttgagtttttcgaatcaattttcctctcagtttgaagcaatagctacgatcacttattttctgtcttcttcttgacgattcacgtttttgagtgcgccgatctcttgttggatgaggaccacacatattgtctaacccgggttctatactaaggatcacacctggctggatgactttcaagcgggatgtggacagatcgagatggaaactgatttgttaatagaaaacaactacggggatatttcacttccagtatttgactataactccagaactcgatcagactatggaagtctagtgtggcccagtcgttgtaggtattatgatttgtcgtcggtctggtctggtctggacttggaggaggaaaggattgagggaacgggaagggactgctcagtgatttgcacttcttttctagaggtcgccttgtagtaaaaggtgagactctctttcgaatgactcggtcctctcaaccattcccgcttttctcaacaccattgccgatctagaccttcatcgattctttttgacgcaggtctatattcataaggctgatcgcacttgccctccgccgtctcgtgcaggtcggctgttccggttacttgctttcgactctcttctctaactcagtccgaaaaatatgccggctcgttcgccgccgttctgaccggaaaccgctttcgtctgcctttcctttcccaacgtgtctctccgaccgagcatacacacactctgagcatacctgggcgacttggccgaagtcgttcccgtacaagcgatcccataggttctcgttctgtcgggtagcttcctcgtcctcctttttcctataaagaccatccagtccagcacccatcattttcttctttctctcactcatccaaacaatcaacacatcctctcttcttcaaaggagtttctcaactcactcagcaacaacaaaaacaactcgccttttccttcttacactacttcaacatggttcgtcgttgtcccttatctctccgttcccttcgcatgttaccgttcattgctaacacttgtcccttcaacagcctgccccaggaacaggtgccggaattgaatccggtagcatggtcatcagcatcttgatgaccgcttttgccgcttttggtggtattctttacggtgagtcccccattctcccatgtcctcctcaagcgcttccgacctaatcgactgcgtattccttcaggtttcgatactggaaccatctctggtctcattgccatgcccgactggcttaagacgttcggagcttacggtaagtctccttgcggatcctccgatcttcatcgtacataaatctgaggcccctcttcgttctctttatcctctagactccgctaccgacgcctatgtccttgctaccaacaaaaagtctcttgtcgtctctattctctctgctggaacattctttggtgccttgctcgctggacccgttggtgatagactcggaaggcgaatcggtctcgttgccgcttgcggtgtcttctgcctcggtatcggacttcagctctccactagctacggtgcctttgtcgccggccgagtcgttgccggtctcggtgttggacttgtctcttgccttgtgcccgtacgtctcttgtctctcccagtccctctctcatcttccgttccaaacactcaatctcactttgttctcccgattgtagatgtaccaatccgagtgttgccccaagtctgtccgaggattcgtcgtcggttgctaccagtgggccatcaccatcggtcttctccttgccgccattgtcaaccagtgcactaagaaccgggccgaccactctgcttggcgaattcctattggcattcagtttgcctgggccgccatccttgccaccggtatgatcattcttcctgagtctcctcgatggctcctcctcaagggcaagaacgagcaggcccgaaaagccatgtcccgattgacttcccgacctgttggatctcctgaggttgaccaggagtgccttgacatcactcttgctttggaggccgaagccgccatcggtcagacttcctactttgattgcttccgaaacaacggcgcccgaaacggtctccgactctggactggtatctggctccaggcttggcagcagctttccggtgtcaacttcatcttctactacggaaccaccttcttcgaggcttctggtatctccaaccctttcttgatcaccatcgccaccaacgttgtcaacgtcggaaccaccattcctggaattctctccatcgatcgactcggacgacgaagcatgttgcttgccggtgccgcagtcatgcttgtctgccagtacctcgttgccatcattggtgttaccgtcggtaagactgatgacgcccagaccatcaactnnnnnnnnnntgaccgcccagcgagtcatgatcgcctttgtctgcatctacatcgccgcctttgcttccacctgggga

SEQ ID NO: 384 - DNA, 311 bp, Xanthophyllomyces dendrorhous
gatggcaagagaaaagaagagaggcccgaacggatcgccctgtctgaccccctgctgggaagccatcgtgacgacctggccgtctgatccggtacagaccagagtggtatgctcaccgtatgcccaccgaccggcccgatagagctcgggagcccagtccttgagtccgtcggcgaggtctcgtctgctgacagtgttgaacgcgttagaaaagtccagactgacgaggtggttgtaagtgccacggagatcacctctcgttgcctcgtcaaccagtctgacgatcggctcgactccgcccttggagccga

SEQ ID NO: 385 - DNA, 679 bp, Xanthophyllomyces dendrorhous
ttaccaatgccagtgtcaatgccagtcacaccatcgactggtgcgaccgacggtacacctggccatggtctgccgggtgggcctgacagtcatcggatcgattagctcagttggttagagcgtggtgctaataacgccaaggtcgcgggttcgaccccctcattgatcactttttctttctttttctaattttcgccatctttttttgccatcttttttgcacccctcctgttctcgaccgttgcggtctgtgtggcattgttgtcgactggcacgctccatggtgagcgatgcagtgttgtgacggtgtgacgatgtggtggtgcggtggcgacgatgggaacgcagatatacacccggctgtgctggacagtgtccgaccagacatgggcctatggtgtctgggctgggctgggaggcatcgtgcatgcttggtgtagtggtatcgcgccatgttagggtctttgcgccttgtctcatggaggtcctcagttcaatcctgggagcgtgccttttttccttttcctttcgttctttgtttccttttcccgagcgcttcctgtcgctcttcgttgttttctgccacttttcactcactttttgccactctccgccactttctcggcagcagacaagcgatgtgtgcacccggtggagacgtctctgacgcatggacaag

SEQ ID NO: 386 - DNA, 840 bp, Xanthophyllomyces dendrorhous
taactatccacagagggagaggccacagaacggttttcctctcccgtcgggtcccacgcaggcacagaggcccacccggcaccacaaacttgagtgtgttattactttatggcgtcaaccgtttagtgtgtttcgtgacgcagcgcgctggccaagccggggtgcattgaatcgctttgcagcagactcgctcacagccaccggcaaaccagacacgccttgccttatcccccggtactcactagttctcagcacactcacacagtcctcggcaggcgaacccacctagactgccctcatggccgatcgtgaagactactaccattgagccagcgattccagatgaggtacgatccccaccagtctccgtcccggaggacgtgctggcatgttgatcaatcagactggtcggctacaacggagcggttctccgaatgattggttgcgcgtcgttctacccatagggaaggaatccacaccacaaatcatcgcgcccacccggaggctaccccgggtaagcgactgcttgggttgcgagtgagcaccaacgacacgaatgccattgccaccgtccactcgagagctccatttactagaggtccgggcctgatctggtcgagggggatgctgagtcacttccctgagccgttggatcagtttccgccgcgggtcggtctttcgactcgactgtttcgttctctgtttctctaaacaaacgggggggtgtttgacgtccccacgcctaggctagtaccgctacgtacttcctattcgacagagtcctaccgggaaaggcatgctgtggttagcagcgataatctctcagacgatgcctcaata

SEQ ID NO: 387 - DNA, 338 bp, Xanthophyllomyces dendrorhous
aaaagtactctgactcatcttgtcctcttctctatgctctcaatcgaccatagtccaggacctgaaaactttacttcgaacggaagatgatctgcatcggcaggaggttcgacgtgcgcagggattggatgaagatgaacgacccttgacgcggagacttcctgcttacgacggcaagcacttctcaactcgtccgttgcaagagctagaacgggtcgagctaggtgatatgatgtggcacaagatccatcatgtgagcttcttcccgtcttatctctcttatcttcgtcttatccttaccattttcctatatctctatgcgacttgcggtgaatcag

SEQ ID NO: 388 - DNA, 490 bp, Xanthophyllomyces dendrorhous
tttttggctccacttcaccactctcagggtcaatatctgctcattcggatcgtctctcgtcccactaggatcacttccatccgtttcatcggccaggacccgtcaggccgggccgagctcgtcgagctacaaacggctgtcgacatgcttgtccagaccggaccggaactggacgcgctctatcctatgggcggcctgctagccatccgggagcctcactatgttcgatgtctggacgaagacatgatcgatattgctcattggaaacgcaccaagataacgaaggtatccaggatcagggttgagtcaccctcggatgttatctggctgggtgcagacgaccgacttgtcagcgagctcacatggatgagtccacctgtctgtctggcgaccgaaacaaatgctcggagactgactgctgaacatgcaaagtcgatcggagacgaacggctggacaaaggatggctcatggcggccgagcgagcgtata

SEQ ID NO: 389 - DNA, 2775 bp, Xanthophyllomyces dendrorhous
cgagggtctgaccgttgacagcaagcatattgtgctcagacttgaccgagcgcactgccggatccgactctcgcggttcagaggcgcgtttgtcgatggcgagcatgcactgcgtggccttcttgacgctgtacgcgcggaggaacctggacgggcggacttggcccagtcggatctgctgcagaaggcataccactggcttgtgctagcttcgatcggtctgcgcgactggtcggtcgcatatgagcactgcactgtgtttgttgagcggtttcctgattatgctcctgcgctggacttgctggcgttcacacaagccagagtggacgaggctcggacgggtgtgtacgactggccgtcgatctttcggggtgatctccagccgggggggacgaggaatgtagttgctgactgggtgtcgccttccttcaagataggccgcagccctacgttaggtgggatccggggcgtcatcgctgaccgaacgatcgagcgaggcgagctacttgtggtgtgcaagccgtttgtatcggttgacatgaaggagccaaaggaagggccgctgacggagctggtgaacgtgccaattcaacaatacgcttcagggtctgcgcatgcatatctagtacgagcgatggtggacaagattcaagacgaaccgagggccttggacgtgttgaagaggctgtatgctggaccgggatcctcggatccagagttggtcgatctaagcgccttcgaaccgcctggcgcaccgggcgataccgaggatgaggaggaggaggtaaagtcggtggatgtggacgtgtcgagactggagggagtcaggacctacagctcttttgcgaccgggtcagtcatcatcgccgagaccgggcccactatgcatggtccacatagaaatgagccgtgttcaggtacgtctcgtacttttgcctctaagataatctcttttctctctgtctactacgtttttttgccttttttctctcttgacgattctttgtattgctttttgtgttttgatgtatcctgtttcatcaaatggtatcgattcgtcatctacgtaggcatctaccttgtcccctcgttgttcaaccatgcctgcttcgccaacgtcagctgggtattctggggcgatatcatggtccttcgttcctgccggactatctcgcccggcgaagagctgacgatcagctacttccctggtagctcgttagcctggcgaacaacgttgattggcaagtacgagatcggtctatgcgactgtatcctgtgcaaggagaaacggcttgaccccttggacgggcgtaacatgtggccagatgagctcgaatgggctttggaatatgatgaatacatatctggagttgccccgatagtcaatggaaagatgtataagccaccgagaagaaccctcaaaagggtcatgaaaatggcccgttctctcgaatcaaaatacgatcccagacgctcacctagtttcatgtctgagctctgctgtctctataacgccttgtcgggccttcacatgatgaaggtgatgggcggcatgaaggaccccgaggatacgttgctgttgatggagcaagcggtctactggaagaaacgtgcgcttgagtgttgtgggttcaaagggatagagtccgatggaagaggtacactgacgtctagtccgttcgcatacgagatggaatgtttgagtatagggttgtcgatcgtgtcgatactcggcagaatggataggaagaaggatgcgcaacgatgggccagagtggtgttggagatgcatgacatcgttttcggaggtgggaaggaaacactggtcgttctgtggaggggtccgttggactcgatgaacttgcttccgtacttcagttgacctcgtgtggatgagatcgcatatgaatgcatgtcttgctttgtatcacaacagcgatagtactagggccaggtagtcgatagcatatggtgtcttcccgtgtgtcaagctagacgcatcacgatcgagtcgaacaagcagaggacacagagaatcttgtcatttatacacattcagtcctcagccttcgttcgcttctgcttgtgcttatcagcaggcacaacttgctggtgcgcggctgggtgtcaagcgagttctgagatccataagtggctgtgttgaagaaaagaggaaccaatgtttgaaaatcatttgaaacccaaataaaaggagaaagggaaagagagaaaaaacagtcagaagtaggcagaaaagagaacgaaagaaggaaagagaggacgaacatggtttcctcacatttctgacacatgaacgtgatggcaagatccgtatatccagctcgatcggtatatcccatcacttgcatgcggagggcagaacaaggaaatggatcggaccggttcgacgagcgtaagcctcgatcgcatctgacatctgccaattgacgacaagcgggacgatcagtacatcgttccgtcgtgcagcctgtgtgagcgagcgcagatgccgggcattggttcggccgtgagctgagtgggctcatcggaaactgacaaaatataagagagccgaatcagattgtcggtgaagctagtatcgcacgtcccgtctcttgagacttgacaaagcatctttccgccggtcctgcgacctgttcgagtggagcgccataacagaagactgaagctgagtatgggaaacgggaatcaagtcaacagagtcacgtacttgaatcagcttgtacaagtcaaagatgaagagaggccaagggt

SEQ ID NO: 390 - DNA, 1389 bp, Xanthophyllomyces dendrorhous
acagaaagggaagtaaagaagggcagagaggaaagcagaaaagtcgaagagacaacggacctctgctcgctgagcgctctcgagaatggtattggccgtcttcttctgtttgcgaatgattaccatggacggtgtcaagccagctgtaaggggtatctgtatgttttgtcgttcatcgcgatgagcaacacgccagagcatagtaaagcagaacgacatataaacgatcggaacaagagagcaaacataggtagagaacgaaggacagatctgatctcatgttgtcgtctctctggacgagctcgacacgttgttggactgtatcgactgtacggattgtaccggctgcatcgacggcctgtcgagtttacaatctcaagcacccaaatgcacccaagtgttggcgatcactgcgttaagtgatgcagaacatgaggctctcatcttgatcactggaaaaaggccatggcggacgctggaggatagaacagaaagagaggatagatggagctgcctgaatggaaacaagaagaggcggtacacacgaccaagtccgttccaatagattctttgaggtttttagtagtcggccgttggagatcaaatcatgtccttttttcctttatcttatctctccgtcttgatcgctttccttttccccttaaaaccctaaccaagaattcgttctaccatatgcttagtttcaccatctccggcttttcttcgaggccgctcagctttctcgttcaccactatccctgcacataagcttcgccatccttccacttcttttctccgtctcggtcaccaccagaaacccgctcctgtgggctgggcctttcgtgacatcttgaactcgatcaatgccggagtagatggagctgcctgatctgtagatctactgctctcagctgaagttccctcgagaaatctctcgaatgatcaagacaacctgatagatcccaagatgctaataacattgatgtgctctatacgtctctgtgatccccggccgctgtcgagggcgttttctgaaccagactgctgactatcgcgcccttaattcaccaagatctttcgggacacgagcaggctgattgacggtttgtgaacattaagaaccttaggggctttcctttgtcaagctcttctttttcggcttgcttaccaccagggagggcttggccaaaggtgcgcttatgatcggcccccttcgttcggacggcttcaagacttgtggaggctctatgaaaccgatccgaaggcgacatacacttgcgtgcaacaaggattttagttcaagccggtccagtgcgatgtcggccggccggaagatgacgaacgtcagatggacgattcgtatagttgggggtactgacaagtcggatg

SEQ ID NO: 391 - DNA, 407 bp, Xanthophyllomyces dendrorhous
cgattccggagagggaagcctagaaacggctacccacatccaaggaaggcagcaggcgcggcaaattacccaatcccgacacggggaggtagtgacaataaataacaatatagggctctatgggtcttataattggaatgagtacaatttaaatcccttaacgaggaaccattggagggcaagtctggtgccagcagccgcggtaattccagctccaatagcgtatattaaagtttgttgcagttaaaaagctcgtagttgaacttcaggcctggtcggccggtccgcctcacggtgtgtactggtcggccgggccttacctcttggtgagccgttcggtcgttttacgcggccgggcggggaaccaggatttttactttgaaaaaattagagtgttcaaagcaggc

SEQ ID NO: 392 - DNA, 1869 bp, Xanthophyllomyces dendrorhous
accctaaccctaaccctaaatgaacgagaaaatagcagggctcaactgagaatatgttagctatttatagtatatcgttacagatacaatgatatggatgaatcgaaggaaaacatctaacttcaaccctctaacataatttagacagttctccttttgcttctgttccgcaatgcaataactgaataacgcgactgatgtgcatttggttcttgaaacagattgaaggataatgtgtctgtaaatattatctgaaatccagcctgaaaaaatcgagatctttctcggtttgtaaagaaaatctttggatgatcaacagattttttcactttgagttttcatatcaaaattttcctgcctacaattctgctttacaaatggaacttcaagctagtctacaaatcgaagctcgcgctattcagatgctcgattgtttgaccagagattattaacgagaacaaggacttatcgaagatgttggttcgtaagtctttctccacgctccttgaatagaatgacgattctatcccggtcagaattatactgagatcgccaaattctgataaattcaattctaatagcttatgttgatctcgtactaaggtttgaaagcgagggtgaacttttcgctttggcactcgctctcagtcatgtcctcactccttcctcaaagctatatacacaccaccctagtgtctcggtgagactgaattgaggaaccaggaaaacagaagggaaacagctagacgttctacacgttctacagctgttcaaaagtaggctcttggctctccgcgtaaaaacgaaccgagggtgatgcctcaagaagatatagctatttgaagctggaataacgtaaagactgctgagattctgaagattattactgaaataaaagggtgaaaatggacttttcgttctggcacttgttcccaatcaagtcctcactggtttcccaaaccatatacacaccacccaggtgtttcagtaaaatggattgagaaaccaggaaaacagaaagggaacccgctagaaaatttatagctcttcggagagagaggcttgggactccgcgcaaatagaggcaggcagatgatgtctcaagaagagattacaaattacagatgaaattatgtcaagactgctgaaatcccaatacaataacctgttcgtgcatcttgaccgtctaggttgcttctgaccgtatgccaaacatcaagatcgtatagtatagtggttagtacttccgcttgtggttcttcaaccgaaacgcaaagtcgcggacgacgggtgttcaattcaccctacggtcatttctttttggggttctgttcttgcgccctttcgtttttgcttttcttgctcaacacactcattccgtccgaacagtgttcacaggcagatactgtggcaaaaaagtgtatgaccacacatttgtgcctggacacatagggagatgccgaacgataagaagacacactgacacggaatcacaaagatactagaacaactcaacaggcctcgctctatggaatcatctggcggttgaaatgtcctgccggctgaccaagacctgcttgacgatgacgttgccaagaaagaaccccgtcaaggaattcccattgggggcttgcaggctgtatcgaacgaagagcctgacaactacacgacgtcgttggcgcgtcagtgaacgcacaccggtccatctgatttagctttcgagcgaaagagagaggtgcagagaacggagccagatatgtatatgccagtgataacacccagaatttcggccagcatggacaaaaaagtcatcactatcttttcctgattatgtgtctatttgttgcttcgtctctctgtatgttcatg

SEQ ID NO: 393 - DNA, 16131 bp, Xanthophyllomyces dendrorhous
ctgcaccaggaggagaacaaggaggcgagtatgctggtgtttgagactgctgctgatgttgacactgagtctgacgcttccccatcgacataggcagattaaagacatgactcataataatttgacggtttgtggtctgagaattacaaggtccataagagccatgtgtcgactgcaatcggttgaagttactttctgatgcccaaaaaacatacaatctttgtatcttgtagtcggttgtgtacttttcttccctgaaaaccgagtatatatagtcctatatgttcgattgacttacaggacaagaaacaaaaccgatgctggatccagacacaaacaccgatcaaaatataccatactagacaagaagatcaaggagaaaactatacgaaaaagaaagtcagtcaagactgacggaccatgctttctctttcacaaccctttcttgttcgatcacatatttcccttgagatttcgttttccgattgatttaagatagatttaaacgcacgatgaagcgggtaagtgaacaagttttgagcgacagaaattcgtccatacattagtcggccatatttcgataaataagcgtagtgcaattagaaagattaggaatatcagtcaaaccacatcagaccagattgatatcgggacattggttcagcgccgggagtatggtactataccttctttgtatcttgaccgggattcgaaccaaacaaaacaaaacagaggaggagcaagacgatgagattttgaatatagacaccagagaatattagaccaacttttgactggcatcctctgctctatcgtacctccagccaacgacagtcccacaggttttacaagagatatctctgactgtgtgtcttccggtttgtaacgttcggtcttccgggtcggctagggttatgttgatcgctgatgctaccaggctggtcagagaagagttgcaatagtagatgggcaacgatgagatatctgagaaaggaagaagaagagggaagaagaccagatgaacaagggatgtacaacgctggaccttccctacctgagaacgagcgcgatactagctcatccgtcagaacctgcgtttcggcaaagaaaaaaacagaaggaaaataagaggaagaaacaagaaacgtttacatgaagatgtcgaaggaaaaggttcggctttctcttctgaaagcaagggcagagtgaaaggaagatctcacgagcttggtcgaacaattgacacagacgtataccggtatgtcatcaggaaccgtgtgggatattggtgacgagcaagccatacggaatagaaagtgtgatttagtatacgtaacggcgtgtgattgaaagtaagtgagagtaagttcaatgttgagatgaagtttttgagatttagattgaaacgtttgtaggcatcttgccgccctaaccgctcagatgtagaacggtcacctggtcagatttcatcaagaaatatagttgggagccttagtctgctagagaacaaccccaaccggaggtgatctatacacggcccttctagacttgggtgtcctcagatcgcgacccacccaaccccatagatcatgggtcatgggcccagtctgtcccgtcgatgacattcataaccgatgacgagtgtcagagatgttcatccgacgcgtgttcaccagttcttcttggcacactcatatatacgagcttccttgttttgggaatatgtatggaacaaagaagaatctacagcatgagaaaatgtaatagaagccgaggagctaaagtagaaatattttccatttctttttcctcgacatctcttgcaatgggagttgattatatgttactcaccagacacccacccggaaccgacaactgaccactgacattggtccttgctgtgctctgtcacattcattacggcattggtactggacccggtaccttatccatgctaatttccacatccagaatgtcgatacgaccaggactgacgatgtcctcttctcgggtcaactaagattatctcgaagcgaactcggaatgatcacttctttgcccaccttccgttgggttctcatgcatccggaaggttctacttgatcatcagttctctttggttgcatacattctatgaccgcgttttctacccgtgttgattatgatgatgcgatgaagttgcagacgatactatacgatgtgatggtttctttctctctcttagtttcgtataaagcctcggagggggagttcctcgagtcttaacaaactaccccttctcttctgtgtcggtcattaccaacccctttctccccctttttttccagctttcgtccattttctcttctctaatcgacattaacacggaagacatctgaaaatgtcgtccagattcaagacgaccacctgtggccgactgctcaaaacggctggcctaccgcttctcttgctcacgtcacaagtcagcgcaagctcgcccagctctttccagggaccttccgagttgctgagcaaccagaaacggtactctaaaagagacaacaccggtagttactccctcaacactaccgcttgcggaggtgagtttcttccttttgttgacataaagtcgaagcgcacgactttagtatgtatcactgttagctataataagaaccaataaatgaacttgaccggtccaggctactctgtctcctcggttgatagcactgggaatgggcttcaggcacacctctctctcaacggagagccttgccgggcgttcggtgttgactataccgacctcctggtcgacgtcgagtatcaaacccaggagcggatcagggttcacatctatgatgccgacaagattgagtttcaaggtgcgttcctatcatgattactcttgtttgatgaggattatatttaatcaactttcaaccttttaccggcctcagttcccgagaatatctttcctaagcctcagtcagacaacggcctggatctcaatcagactgatctcgtgtttaaccatcaagaaaacccgttcgctttctggatcactaggcggaatgcctccgatgatgagacccctattttcgacactcgaccctcttctaaaacctcggttgactatcctatcgaaccaccttatgggggagtcgaaaaagtgaacagctcgactgccgtacctgacgagtctggtggattagtctttgaggctggctatctcgagatttcgagcttcctacccaaggtacgctcgtgttcgtttcttctggacatcccgcctcccttagtgattaatccagtttcacacctgtcttgtgttaggatgccaacatctttggtttaggagaggtcgtcgccacgagtggcttccgaagaaactctagtgctacagtccaggtgcgtagtattatttaccgagtagcttgttttactactgcctaccactgtcgatcactcttaacccctcatccttccagactatgtgggctcgagacgtcggagatccggagaaccagaacatggtacgtccaacgctacctataagcatctggtattcaatattgacaaactttcactttaaaaattcagtacggagatcacccaatatatatcgagactcgattcaataaaaacggcgcttcttcttcacatggtgtattcctgctcaactctgagggaatggatatcgttcttcgagacgaagtgattgagtaccggcctctcggtatgcttcaattttgttcatctacttggttcaaatcgagccagacttcagaccccgtcagctgacagttcttactgatttgtcaaacaaataggtggaagcttggatttctacttcatttccggtcctacgcccattaaggtgatcgagcaatactctgaaatctcaggtcgatccctcttgcacccatactggtcttacggtttccacctctgccgatggggttacggtacgttctatccgtctttttgttcctctcttctctttcgctagtgtttgtggaggcgctgaccaagctagatattggcatgagacatagacaatatcactcaaaatagagagatcgttcagtctatgaaggatgccaatcttcctctcgaaactttctggaacgatatcgattggatggacacttaccggaattttgtacctgctcccaaccggtttgagccggccgattataaggctttcgtcgatgaacttcatgcaaacaaccagcactatatacctgttagtccttcgagtagcaaacattatcgaatacgaagaactaatgtcaagtctgctcgtatgattgactatggacatgttttcctccttttctggtgaacaaagatcatcgatgcggctattggtgtagtcaccaacgatacagacgtctacgacaccttcaccgccggagacgctgctaatacgtatatcaagaaccctgacggaagcaactatatcggaaaagtctggccgggatgtatgtttttgtcttttctctttttgaccagtggggtatcatatctatgtaatactgattctctacctgtcggccgaatcattttgaaccaatagataccgtcttcccagactggttccagaactcgactcaggattggtggactgaagctttgtgagtctcgaacttgaccattgtatcatcagtctatagactaaatcagcgagttttctgacccaataatttatgtcttgcctccatccgtacacagcattaactattctcagattgttgagtttgatggaatatggtatgtcacctattcacttatgttttcttacactctcttgtttgtacatgtatggaaatacttctaacactctgagtgttctcgtacaggatcgatatgaacgagcccagttcgttctgcgaggggtcttgtggttcatccgccggttcgttcttttcgttcgatcacacgtcaaaggcaactgagcatatgatctgacctctatctgggtgctactcaacagacctgaacaacatcacccctccgttcttgctgcctggacaacccggtgctgtgaccttgattgatggaacgttccctgaaggatataatgccactctttggggatactctggtaaccttaccatcaatggtagtctcacgttcaacagtactcctcctaactatggacgacctgatcgacgatctcaactctcccgacgagtcggtcaaggcgtggatgtgaatacccctgcttatgagattcacaacgctctcgacaagctagccatctcgaccgtctcgccaaatgctactcatctcaacggagatatccaggatatcgatgttcacaatctattcggttacatggagggaattgctactttcaacgtatggaacacctataaacccaacaaacgacctttcatcgtcagtcgatcgaccttccctggtgcaggtactaaggtcgcacattggcttggagataactactccacttggaaatatcttcgttacgtcaatcaaggtgttcttcagttccagatctatggaatcccgatggtcggagctgatacctgtggatttgcgggtaacactgacgaggaactttgcaaccgatggatgcagctcgctgctttccatccgtttttccgaaaccacaatatcaaatccgcattggcacaagaacccttccgatgggattctgtcgccgaggctactcggaatgctaccgctattcgatacgctcttctcccgtattggtacacgcttttctaccaggctagctctgttggaactcctcccatccgagccctcttctatgaatttgaccaagaagaacttttgagtgttgacgctcaattcttggttggaagaaatgtgctcgtaaccggtgctatgtaccccaacatcacttctgtcgaaggtttgtttgtcttctaccctttctttttgccttgttcgaatacacagttttgccaaaaagaatagaactaaaatttcgagcatttggcgcgtccatctttattttaaaccaggttatcttcccggaggagatgatgagatttggcgagactggtacactcatgaagtcatcaaacctaccagcgatgatggaaagtatgacttccctgctcccctcggacatattcccgtcaccatccgatctggcgcaatcttccttctccattccgagcccggcatgacggtatacgataccagagaatctccctattcgattctcgtctcgctcgataaatctagcgaggccgaaggttatgctttcattgacgatggagagtcattccctgtcacagattctcgagaagttcacctcggagctgccgaaggaaaggtctacggatggacgagtggatcatataatgttggacagaaacttgctcaagtgaccgtcctaggagtcaagactgagccgtcgactgtaacgttcaacggacaggcgatcactaccggctggacttacgaagccgatttggaaaggtttgtagtgactggtttgcagggcgatctgaacggaggttgggagcttgattgggcgtaatcttccaccaaggatggattatcatcctataccctcaactcttcttttctcccctcaaaaagattgaataaaatacaaaaaaaaacttaccttcatcggatatttttcttctccacctcttctttgactctcttcctctctctctctctctttcaagcctattgttgtatatagccacagttgttacacgcgctaactctttcctttgtgcaaacccaagctattgtagcctgtcttctatgtcatattgatgttgtatctgcctgttctgcctcgtgaacacatatgaatctgcggtctcatctgcatgtcaaatccctgtcagtaaatttcttttgaatcatagatgagtgaatgtatagataacggtttagttgtgttcggtatcggcttgaaacatcttctttctgccatcggaaaacagagacagaggatcactcccgaggttcagggagccggctcttccttgacctttcatgcttctttttacctcggttgatcgtctttcggatcttttctttatctgtctagatatatacgcgtatgtgttttacgtctaccatgtgtatagcgcttggcggcattgaggcagcgagactaactcaaacagaacatctagcaagccacgtatttgtatatgtgtcgagcttggcctatacacatcagagattgagaacaactgcaagagcgtcggtcgactcgactactgtgatatctatgttgtgtacctgacaccgggcgtctagatgaacaccgctgagatcagctgcacgtggctcgaccaagcatatcgtgttaggggcgggagctggactggtaacaggagggttacgaaatggtaaccacacaagactcttaggttgcaagggagaagttcaggctcttgggactggaaataggattgataggatcactaggacgagggcagggcagcaagggaacaggtaacaagaacaaggacaagtaaaggggtagaaataacaaagaatccaagcgtgagatttctaactacgagtggtcaagagagcctatcttatatgcagttctcagaccctgtggtctagcagtatgatgcgctaatagtaaggtgcgctaatagtaaggtgcgctggtagtaaggtacatcgggcgtagagccttctagaagtagagctgtctagaaatatggaaggaaggagttgtgggagtggaggtctacgggtcacagtaacgagcccggtgtaactcaggttacatccctgacatatcatctctgtctcttcgtctgtctattgctttgtctctgtctcttcatctctctgtctgctcatgtctttgtctctttatctctttgatgcttactctcggacttcgtggaacagagatgtcaatgcgttgcgcaacatgctgcacccaagccttcactaggaggggaacgagggggcgagaatgccgggctttgacgctgtcgctagtgatgctaagactgagattgaggctgagattgaggctgaggctggcacaaactaaacccatgactcatggggatttgatgttctgtggtctgagggcacccaagtccaaaagggccatgtgtcgaccaccatcggttgaggtcactctcaccatgctctacgcagtgtatacatctaaatattacaaaatacgtagtattttgtttcggtacacgaggtccacctagtgtagattcgatcgaaagacctccaaagacttgataaattaatcatggaaacatgcgatgcgatgaggcatgcctagaagtgaacctatcggctcgtcctctttctcaaacgaaaaataggtcccaatcaaattccgcggcgacatccaaccagtcgacgaataaacttccgcggtcgtttctctcccaaacagtgtacaccaacatccggctccgtgatacgttcagaaacctaaactggtccaacataatggcgtatagcttctctaccctctccctatcgctcggtttgtctggctcgtggcctgttgctgaggcagcaagacctgtaacaaataggatccagtgggcagagcaataacctgggatgtcccgcttcgccagcacttccaatagggaaagcgcttgacgaacgagcaatcggattgtgaacgattgaggtggagaacatagagcggatgtgtgaaggaaaatcaagcatgcgatgcgaaaagcctcgtgcagatagtgatgatgttgaagatcaggattctctgtgacagtaagaaaaagcatcagggacacactgagagtgggagaggcgaagttgatgtattgagtgttttgaactgacggctgattagaacgcttgctttgtccttctcgagttgtaattcgctctccagcttttgagctttttgtaccatgtcaagcaagcgttcatcggtccaggtcccatccttatcaactcctccgaattgatttgccctccgctcccgaattaactctgcagtctgatgcatccgtacaaagacgggcaaactcagccctgtcaatgtataaactgagttcggggatttgcacgcagcctcggcgagcaatgacgatgccactatcggactatcaagcagtatacgagagctctgtatgtcattggagcatattaagttagcgattgagttgagtgcatgcattcataggtgataggttctacctgtccatatgatcagtgttcaagtgcgtatgatctcaaacttaccaaaacgtcatgataagcaaggttttccagcctttcaaggaggacatgatagaaacaacaacatgagtcagacagacacaacaatgtcgtgaaagtattccttggacagttgatactaacagattgaattttttggttcccgaatcaggacaagatccatacagggtacgatacaatgttttgagatgccctacgaatttctcatacccccatacatcacctctacagatctgaaagaaaaagaaacattcatgcagattcgacggtgtcccctcgaccatttatcagtatgaagctggttctgagcagttcagtatggcaaatggaataacatcaccttgtgctgcataatcatcaacgtccccgccaacaaggtcatcttctctatttctttatcgggtgagaccaccctctcggtccctccatcttcaggactgttctctgtagacagcgcttgaaatgacgcattcaacagatcgatagcttgagcaccgtattcttcagacacggactcgtatttcaattggccttgattgacaagatgtcgaccagtccaactgagaatggctagatgtagagcgctcgtgctgggccgaaagtccatttcgtccagtgcgagggcggtgaacgcttcaaatcccgaaggtaagtcttccttcgtacacgagacgagaggcgagagaaatttgctgtagtgttccaggaggtcatctgcatatgagttgatattcaactcagtactatcagattttgggttggagtgtatcaattgattcaaccagcctatcgaatctgaactaggactagaagagaagtcgtcgagtggcccaaacttgatcggtggcgcggtcccgaagttgttgagcagcgaaacagacctgaatgaccctgattctccattgccagaagctggagcgctgaaattagaactgctgctttccaggatgtcgaagaagtctttcatttccgctggtagattcacttgatccttcggacgatgatcaatgagtgccgatctctctctctcgttgtttgtagtgatgatgccgctgctgccgccgccttgtcgtccggatggcctcttgcccttgtatacatccgtttcaggccatgtgcagacctcaacaagggagccaaatgaaaaacagactcatcagaactatcagtgcaagctccgctgcaagccttaaggtcctgtttgtcttgcttactttgctcaagcgtacacaggcctgacacgacggtcgagtcatgtcacatcctttctttcttgccctgcatgtcagacatccgttcctggttctcgttatcttcttcctcattgtcgaggagccttcatcgcttgacatttcgcgtaaaactggacgactagtagattcagacgtgtgcgtgaacgatgtcactttttcagctggactaaggctagacgatggtgacatcttctgaagatgtttcgaagattttcgacacgttcagagggttgattgactgtaggtacttgactcgggttgcagggcaataagagaggatgtagaatgggaaccctaacccatttgccgataagagggagtttcacagggactttttgaaaacacggaattcaccataacgttcttgattatagattttatattcaccgacaagcaaacctcccgtggtgttcaggtaacatatagttgaagtttgtggtctgaggacacccaagtccaaaagggccatgtatcgaccaccatcggttgagattactctcatcatgctttttgcatcttatattatagttgaagtctgttgattttcatccctcctcgtcacttttgcttctttttgtttccgttttaaatcgagttcttctctatgacgataagttcatttcgttctccagcttccttacatctaccattcagggaagttatcttcccaccttcgttatttatttattgttgggaaggggggttcgagtcaaataaacccattacaaacaaccttttgctggtcgtagtagactacccggtatctgacttaacgatccatcgtgaggtgctgagattacagtagaaccaatcctgcatgcaacgagacgcgataagataccatcgatcatgtattatgagggcggtccgcgcgccggcgcaacccatgttatatggcggtccgcaattgacaaattcaaaatctccaccacctcgtcctctgttaactgacatatatgtgccatccgaaggattccaacatgctcttatctcttcagccgagtttgcatccacctaaaacatttaagccattcttcagaccagcactcgagccctcctctctcctcaccactcaaccatgatcgatcaattcgaactagacgatggcatcaaatcagccagctaccaagacgacaaagatgatgtcgtcgttcaaataacggaaccagtggccgatacttcccggcatcacctgcacagaaagttgaccccaaggcatctccaactgatcaccatcgctggtggtatagggtgtgagtcgaaggaccagcaacgcaaatctgtcttcccttgtcctttttgatactttgtcgcggccgcgttcgacgcgtatagactaatcgaatgaacaattgattttttatagctgcattattcgtactcatcggcacggctcttgtctcaggaggtcctgtgccacttgtattgggtatgctgttctggtgttcggtcatctgggctgtgtctaacttccgtaagagataacacacctgaaagagtcaagttcagtagtaacaaaagctaaccgttatctatgccgccagaaatggaaatcaccacgcttcttccgcttgatggtgggttcatggcacatgcctcaagattcgtcgacccggcattcggctgtgctgttggatacaactactttatcacctcggcggccattctcaattacgagattaccatccttaacgtggtgctcagctattggttcaatgatctaaacccggcaatcgtcatctcaattttgcttgtcgtattcgccgcattgaacgtttggacggtcaaatggtttggagaggtagaattgtaagtctgttgccacactctgcaatccgaactgcagactgatctttaccctccatatattccacatgatgtagttgggtagcaatcggcaagattttgctcgtcttcggtttagctttctttacattggtcaccatgtgtggaggtaaccctattcacgacaagtacggtttccgatattggagagacccctccccttgggtaggagccagtccctttgagagacttcaggctctatggtctactatcatcttcgccgctttctctatcgtcgggcctgatttcatgtcccttatggctggagaagtgaagaaccctcgaagagttctgcctggagtctacaagtcgactacgtttcggttgctcctgttttatggcttgggcgccttttgcgttgcgacggtgtgtgcttcggatgatgaacaactcttgagcgcaatcaaggttggatcggccggagctgccaagtctccttatgtcgtcgcgtaagtccttttggtctggaatttacttgtgctattcaaatacaactgtatggatctcaccctctatttgacttgaaacggtattgttcatagtatgaaacgcttgcagattccctatcttggctccattgtcaatgctgcggtccttgtgtctctcctttcgaccgcaaatacctttgtatttactacatcacggtcgttacatggactggctcttgccggacaggccccgagtattttcaggagacttaaccgtaagtttgatattatacccatcatcatcggattccgcgagcttctgacctgatagattttgtcgtattctaggtatgggagtgccttatgtctcagttggggctgcacttgctctaggctgcttgtcttaccttcagatgtcggcgggaacgtacaaggttttgggttggtgggtcaacgtgagttgcttgatccaagtccagtatttcaatagctcagacagctgacagaaatcactataattcagatcacgacctgttcagaaatccttacatgggtagtgatgggcatcacctatgttttctttgaccgcgcgctcaaggcacaagggcttcatggcagtggtttccttccaatcaaagctcgttggcctctggcttcagcttggtatgtgattgtggtcgtcggcttcacttgcatctttcaggcatacaccatcatgtctcctagcacgttcgatggcctcaccttcttcttcgcatacgcagctatattcatatttatcgccatttttgtgggttggaaactcgtgaagcgcacttcctttgtcagaccggacgaagcggatcttattagcgatattgcgtctctcgatgcatatactgaggaatgtgaagctgagcttgcacaaattatccagccaagattggatcgattcatcaatgtgagtgtcatgaatcttaagtaggcgccatcgatccagatatcactaacgttcaacctatctgacttgcagctcatcttctaattaaattaaccaagaggttattctcaggccaatagagtaaaggagggtcctgccggtttcggcttaacttcataaagatatatagctttgattgaatataatcagttcgatccaactccttctgtttgagtggtgtttgctttgttgttatctcatacttcttcttccttttctttcattcttttatccttgtatcttggttcaggctccttgtgtcttgtgttctcgttgtgtctgtttctttcttttatcatgaatattgtttccttcattagactttgttgatgagtgattgcgcctttttcctcatttttatgtgtctatttgttgcttcgtctctctgtatgttcatgtctccgtctgtaaacggtagagccggcaccgatggtcttcacgacgttgttcatcgcgaccgacggccagtcgaaccgatcagagggggtctcctacaaggaaggaggcatcgatgtcgaccgcatatgagacagaaagaagtcgggggatgaggacactcttccacattagattacttcttcacgttagaacactcatcagtcggctcaaagggtgtcgctccccttgtgttcgacataaagcgcaagggaacggattagaacccggttagggttaccttgcagctgatactactaccactgacagatgctcagcctatcattaggttggccatccaaggcgattggattgcccatgccttctctatggctcacgctacggagtattaatccgcgctgctgcagcagtccttctggtgtcgtgaacggtgaaggtcggctttggctccttactcgcctctgaaccccctgcgggcccgatcgagtcggtcgtcgcctgactgggttgtacaacatctgacgcgccttaccttctgaaaccacacgtcttgacactctggttcggtgaagctcccactccagacctctcctcaatgatgcgcctgtatgtccaggccgtcactatcggcaggcaagcaggtgatctgcactaaggagcggtgacacggagtcaagtgctcaacatcctccaaagcgctttcttctctgctgaacaacagttcacagactcaaaatgaaggatctctttggcaatggcaatgatccatttccctacagtgtagctggctgtgggcatgaattgacctacttaccgccatcgtagatatctgggcaacataaccaacgacaaagccatatcctggctcacggctcgccagaatcatgacatcgtgaacatgctccgccgagctgcctctgacgcttgatggaggcagtcgttttatgtatccaaagtcaagaccagaaagcgacatttcgacatgtcgctcagtacggacggaatcggcgtgtctgccggaatgctgagaccgacatcgcctccatctggcatcgacgactacggatggagatgggagggcgaagacaaggaccgtcaccgagcagagtatcttccgtagggtttgcggccagaggacgaggtcgtggggctggacacaggtcgtcggacgctgctctcgacgaccgcaggagggctcgacatgtctctggacaacggcggtctggctgagcacggcacgcagtggtcgctctctctgaagtcatggaagcaccttgcggggatggaccgagacgctcggaaacagcggctgtggatgaagaaccatccgaaagtgtcaaccactctccgtggtgagtgcctctcacgttcacactcacgttcaagctgactgtatagacagccttactgaccttgcagactgccttgcccatatcggtgtcttgattcggcttctttctccgatgtctttctccagatcttccttcgttcatatctgacagtgttgatgatcttcgcgctgctctcgtcatacactctcagtcctactcttcgctcgcgacgttcttcgctgctcgacggtggagacgtcttcgctggggcgcacacatcagccgcgagcaagcgtaccaccaggtggcgctccgtctgtcagcaggacgtccacgcaccttcctggccttcggcgacggcgccttctcgtcgtcttctcatgggcatgcacctggtcctgtgaagacgctgtatgccaagctgagggtctctccgctgctccaggtccgcaaagtgtgagagtatcggacgtcgagggcgtgcttcaagtgccatggcgagttctctggaaagaacaaagcgtgggcgatgaaagagtgtcggagcgtctgtcgagtaagtgacctatgtctgtcacatatcttatgatagtgttccgagatggtatctcgagtactgatcgctttatctgtcctctctgcgctctatgcttgctttcagagttggtggaaccgagatgtcaatgcgt

SEQ ID NO: 394 - DNA, 18728 bp, Xanthophyllomyces dendrorhous
gaaccgagatgtcaatgcgttgcgcaacatgctgcacctggcccttcatcaggaagagaacaagggagcaaggctgccgggctttgacgctgtcgctagtgaggctgaggatgaggctggcacagactcaacccatgacccatgaggatttgatgttctgtggtctgagggcacccaagtccaaaaggatcatgtatcgatcaccatcggttgcggttgctttctagtagccaaggccatatattgtaaatatatattctttcagctttgattgaatatatgaacattttggtgtcaatgaggaatacattgcggctgccaccagcaaccgatggtaccataggctaattgaaaagcagaagggatataacataggtacagaaaaagacgagagaacaagacccggaaaagaaacagaaaaattaaagtgtaggtatcgaattaaatcccccatactaagcatcaacagccgctcctccggctttttcgtttccttgtggtttggaagacaagcttgattcactgtggtcttccggtttaatgacgttcggttgcttgtgttcagcatcagaagtgacgaccactcgcccctcgtgatgaatgagtcgggcctcaggatccaaccccacactgttaaagaaggtcagaagggggagcagcacgatcagcaagggagactacacaactgatatcttgaggcttcattgcgaagcaacttactagtcgtatgagaactctcctagctcggcatcgtccaatccgacgatctcactctcttcagaacatctcaacctgagtccggggatgtagtgcataatccagagaatctgaatggcaacagacgtatggcagatcgagcggcaaaaaaagatcagaagttagcctcttcgtttcgatagctctaacaggttggcagaggcacctacaatggtggtcatgacaaaagagtacgaaacacaggcaacagagtcggccaactgataaccgagttggactatcaacagagaaacaaaagctatgtgatcagtgtacgagtggcaggtgaaacgaattagaagaaaccaaccatagtgatgatcaatccatccaccaggaatttcactaaatccatcgagagaggcaatagaggcctgggcgaagagggctttggttattggagacaggagaatagaaatatcagccagagttttaaaagcacaaaggcatagacacaacagggcttaccagtcatcagatttccggcgattcctccgagtccgtgaccagcaaagacatcgagggcttcatcaacgccgatcaagaactgttgaaaaaacagaagagctcagaaaacgtagtctagattggaggtggagaaaatgtgaaggtggactaaccttgattcgagtagcgtaattgcacaccgctccaccgacgacaccaaagaccaaagcagcgggagcgccaacgaaaccagaagcaggagtaatggcgacaagaccagagacagctccggaacagaaaccgacggccgaccacttcttctcaagacggtaatcgagaatcatccaggtaagacctccgacggacgcagccaagttctattgttgaaaaggcggaatgagtcagcgctaagatcagacgtgtagtaattcttcgaacaagatcacttacagtcacaatacaggcggatacagctcggaggttagcagaaagagcggatcctctgaagacaagaacacagtggttagtgctgtataggtaagagatgaacatatatgggaaaatgtactaacccgttgaagccaaaccatccgaaccaaaggaatgctgtacccaggataacataggaggtgttgtggggcttgtaggcaagtctgaaaggagggagaattacacaaccgcgcacaaagtaactatcagaattcatgcccaatactgttgactcgagatgacggacgcggaacatacctctcagttccgtagcctcttcgcttgcccaaatataaggcgatagcgagagcagccgttccagaagaaatatgaacctgtcaagtttaccaagagaggggaagaggcgagcaggatgaaatgagtatctgggtaagagaataagcgcaaggaatagagcggaaggtgactaaccggacttccaccagcgaaatcaagtcctcccattacatagatccaaccgttggagttccaggtccagcaggcaatggggtcatagaccagagtgctccatatgaatatgaagaccaacacaggtcccattcggcatctttcctattgcgacataccaggttgaccgacagaatcaattttgggctctcaaagaagtgactttctaggttcgagaatgcttacagcaaatcctccaacggcaatgatgggcgtcaaagcagcgaacatgcactgatctattgcgtttattagattggaattgaaaccgattcaatgtgtgttcctaccggtgatggcttgcgagaagaaaccgtgagacgtacagacggcaaagagagagctcggtattcgggttgatccaatagaaggtgcatcgagaacatttcgcatagcaaagtacttgagatcaccgatgtaagccgacccagtttcggagaaggcaagagagaatccccaaaagctgtattggcatgatcaggtatgagaagcaattagatgagaaacgggatcggcgactataagagataaggaaactcgaggagagctccgcgcagcgcaagccaaggaaagagagaaagagactactcacaaccactggaatgagaccactgacaatccggccatccctaagaacaggaaggacagagcgttcttgcggcgaacaagaccagagtagaagaatgctagaccgggtatctttagatgacataaacagcattaatcgcaatgagttgagcaatcgagtttcttttctctggcaaatattcggtggataagaagagaagcacgcaccatcaaccagacaagagctgtactggtgaggatccaggagatatctcccaaattatagactgcattgtcatagccgagtgcaatgatgtctgtgaaacaaaagaatccgacaagatcacaatgaggttcaagatcgaggaaggagaaggaattgaataaaggacatactctcgtctgcggtgtatttgatggccacggttgccatgttgcggatatgtacgggtgagagttgtactttgtgtaattaaatcgagcgcttagaaagccaaggcacttgctctactttgtcttcggtggaagaaagaaggtgagaactgggtggaaggttgagagagagagaaggaaaagagggagtcaagaaaagaggagaaaaaaggaagaagaaaagagtttatgaggaatgaaccagcatattcagagaacggaagtcgttcgagataagagaaccatgctttttgcccagaaatgggtttgaatccttatcgtcggtgtttcgtcattgtccgcggcatctatcagaatcagaagggatcagccaggctttttcaaactaagaagccaaactttctatgactcgctcgcgatcggtgtaatccatgtctccgacccaacgagatcgaggacaagtttttccttctttcctatctccttcttttgcatagccgttgtgttcatgttcactataacgaacatgtgaatgcatgtagaaatataagcatgtatggaaatgtctgtgggatgcttaaattttctgggcttggccaacgcgcaacattcatggatctctttcttttggcttgacatgcggatgatcgagttgattgagcttccaaatccatcagtgttgttgagccttcttccatctttctcgtcctcttgcggagcttttgtctttatccgaaagataagagctgaaacaaagaaagagtgtttaccgaacgagcggagaaaggtaagtaagtggtttatcttttaatttcaaatgcatttctcactttagagaccgactgcgcatcctgtcttctatctccaactgcttgctcgagcccactctagggttgtgacgaaagctattgggaatcatcgaacataccatctaccctccgtcttgtcatccctccattcatctctctccttcttcctctttcctttccttcactttctttcttcctttcgtaacaacatttttctgctttcctccttttagtttgtaaaaggaaaagacacgcaaagacatacctacatacatatacacactcacacttatttgcacccatgggctttgacgaacactccagatctaggtccagaggtagatcagaccacatgatctccacgggaagaggaggggccggcaacatgagatcaagcagtcaatccaaagatcgctctgttcgtcttactcttgtttttccttgttgttctgtcttcgaaatgactaatgagacatctttccgatcgaacagggagccggagatgacacgttgatttaccagtccgagcgaggacgatcgccccacctgccaagcgttgaacgagtccagcactccggccgaggtttgtccagtttggcgtagtacttttcttaggtctcccccaagcccgagctgataagaccccattcttcttcctttttacccttcctcctcctcactggcacactctcttggcgttcttccaaattcaaaggcggaggtgggttcttcttgttttcctgatcagcccgcactactatagaatcaatcaatcaatcaatcttactcattccttcgatctcaacttccaacagctggcaacattagatctccatccagagaccccaaggaacgtgaacgagagctttccgaacaggcctatgaaacccaggtgattgaagccaggcggagggaggaagcaggccggatccattcggccggccgaggaggcgcaggcaacatgcgatccagatcccagtctcgggacgctgcgtccagatcccctcttccagactatcagcatggccagcctgactcgtacagagcagcccagtctggaggcaggggtggctacggaaaccagtattacccccgggactctgatgtagaaggcctcaagaagttagatgaggaggatgaaagagcgagggcgagctgggaggaaagccacccaaatgaaatctggagttccggtaaaggtctgtcttctcacttcttcttttcgactcgcttttcatctcgttcgatcagagattgacggacgcgccaccggaaatacgaactgctttaaccttcttaaacaggaggtgctggaaacatccaaagaactcacacgaacgacagtgccgctacaacccctgaagaatttgatgaggcgaaagccatcattaacgaaggaaaatccggtcatatgtctggtccgtaggatacgtgatcttactctcatcctatagtttcttcagaaaccagcgaagacgcatgttgaccttgtctttctgtttctgaaccaaccaaactatcggatgagaacagggagagggggcgctgggaactttgttgcagagagtagaggtcggtcccaaggaacgactaatgggtccaatcctgtggatgcagtcaagagaatattcaggtgagtttctataaaacctctcccctcttgttgacgttttgacgtggtgtgaatatccgattgatctgtgggactgccactatttctactgttctcaaaggtcgttgagcaggtccggccgagattaaggttgctgagatagaattgcattctttggatgttggatactgtttattctttttcgatttttatcgcgcctatgattctgaatgtgtagttggaattaattttataatattcctctctcccttccgcaaatttatatctatccttcttacctgacttatttctcttgtaccactcgagccaagacgtgtttctctcctccggtgtccgggttgtgttataggtaattctctcgtcttcctcatgctctcgaatcttctttatcttcttcatctttgtctcacctgcctttctacatgtctgctttttcaacatcttttctcttcgtgtttcgcttttcgctcaatctcgactctgttcggttagcagctgtcggttttagatggagggaccggataggccaggatttaggaaaaatcatgacgtttgatgtggaaaagattacagtcgtagtatccagtctagacgcttacaagaacagagtcccggaatatgtggattcgcaagatagcaaggggatgaatgggcaatttgaaggcgctccgtcgaacgctagaacagataagaacattgagagaaagagagaaagagatttccgactttccagccggccctctcaagagttggcgagaattattgtacggctaacttgggttgtttggcaaagctcggccaccgctcatatgtacatctccttcaagaactataggaaaaacccaaaagagaacgtatcaataaagcgacgatcttctctcggacagaacaaaccaaaccggactcgaaccagacacgaaagagggctgatgaaagcgtctgactgacccatttatctgtgagaaccttgagccacttttcgtcactcgctattcgtttttgcaggagcgactttttgtcggagtcgatccaatcaagcactcttcgagagagcacagattgtctcataaacggaggaataaacctgtcgtgaggttgaatggcccttcgtagattactgatgaacgcttcgtcgttgtatctttcaacattgtacacctgagttacagatcaacaagcgcagagtagagacagtcaccaactgatacatattcagtcagataatggaacccagaggtaaacctggttaacgcacatggggttcacccaaagcaccggcggtgaaatgctgggagtcccgaacatgagagtgtccttgtccgtctaccgagatctcggccgggtttatgaacggagttccgaagcacagaccataccagggtgtggggctcacgaggggatcactagaatgatcggagagacgaacggttaaatgacccgcaactataggattgattcctcgaacatgattttaggaagacaagaggggaaggacaaactgaagaccgacgatggccagactatttttgagctgctgttcaaactcttccttgttcagatgatgagacccgggggcgagtaacagatttctcaaccctggcatagtactggcttcctcgccgttccaagaatcaaacgcgccgacgaattcaactccaagcttggcagaggctttctgaaaaatatcccgggagtacggaaagtgagacgaggacagataagtcgtgtgttttccgaggacccagacctgtttgggacgttcatgatgagggatgatctggatacaatgaaggtgaatttaagtgattgttggattatataggatcacctctattcagaactatctctctactcacgggtgcaaccgcacattcttctatagattcgtggattgagcaaatatcttgagctatgcatcatctcagaggatgaacggcaagacgcgaagtttatgaactctacagacaaaccttcgatagagtaaccaatataagtctctggatcggtataatcatatttttccggtgtaatagtccctgttcaggcgagcagaagagggcagagacaaagaagagttcctgttgagacacgaaataaatgcgttgaattaagagtctgtgaagatcgacaagataataccaacactttgctccgaacggatttcctcccttgtgaccaaagaactgagcagagtataggactgtgaaggccggaaggacgtcaggagaattcatattggcaagcgcagagagaatgaggcgagtgactgacgttcgatcggtagaccgagagtgttctttccgtccataacacatccccagtcgttccagcatgcctcgagatcttgctgcgagagaagaattgctttggtttggtttggaaacatcgagtaaatcgactctatgatcgtgaagaaatttacagcttgatcagcccgcaagagagaagtaaaattgatcagacgttccaatagagagaggacctagaacgtacggacgaatgataggtccctagcatatgcataagatatgcccagcagatcaaaagtccttaatctacagatagcatgtccggaagagatagagtgcattgatgaattatgatacagtggagtgcaaacataaactatggagaaggatggtcgagaccactcacacagatcgggcttagagggggtataaacaggggagaagaggaaagagagcggacgagcaagtagcggttaagaccggatggaggtagaagatgcgcagagggcgaaaaagagacaaacaccatattctttcgcctccgggagttccggagtatgcttgcatatagtcccagtcttctaatatgacaagtttgtcttggtttggtctagaagatatatttgagaggcgctcagatagaatagcatcagagcgttaagatagactgctaggacgaaccggcaattttcgagaagtaggcaggttagtagggcagacagcgtgtgccggttgtgatgtttccagatgttatcctctcgatctctaagggtataaatcaatgagagcagaaattataacagagagcataaaaaaggatcagttcaggaatcttgaaagaatagcgagatagaagatcgtgtgctcactgagagctgttatactggtcggatagggagaagatctgggcggactgaagctgatctacaacggaaacatgtttcccagtgaacgtttcgatatcgaccagttgggagaatgagaacagaacaactatgccgagcagtacaagcactcggggggatacaggcctagtcatgacggtggaagtgaggttaaacccgtatagaatgatcgtaagtgaatgactgaatatctgtataaatcagttgaggtatcaacgaatgggtgaggaggtgtacaagaaaagaaacagataagatggagaggtagaacgaataatatcctcaaacaatgtcccgagcagaccacactgcaagtatatatatatatacaaacacatacatatgtgcacgcacactccgaaacagaaggtgagagcaaaagcgaaacgacatacatatgcagaaccatcgaagtttggacgggcaagtcgatcataccgagacgggcaagcacaggacaacgtggttagtcacctgcaagtccgctcgatcgctcatagctcttgtcggccagcgccctcctctactctgacttccggcccgccccggtcgtacatgagagggcgagtggtccgtcgtccgcagccgtatagtcaggaaccgagaggatccatatttcaacgatgtatcgagttcccagtgatccggacgccgctgacataatggtgtgtagaagtacatatcgaatcgatcacgtgatttgaaatgtatgacgtgtacttggttacgcctccgtaacctgccagcattcttgtgttcgcccgggccctcattcaaccccaaccggtcttgtcatttcctttctttcttttttttgttcatttttcatcatctttattctagtttatcattcttttcctctccatcactatctattctgactgtccttctctcccattcctccccgttccctctctcctagatttcctaggacataagcaaacgcaatgctcggtcggtcaaggtcaatcagaaaaacttcttccctctcggccgaagatgcttcttcgtccgtagtggaccggacggatgaacaagacgttctcatccatcagcctaccggactcatcaatgacggtgagccccgccttgctcttaatttctcttatgctactttgctcagagggtcttcttgttcaactgacttgatatctactcgctcgtttttgggaatcctcgcccaattgcttcctttgaccggtcgcatgaatccgcttggaccgtcatttttaggcaacacgtgttatctcaatagcgtctttcaaagtgtacgtccttccgactctcgtgacatgcctctcttcctaagactaacacttctcggacgctctgtgcctcctgcctattctacagctcatccatacacctcccttctcaacacttctcgtcccagtcgatgtcaaaaatcatccgtactcccctccctcaacaattaccatcgaccgggccagatgcccggcattcatggccgaccgaaatgaacacatcgacctcatgccgctcgccgcggcctttatcgaaaacgccggaagaagttggcgaacagaactcaaaggtcttcagccaggagccggtgatcgaaagggccagggacttaaaacccttctgtacagtgtgtccagaaaatatgaccaatatggtgatgtaagtcaaccttcttacaatattatcggaggctcaattgactacaacgatctcgtttaatcattctcttcttttctctcctttttcttgtcttttcctcttggtctcgctcctcagtatgaacaacaagacgctcacgaattcctacggcatctgttggacagcatccgcatggaggaatgcgatgtgcgtgccttgctgattttggactaacctcagctggcgcttcttagtctgcgctcgccgtgatatgtactcatactcatccttgatgatgcccattgctaactaggactccctttctctgaaaccaggtgatcaagcgactcaaaggagcatccggcaacccaaccatatccaatgctgatcctcgtcacatatccaccatctctactccttcctctatttcgcccgctccaccttcatccgaacaactatcaaacccctctgatgcgaccaacagcccagtcgacacaatagaatcccccccttccgccgacttgttccccaatattgtgatcagatcggatcctgttcacccggaacaagaacctcaccagacaaatacctctccagcggcccaccgcccagactatcaacgaagcgccagttttgatgacgagagccgcccaacgatgaaagatctggagagtatatctaatgagcaacgtaatcaacaagagcacaaagcggacatggtgtcctttgtggatttgttgtttggcggtcgtttggctagcatggtcgtttgcgaaagctgcaaatcggtgcgtctccctccatctgtatacgacgtccccgttgagtgtgtgcgcgcgaatgattctttatatgttctcaatcctaacctcttctgttggtgtcttatctggttctgaatcaggtctcgcacacatatgaggactttatggatctcagcatgagtctacccgaggaggaacccagagagcgcaaggtacgtgactcctcgtgttcaagagctttcttctttctgttgtctgtcctgatagcgaagcttgattctccgtcaaatagagagaccgtctcaagtccattgcgtccaaatggaaggcaaagctgacaaaaccggacaattatgagacaaacgattcctctgccgtcgcgtctgacgatgaagatgatgatgggcctccaccggccgcctatcagtctttcgcctccagacggatgacaaacgtagaggaaggcccgaaacgagtaccgggtgggagacgtatgacagtcgacgctggcaaccagccagataatctcggcccaccctcgactaacctcggtcggcgaggatcaatttttggcggtataggaagaaagaagagtatctcctctcttggtggatccaaccggcgagcctctatcgctcaatctgaagcagagagtgcaaaggcggaaagcaccggcagcagagcttccagccccggcccaggtgacgaagttgccggtaacggatctgctctctccactactacaggatcttccataaactatgccaatgcggttctacagtctcaagactcaaagttccccaaggtcagaccttctcaagcggcatacatccttcggatcctaggcccttacacacccactcagacctcactctccaaacgagtgggctcgtcctccttctcggagcaagctcactcttctcccaaccttatcaccggtctgaccgactgtctcaagcagttcacagcggttgaagtccttgagggtgataacgcattcgcctgcaagaagtgctggcggtgggataacccaagggcagacggaaagccatggcgtcggggtggggaacatccaggggatgatgatgaagaagacgatgtgagcgtaacggacgggctttccggtgagaacgccggtagtggcggtggcctaggatctatcacggacgtggatgaggcaacggagcacgtggccactctcaaaggaacagacctcgccgctctagaggcgatgactctgaacggtcctgtagaagagaccggttattactccgaaatcgcctcacaaggacccgcccaagctatctccggccttccgccaacaggcctttctaatggttaccacggaaccatccctactatctcacaaacccctctctcgcctgagaccgagttatctactatcgctccctccgtagccccgcaccgttcaaaatcctctctggcgcctcctgtcgtgaagatcaatcaccgaccggcaaacacccgaggaatatccttcactcagcatcagaaccccgagctagagacgatgtacgtatcggactcggatgattcggaagatgacgcatcctccaatggaggcagtcccgttggaggtggaccgaaatacgtgttaagaagggcgttcaagaggtatttgattgtccatcctccggccattctggttatccatttaaagcggttcgaacaaatatttggaggcaaaggattcaaccctttcggaggattcgcaaccagttcgtttccaactttttttttgttcttcttaacctagaaacggtaagtcagactgaagttattgactttcttgtttcccttagactttagaaagttagattcctacgtctccttccccgaagtcttggatattgccccctttcttgcgcctgctagggtcggagcaccggtcacccagctcaatgcgtccagaaagattaagagtgtagaggcggtgtccgatgcggttctctatcagctctgtgccgttgtcgttcatatcggttctatgggtggcggacattacggttcgtgtctaggatgtcttgattatccaaaaaagcatgtgtgatcaaagtctgatacctgtgttgtcttgtttgctcggtcttttgcctccacgtagtatcctacgtcctgagctcccctagtgatccacctcctttgcacacaccctcgagctctcctcaaccccccaagacgggacaggattacctttctcctagctcggctattctgaaacctcaatcgagttcgtcggcttcctccatacggtctgagacgtctacttatcagaaggaccctagagtatggtactattgctcagacactgtcgtcaagaaggtcgagattgacgaggttctacgagcgggagcttaccttatattttacgagaagacttagatgcatctcgccaaagcttttttttcttttctttttttctttctttctctctcaatatccttctcacgtatgttgaatttcttcttaaataaaaataaatcccctcatatctctggacgaaaaaggaaatgaagaaaggcgtcaactgtaatctgcatctcaattatctctctcttcttgtttgcctctactggtttcgttctatactcaacagtagactatcgtgcttgtctctgccggtccatccagcggatgtttctcttcctcgggttcctttccctcccgaaatcctcacagattggatcgggcgggtgtgtttgtttgtttcaggtgtactgtttgtttcaggtgtactgtttgtagcccttatgtgcggcattgtgtttgattccaacgagattaaattaaattcgcagaaacggattgacgcagaacgtcttcgatgctcatctggctggtgaatttcgatttccttcaaaatcttgatatcgcattctttctttcctcctctatacaacttatctgagacccaagagactacatgagatttcctgattgtagacaacactgacaagaccaaggaagaagaaaagaaggaagaacgtcgcgtcccattttcattttttaattgtcaattatggtgttggaaatgacctgggaaggccattgcctctaaatcgttcttctcagagatcgccgttcttctcctcctctgcccttctctcttcatccttctcccactgggctcggatcgacagtcgctcctgctcggtatccagacctctagccaacggccactgtttgctcgcttgaactctaaactcctcggcacgactgctctggatggatcgaaggaactcccagccggacaacacagtcgatggggacgcagtgacggatgtgtcgagcagcttgaagacagcgggctcgacttcgttttgcagcaaagacggggatgcgacgtacagtgcctttgcagacgcgaagacgtgcggtccggaggtggcgtggttggtaccgatggactgggcaaatgcctgaacagacgaggcatccgagatagagggagcaagtgcagacagtgtggactggagaatgacttgagtggcagccggaagatcagtcaatgacgatgctatcaaacgaattcggttaaacgtcaatacaggttggcgtgcacagacaaaacaagcggatagaattcaggatatcatgagaagtttcgtactcttttgttggaaatggacaatctcagcaagtagctctgggtgttgaggatcgaaagcgaaagccttgttcaaagccctggaggcctgtaggtatttatctagtacaaccaaagaagaaaagagaatgtgaacaagagctcgaaaaaagtaaacgaaggttcacctgggcttacttcgtcggatagcgacagcatatatcgccagccagacatctacagactggctagccgctcgagcagtctccagcggtttgagaagcttgtaggctgcctctaggggctgagatgtattgagaagcagagcaccctgggggtcgttgtctttaggggtagcaggctccgtgggggcaggaggcgttcctttcttgtcagtagctgatcaatagaaaccagcaagggtcagatgtctagaaagaattcaaagcaatgcgaggaagcagattagaacagaagcgtacccttcttagcagcagctccagctttggcagcagccttcttggctttctgcgcggccttctttgcctcctctgcagagatgccatctttccattcggtgtcaagaagaatcgaaagttaacgtctgtgagagacaatactgtcacatcgcaagttaagacaaaagacctactgtccaaggcgggtgcagctgatttctttgccaactcgggatcatctgcaaggttgacgtaaatctacacccgatccaccatttccctcaagaataaatgagcaaagctatcaggatagaggaatgatcgagacgtgacgaaccttggaggccgagatagcggccttgacatatgtgggctgcgatcgtagatcatttccgtactcgatagcgctaaatcgagtatgggtataagcacttgatcagctttgcctgccagccaaccagacaccgtttcgagctgaaatagatggagcttacttgagatatgcccggaaagtagactttctaatacagtatccgtggaagtcaaactcatcatcttcaaagtcatcgtagacctgataggtgttggaaaccaatcgcatgagggttgttagtctcgaacgtatcttctctcacaaactggaacgcgtaaacgaacctttccgatctgatggtatctcttgagggccataccgagatttccactgttcaggttcgagtgcgcatcttcgtgtaagaaccaaaggcactgcatctcgacaagatctgccgcagggctcggcgcatccttctgtttgtgggtgaagacgcattttcgcgaaagggagagaagataaacgagaacaacaaaaaaaggcgttcagattgattgttttatctgacgagcgccagttttgcttggaccaagtgaaagaaagtagatgacacagaaggaatagataccttggtgaaaagtcctaggatttcttccgccctctttccctcgccagctctgagccaatactttccactctttgtgttcaagaatctgtcctgtccgtccatccttcttgcctcttccatggcgatggcagctccccatgcgtccccagcgtattttaatacccgggctttggctgtccagagctctgggagggttggagtgtgctcgagcgccttgttgagcacctcgagagaccgttccggagagggattcgagttgcctgccggatgggcgtagtgaagcgcgaggaagtagtaagtccatagtagcgtcgtcgagggttggatggaatcagttccgtcttctgaaggcgatgacgtcaaggtggaactcgattcgagattgcgcatgtaggactcgacgatggactggacgatctccctgttctgggacgagacagtgtagagaggtttgatgtcggagaagagactcgggacgcctcgttccaaaccggcagctaggtaggcagagatcaatgacttgaattcgttacctaaaagacgaagaagacaaagatgaagaaagttggtaagactacgtgtatgagcggggattgttgcgagacctctccatggtccttaccggtcgcgtagttcaacgacatccttctagggacagttgctcttgggtacagctcgcccatcaactctaaagctcgcaaaatcttgggtcgagtttcatcggtgatgttatctgtttgaagacagttaagagaagaatgtgcgtataggtaaagaccaccgggtcagtcatgctcgagggatctttgactgtggtggatacgatcgagtgacggaaagctcaacttaccgacatccaaccctttgttgagcaagaaacccttgtagttctcgatgcaatcaggatttctgtcgatgagcgctcggaaggcgtcttcggcctcttcctttctaccaagcttgtatagtatccgcgctgacgagagaaggaaaggttagcgaatgactcatgacccacgagcaagggccaaaggatgctagatgatgtcaagtttcgttggagacgaacctcggtatccgatgaccttttcttggtcgttgattcttccatcctgatcgaggtcattgagaagggtgatcgcgtccggccatctctccaacactatcaagttctggatccggagcatacccaattcggagtcttcgatttgactcggcgggttgcccttgattgttggatttcaagcttgagtatggtgtgtacaatggaggaaaagaagggggaaagcgcaagcagactgacctttgagatttcggcgagctttttcagggtgtcttcggctttgtccctctgtccgtcaaggatgtaggccatggcgagcgcagcccaactctttcgttcgttgggtcggagctggagaagggtcactcggttctgaagatgaacagggtagtttcggaggtggagggcgatgtgtgcgttgtctcggaggatttgttgcgagttctaagatgacgttggacacatcgtcggttggtatgtatgtgttggttagcctcctgaaacgtttgtccgaggacacaagatcacgggtaaatcaagaacaagaaaccaacaggatcacatttcagtccctgcataaaggacttgaaggctttagtgtagtctttctgggcacgggataacctggtatataaatttttatttaaaaaaaaaaaaaaagattgcacagacagcatgggacaagacgagtcagcgaatcttgattgaataaacacaagacaggagttgacgaaagcatgtacattcccaacacgtgccagcaaagctgactttcgtgatcctttcgaacacctagcatggccagctctactccttcggcctcgtaatcggcgactgtcttgttcacctccgggtttgccggttggtggaacacaacgagggccttcatcgagatagtttctggcgagataagagaacggagtattagtctgtgcgggtgtgatgagatgattgagggatgtatagtctgtggagataaatcaaggatgaatgcgtacggccatggttcggagactttttgagaatctcgtcggctgctttgatggcctatgtgatcgaggtcgaaggagaggaatgtctgagactggtaagcaatcaaggtgttctctttgtatctgttaacaatcaaagacttggagggttcttacctttttgtagttcttggtctcgtagtgagcctgagatatgagatgacagacacaatggacgagatcaaacaaagagaacaggaaggagaagatgatgagctttcgttcttctttctttttttcccttttccttttgaattcttttggaagtttgaaccagaagaagaagatgtctctaggatgatttgaagttgggcatatccacaaggagcaaaggtattgcttacgagaatctgtctgaacagggtttcctgcttcggagcgagctgcctgttgtctgtgatgggtgccatgatgacggttgtacaggggactggcagatgggctgaacacagaggtggtagtagtagtggtggggagggggagagggatgggatttagatgaatagaacataaatattcatatat

SEQ ID NO: 395 - DNA, 1421 bp, Xanthophyllomyces dendrorhous
atattctacatattttacctaaattccatagtcgacctcaaatttcttcttgttgggtctcgcttctttcgtttccctcaagccatcaacttcaccatactatctctcgttcttcttcatcctgaccagtgatcccccgtcgtgaggtcccctttattcactaaacctttcaattaaaaactcggtgagtccttcctctgtcttggtgtttttttttcttttctttcttggtctctggtgatcgcgagtctcatttgggcttgagccgtctttctttctttctttctttctttattgggctacaacagatttttctatcatgtctgccgctcctgctcccaaccccaaggctttcccccttgccgatgccgctcttaccaaccaggtaaggaccaggctgctttctgtgtttggtcattgaaagagacggaaacgagttcatcgtctgaccgattggacgaactatttgcttggggacttcttttatatatatatatatctctttttcagatccttgatttggttcagcaggcttcccacttcaagcagttgaagaagggagctaacgaggccaccaagactcttaaccgaggagtgtgcgagttgatcgtcatgactgctggtacgtatagttgagagagagagagagagagaggagaaaactctttgtcaatttttgtttcatttcattgcgtctgttcaagatactttgttggagagacgcgcgttaggcgtttcagtttgagctgatcgagtacactttgtttttatctgtcgacagacaccgagcccatcgagatcttgctccaccttccgttgctgtgtgaggacaagaacgtgccctacgtgttcttgccttccaagaccgctctcggacgagcttgcggtgtgtcccgaccggtgatcgccgcttcgatcaccaccaacgaggccagggagctccaggcccagatcattgccattaagaaccaggtcgagaaggtgagttgttgtccagagcttcttgggtgtcgaagaaatcgttgcctcttttttcaatgtgtatattgatttacatcggactgatcgcgagttttttttgtttttttttttctttgtctgttttactgctctttgttgcttgtgtctcgttcagctcctcatctaagcaccagatgttgagaacgctcgatcgttctttttatttttcctccttgcatatccttttttttttccttctagaaggacagaaagaaaggaagaaaggataatatatgaattttagaaactttctagttgcgttttggaggggaaggaaggcgcccgcgttcgtgataggctatgtgccgagaggggggttaacaagcgagtgcaagtaccaatgcaagtccaaggacgacgaatgcgcacacacacacacacacaaacgcacatatatatat

SEQ ID NO: 396 - DNA, 949 bp, Xanthophyllomyces dendrorhous
tacaaacctaaaaggagagaaggagaaaacggatcgacgtgtgaaatttctcaagaaaaagatcacacaatcgaccctctttgctgttggcttttccattttcttgccctcggtgtgtctattcttgactgggatgatccttgccgaggccgagtcgggtcttgatgccttcccaactgtcgagcgccggtcggacgtcgaggaagaaggaaatgtcgccggatctgccggcgtaaaagtcgatgatgtaggtgacttctttgccgcatcgggtgaccagccatcgatgtgtgtcgaacggcgcttggtagctggggaccgaggaggaaggaacggagagtgtcagtgataacgttcggtagatgattgaagggggaagaaaagaaaagaaaaagaaaaaaaaaagaagaaaaaaaaacccaaactcacccccaaagaactctgttcataagacttctaggcgtccattcgccgggtgtgcctctgaaggtgacgagtttgacgcccccacagtcctgtccgccgagacctttttcccactcgaggacgtccttccaggccttttcattgacggcgttatggatgggaacgatgttcttcatgtcttcctctctgggcttgtggttctttcgctgcatggccgagaagaactgggcctcggagggatagacccagtttgtctggtctgggtcgtagtaggacgctgcgtctgcgtgtggggagagtgtcgggagggttgactgggagtatctggggatcgaggacgtcacgcggtctgtgccgagggaggaagcagtggagggggaggaggaggtaggagaaggagaggaaggggaagacgagctgaaagggtgaggaccggaggattggttggcgagccaacggagtcgggtggtttcgtctaccggacaagattctgccggggctgccggggtggctgggattgctg

SEQ ID NO: 397 - DNA, 969 bp, Xanthophyllomyces dendrorhous
aaagaagggggggcggccgaaggaatgtaacgctttgggcggtgtaactggaatagcctggttacggtgtgtgtatagattacgtaagagagagtgtgcgtgccatgtaccgtgtacgtcgtatacacagaagagagaagagcatttgcagtggagagcacaacggagagggagagagggagagggagcagagagagggagagagatagaccagcagaaagaacaataggaaacaggcgataggcaagatacaacatggaatacacaatgtatagtagatagtagatagtagatagtagatagtagatagtagatagtacacacactaggcaataaacacacaagagagagagagagaaggaaaggaaaggaaaggaaaggaaaggaaaggaaagagcaaacacagccacagccagacgagggaaggcgaaggcgaggcaagagaagagaaggggcaagagaagagaaggggcaagagaagagaaggggcaagagaagagaaggggcaagagaagagaaagggcccttggagcaaagagtgctagagagagagagcgcgcgttctgctctgtggagcaacaacggcaagggcaacgggcaatgggcaagagaaaagtcagacgacacaggagggagggacaggatgaatcagggcacatcagggcacatcgaggcacattggagctcactcgggcgaaacacaaaaagcagaggacagggacaggcaccgaggtgaacgtgttagggttatctgagggaatgagagtacaacagggtgagtcagtgaattttctccttaccgtcctttctgtagtgtttttctagtgtatttctttagtgtatttcctagtgtatttctttagtgtatttcctagtgtccttctgtactgtcttttctagtgtgtctgtagtgtgtctgtagtgtgtctgtagtgtgtctgtagtgtgtctgtagtgtgtctgtagtgt

SEQ ID NO: 398 - DNA, 1815 bp, Xanthophyllomyces dendrorhous
caccgttaccaccattattccctcccctctccactcttcaggccgcccgaaagtccgcccccgcccaagccaccggaggtgtcaagaaggtacgcgtcttttcttcttttccgacgcgtcggattcccctcttttttcttctttttccttcctcgcttactctttcgtgttctcttcattcatctctcttctcccccctcatagccccaccgatacaagtctgtcgcgtcctgaacccttcctaatcgccgtccttccccatattgacacgtctcttttcttttcccatccatccttctcgaactttttcttctgcccccaaggcccggaacggtcgccctccgagagatccgacgataccaaaagtcgaccgagctcctcatccgaaagctccccttccagcgactcgttcgagagatcgcccaggacttcaagactgatctccgattccagtcctccgccatcggtgccctccaggaggcctccgaggcttaccttgtctctctctttgaggacaccaacttggctgccattcacgccaagcgagtcaccatccagcccaaggtcagtcgcacatcttggcattttctttcccttttctctcttttccatcgccagccgtctctcgctcaatcagattcctttctgttctctctttctctctcacaggatctccaactcgcccgacggctccgaggagagcgatactagacatgttctaacgctccgtgacaacagactgggccataccgggtgagtctctttcttatttcttccctcgttcaacaggccatctcaccaatcatgatccctttctcttggaacctccccccctctcagcccatcttgatcgccctcgcctatatgctctctctttctcgttcttgtccttccttttctgtctcttgttttgacaagaccggtctatacttttctttctcaatgaatattatatgtttttttctctttccttcttttcttctttcctcatcccacccccttgccttttctcccctttggcataccatcaaccaagagaaaagatcagtcaatcaaaacactccccccccctccgtttacatcgtccctcatctaggtccttgaggggggtttgacctacaaagcaaaagagacggatatcattccatccaagtacatatatactctaaggggaagaaacttttttcttcttcctttcctcccttgattctctccctcaagattattccccctccctcaaccgacaagctccttcagattccttcccggcttgacctttgcgcctaacgtatcgacctcgacagctctctcctcaaacagaccctccagctgcctctcgacctcgtcgacctcacaccggatgaacaacccctgtagggcggccatgctgatcgccttgttggatctctcctttttgtcgaggacgaaccgaccgacgagcgccgcccgttcgtccacctgaccgttcaccctattccccgcgctccattcgtccccgccggtgttcccatcgctgtcgccgtcgccgtcgccgtcgccaccgaccactcccttgtggggccggatcgaagccgacgtcgaggaaccgtagaaccggcggaagagctcggaggcttggtacgcgctcgcgtcacccaggtaggcaaccacgtcgacccggcccggtcggacgagcgccgggtcgagccgcgacagatggttcgtcgtcataaagatgatccgggagtccgaagaggccaccccgtccagcgtgttgagcagaccggaaaaggtgatggatgattggtatctatcggtttgagcgtgtgtggggga

SEQ ID NO: 399 - DNA, 2659 bp, Xanthophyllomyces dendrorhous
tgggcgtgggtgcgtcgagtaagctttcaagactcaagagcagaagcagaagcagaagcaagaacaaaagcaaaagcaaaagcaaaaaaaaaaaaagcaaaaaaaaaacgagacgaacccatcttcagatgtctgcgatcgcttggaaaacgcagcgtcgacatcctcaagcaggaccagacttcgttccggtaccaagctcaacaagagtgccagcttgtcatccgtcatccctcgctccgatagattgagcaagcaaatgttgtaacccaacgagccggcgagtgcttggatgtaggatgactttccagaaccaggcggtccgtggaggaggtaccccctcctgtacgggatccctctctccgcgtaccatttgccccgtcggaggaactttaagagatccccctcgacatgctcgctcacccctctgtcgagcaccacactacccatctcccgccgccgccgaggcttcccgaacggtcgccattccacaccccacgcggtgtagaccaccgtcttgccttcttcaccctgttgggcgagcgcccgggcttcggacaacaggtccggaaacaactctcgatcccgcgagagcgtcgtgagggtgagagtctcccacggggaaccgttatgcatgtccatttgtttttgtgatcgatccctcttgacctgtgttcaaccgagtttaagaaggggaccaaaaaaaaaggagaaaagaagaaaagaagaaaagaaaagaaaagaaaaggaaaaaaaaagaacgattgtttttgttatgttctgttgtactttgtttcgcgtgtttctcacaccgtcgagtaccctgcgcgcacacacatacacacacacacatatgatcgatagacatacctgcatccaagccccttggtacttgaaccaatgggttcccggtccgggcaccaaactaaacaaagcctcgctcgccccgttttcgtgtttcttgtagctagtttccacactaagctcgtggctcttgatccctttgagctgcccgatccggttccaccagcctgtcggatccctcaggatcgagagcggtccgttgccggcagcgagcgagcctggcgggatctgttgggagttgaccgccatccattcgagaaaccacgggtacgcatggtctttcgatgagatctcgagtgacaccagcatccgccgttgggctagtgtcgtcccgagtgtgatcaaacgtcgaccgacggcgagtcctgctgttattccctacagagagaagaaaagacagcaacaaagaaagcgtccgggtgaaggtcgtgcggcgtgagaaagaaagaaggaaaggaagaaaaaaaaaaggataaagaaaaagaaagaggagaagcgcaccatcagtccggctcctgccgaaaagtaaggactagtcgaaagtagaaaggaccatcaaacggtccagatccgttcagtataccaagctgcctttcgcctccccgtctcttcctaagcgcataagagaagaaccttacttttgatccattagactcttgatgaacgacacctgagcgttctctgaatctcctaacggggctgaagtcgatgtggaggccgccgaggtcgggaggtctgttccggtcgagctatctgatggaactgccggggcagcggcggcggtggtggtggccatctgttctgacgggcgagctgtagccggagctgcagccggaggtgttctaaacatgacaggcgagcgagcgtgtgtgtgtgtgtgtgtgctgtatgacgaagagcaatcctctgttcttccttccggggatgagcaacgagagaaagtaaaagcagaaaagaaaaaggaaaagaattggacgaaattccaaattattttctcctttttctttttctcctttttctttctcgtctgccatcatcatccaaacatcctatcgatcgtccggtcgttctcttgcctcttcttcgttcagttcttctttctacttcctcgcctttcgattcgttcagcatgtcggtccttagaagggcagtcgcctcgtcgtcctcatcggtcacccagtccgttctctcggcccgtcgtcagatctgcttgaccgcctctcgtacgtttcagtttgccttttctctttgttctttctttccagcctttctttctttggcttgttcatcttgcgtccaacaatctgaccgttcgtccatcttgttgtgtttgtgcccgtgaattctctcttccctcctttcatctcaaaacgaataaacaaaaataaaaagtctcggccaagaaggcaaagtccggtcgggtcaacatcaactcaaccccttcgatccaagaactcgaccaactggccgaggaggaatcacgacctcccgccgagcacgacgccaacccaaactcgttcttcaacctaggcagagacatcatcttcctccgaggggccaccacgttcttcagaaacacccggtcgaccatgcttcgagatcttgccaaccagatccagactcctgcagagacaagagagtttttcgagtacctcaagatatggaggctcaacggtggtcagatcgattgggatctcgcacagctcgtcatcggttcgttctttcttcttttcgctctctcgctctttcttttcttagggaatctccctggtcagccgatctggttgttgatctc

SEQ ID NO: 400 - DNA, 34207 bp, Xanthophyllomyces dendrorhous
ccctttccctttcacagagcgatccatggcttcgtcctccccctaccctgtcctatacgctttgatgaacccgacgtcgttcggtcttcatatctcttctccctccagaccggcctacatcgtcccgacttacgaatcaaccccaccgagcgcccaagaaacttccgagatcctcaaaaagatcagagaagaggtctctacccggggagacatcctcctgtttgaccgaagaaaacctcacttcaccacgctttccactcctacacccatggccaaggtccccgcatcgatcgagcccgtcgggtcgatccccgtcccggcgttcttcagagatttcgtcaggttactcttcgtcggctcagaagaagcaggtcgctcgagagatctcaccaaggaagaagtcgcctgggtggccgagcagaccgacagacatctcccgctcgatccggtgatcacctcgttgttgctcaatcattactcccacctcccggacaacagcggacaggcagcgtacgggaacttgcagagcaggctgagcgcggtcgtcccggaaacgttcgcccagcaggagttgaccgcagaggagaagagcgtggtgagagatcagctggaggctagcgcgttccctttgaagtgggctggtgaagttctgttgcccctggctcaaacccaggccgaggcatgagccacatggcaagagaaagaaggaaagtctgaagggagccagatggtgtcttctgtttagacttgtcaacgataaaaagaaaaacaaacaaacaaaccacagtaacagaggaatcatacagaataaacaatacaaagacagagtttgtaaagtaacaagagtatgatttggtcgttaacatgatatacatcgtcaagatagacaactattttaaacacgcaagcgagctagcgatcattccatgacaaccgacgtttcttctacaacaggagcagcgaccgattccttgacagtcgtctccccgcttgcagactctacctcttccttagtcttctcaccttcgacctcatccctggctgtttctacctcctccgtcatctccacatcttccttggctactgcgtcggtcttttccacatccccttcttttttctcaatgagctgctcctgttctcctttgtcatcctcaccgtctccttctttgccctctttctcatcttcctcctttttctcctcctcctcctcctcccccgccctttcttcctctactgcttgatcaacatcgatggtttccttctcgtcagcaggcacaggaacgacggatgctatcggcgatgctgcttctgatatcggcccctgttccggaatcggtgtcaccgagaccacactggcaagctcctttgccgctttctccgctctctcttccttttcggccttttccgcatcgagcagcatcgacacgtagatcggagcgatgttcggtctgcccgccatgggcttcactctactgaacagatgaagagacgaccgggtcgcttgtcgtacagctcggaacgtcaacgaagcttttctcttttgtcgttatcatttttatcatttaaaaataaaataaaaatatgaacagatcagatagttgtttgacaaggcccaacggcaaaagacggatcagagtaaatgagagacaaacttcttcgatttgtaagagttggtcatcagtcttgagatcgggaccagcgatcccagctttctcgagcgatcgttttcgattgcttgccaggaggtcttccctcttcagtcgagttgcgtacgagtttatctcatccagcctggtgatatgtttcgaagcaaggatatgaaattacaacaacaagaagaagactcaagtccgatcagctttcgacctttccattcttctggttgtcagtcttccccgtcctttggctttccccctttgggcacaactcatctactcacggtcttgggttctctagctgatccaatcctgtcagcttgttttcctcccacagctcactcaacgcgggcgtgccaagcgcgaactgcactcttggagcaggcgcgttctcgagtctaattcgctttgcacgaacttcctcaaggtctgaggccgtcaatggcgatttgtcatacggcggacatgccgagtctttccaagcactctgtgtcagagcgataaaaacaaacaaagacaccacatcagtctaccgactttttgcatcttattttcataaggaaaggcaaaagggaggagagtttcaagacacacccatcgggtttctttcttcagcacgtcctccattgttttcgaaaatctgttgccgagaggccacgtcgcgttgatctctctgaaacacgcttcccacatggtgttcaccgatttgatctggtcagacagaaaggcaacacgagagtagccaacgttaaggtcaaagtctggagcgaacactatacgaaaagatgcaggtcgattggcgtcagaccacgtaccatttcttggtccagcgaaaagtccatcattttggttttggcgatctttcctggtccgttgggtaaaccctcggatggaatgaactgccgaagaaagtggagaaggataagggcctgaacgagaatctgtcgacggaatgcgacgtccgatagctgagagaacaacaaaacgaccaaggagtcggtcagagagacagacgtttcttgataagcatggctttgctatcgacctttgaaaagaaagaggagtaaacaaaagcactgatgcgcaaaaaattgacgcacctcaaagtcaagaagacccggtctggttaagaactttgctgtgaaaatctcactcagtccgctcaactcatcttcctcggtctcttctctcgatgcaacctccttgcctttctttgaaccatcgcccgtacctctcaaaaccttttcgcgctctgttcgttccgagaacgtacggagcactcggtccaggcgcatcatgaactgattgaacgatgatgccgaggagagtggggtagagttagatgtaggagtgggtgtgaaaacagaggtggcgcttgtcgaggaagatgttgtcaacagagaaggattggtgaaatatggctgcagacaccagaacgacgtgtagaatggttctttgagttcgactgaattggccatcaagatcggcagccagagaggagagacgataggagagaaaagggtcaatccttgaggctgtcaaaacaagcaaagtacagacggaggagagcgagacaaaccggtgggaccgttggctttagccttttctgaactcgtggcggtctcttcatcatgggtttcgccctcctccagttcctccataatctcgccctcatccttcttgtcggaatcttcctccttcttctggtcagccttctcatcctcttccataacaacatccttttccttagcctcctcatcacccatcggtttctcgtctttctggagatcttcgaaatccgtttcgttctttgtattaaaatctccacgaaggttgactccactccgtgcgcctagaccaaaagcagatgacatgaaggacagaattcgaccgcaaaacagcgcgtcttgagatttagagagccgggagagtaaaacgttgcatgctctaagaagttgaagaccagttgtcttttcctgagctagtggcaggggctgaatcgatcgtagaggcgagagggttcgatatcagcaagagcagagagatcgacacggagagtgaccggaaggaacggaccagtttgaggtcgcgaaacctaagttcgagaaattcgaagactttctcgcatccttgaacggtaaagacaccaaagatatcgtctagtagaaagtagggagccttgtcatcgcatttgcctaggtgtaaagcaacgataagacgttagtaaacaccagatttagccatgaatgtcttgtcatattataggatgcagatgctccagaaggaatataacagagtagactcaccgatatgggtaaaggcaagaatcaagtctaaacgcgtccgaacagtagcgtagaatgtgtcagtctcgataggtgacagatccacctctttcgtctgagtaaatgagaacgagtttatcatttgaacgaagatgaacattgatagaatcagatggagggcattcagctaacggatgccggtggccagaacgaattcggagagaaagtgaaaggagaagtgacgaacggcgagattcaaggtttcttctttgaagacccggactaaaacttctctagccagcagaccaaggtcatctgaggtttgtcctaatgaatcccagattctctgagcttctttgaccgaatcttgaaacgatgatctagatgcgaggagattgtccgacgcctcaaaggatgccttgatggactgctggaggagggcaaacgagtgatcccgggcttccagcgttgaaaggccaaccatgttttgtccctgaatgtgagagttaggcctgcttggtatatactcacttaagactgtcccttcagagttgtatttataaaaggaaagaagagaacgaaaggatggccgatgggatgctcgttagatgctgaatcagtcgaaagatcgaaggcgccgaatttcgagctatcttgcttttcgttttcacccacgaacgtcgaccagtctggttctcaagcttctcaagctcatctttctcaatcatgccgttcggtcaacttgtagtcggtccgccaggtaagcccgtgtttctgtgaatctccatgctagtaacgttgtgctcaagagtctcacgctggtcttgatcctcgtcgaagctaggttccggtaaatcaacctattgtcatggcatgcatcaggtatagtaatcaccttctcttccgctttctctccacagtctgatggcgggtttaagacgatcccttaccagctggtttggttctgcgcttgttctcataattgatccattcaatgctcccaaaagtttctcacagcgctaaacagaccggtccacattgtcaacctcgacccggcgaacgaaacgctaccttacccatgttcgctttcaatctcttccctcgtcaccttgcaagatgccatggacgagtttggactaggaccgaatggagcaatgctttactgtatggaatatctagaggagaactttgactggctagtcgaagagcttgacaaattggagggaggatacttcatcttcgatatcgctggccaggtaagcagaggactctcaaagctttggccgtcctcgaagccgagcataatgcagctagccaaccaagtagttgatgttataacaggtcgagctgagtacaaatcatggatctttaacaaggatcatggaccgactaagaaaactagactacagggtgcgctcttctccactttggttctcatataagcatccctgttgacccactatggccgaataactttctttcactctgtaagctggcggcagtacatctctctgatgcatcgtacctaacagacgcatccaagtacatctcagtccttctcacttcactgcggacgatgcttcagttggagatgccccatatcaacgttctttccaagatggacatcatcacacagttcggagaccttcgtaagtgtgactcgctattctttccttgtcatacaaatctatattcataaatctcaaacatggctgtcttaatcttgttcaatagcgttcaatctggatttctacacagaggtgcaggacttgtctcagctatccattctactcgacaaagatcctaggttatcaaagtttggcgatctcaatcgagcaatttgtgagatagtagaagactttggtctggtaggattcgagacgctagcagtcgaggtaaatgttctgcgctcctatcaaatttattcttctttgtcttacagctcataaatatggccgttctgcgcgtttcatcacaggataagaaatcgatgctgcacctactcaagattcttgacaaagcgaccggatatatttttattccaccaacacaaccctcttcatcttctgcgaccgatggatcgccagcagatctctttcaaccatcgtcatcgtcatcaagaacgcctaatgcggacgccttgtttggctcgatagcgggacgcatacctggtagagatatcggcgacattcaagaaagatgggttgatcgaaaggaggaattcgatgagtgggagagggaggaatggaagaaggagggcgaggaagcaaagcgggttgcagcggctgccgtaggcaagagaagaggtggaatggaatgaaattttcgttaccgatagcagtagaggaacacacgattgaccaaagaaagaaaaaataaaaataaaaataaaaataagaacgttcctcatccctccagcattggacataacatgtatagattggagggtgtggccttctaatcatatcctgatataagcaagataaagatagcaaaccctcatgttggttgagttatttgttgataacaagcgtcgtatacgatctcctttctgcgtccaccgtgcgtatgagttacggtctcgttcggttgtaccataggttttgcgctaaaaatgcatagaatccaggtggtttgtgacgagaacgatgacgattgcaataattcgattttttggtttctcatgatttctctcttcagaaccatcatttggcttccttcctaaaccttgtactcatcagtatcatttatacaactatggctccgcccagaaggaagcccctcgatccatccaacgctccaaagcatatcaaaaagtccaaagcacccaaatacgagacgttcgaggaagctcttgattatggtgttgagctcgaagagaaaggcgaacgatacaagaccggtgagaaggtaggctctctcgagtttcttttttccgatttcatcttactggtccagatatattgctgattcttcgttttgttttctaacaaactggtcgatcaatgtaaacaggccaaaaggttctatgaggaagcctgcaagctgtatgagaaggctattgaatttgatcctcaggcattcgaaggccactacaacttgtatgtcctgacaatttcgctatatgaccaagacgatatagctctagcttgctgttccaagcctcttagatacatctgattcttgtttctgttttcttttgagctcagagctcgaacgttatataccatctcgcagattttccttctcccaccgctttcatccaacacgctcgagatggcaatcaatcaatatcgactatcacaaaagctgaccgagtccccaatcctctggatagacgccacgttcaatcttgctgttgcgctcctcagtctggcagacttggtagaggatcttcaagaggctgacgaacaagacgcagaggttgagagcttgcgaagagaagcagccggctggttgacaagcgttgcagaaaagcaggaaggtctgttggaagaaatggaacggcaaaacgcatcagtaggagaacaagaaagtattcttgacattggagaagagcctgaagaggacatagataaacatgatcacagtccagatcaagatgaggtgcaggccgagaatggttctggacgggcctgggaggagactgtgacgacgccttcgcttgtgttggatacgtacatcctcctcctatcgacactctcattactgtccaaggatttctcagcgtcacgtccttctccttctgcactgccggaaatccctccaatatttcaaaaattccgcgtactagattcactctgcgcccggtcgggtgcgcctcggactctagacattttggtagcagaagcatctgcaaagctgtccgtcattcgatctgctttcgaggacggccgacccggttggatggaagagtgtcgtatggtgatcgcaacgctgaaatccagctgggaaagtataaaggacatcgatgctcccggttcgtcaactcataatacaccacgaatcgaccaggaaactcgaatctcggtggtttgtacactcggcgacgcctacgcgcttcttgcccagctacaaagactttccgctcttcagatacttcttcagacccaaacagctcctatgatcgaacaggttcaagagatctggacaacactttctttgtcgactcagtgttcgtcaacagcactctccatcctgacgccttctcaacaggcctttccatccacaatgcccaaccgaggggaatcatcttctgttcttctggcacttgcttcgctttctttacagagggctgttttggcggatgaaccgtggagaaacgcttcggccatcaagaacaaagctcagttgatcacaaattctatcacgtactcaaggagagcagcagagagtagtggaacaggatggcagaccgcgcttgctccttggccgtcggtcatgggttggcagtctcgtccaagctgggtcgatgggggttgggaggcggagcaaacagcgtacgtcgttgtgccttcttttagtcaatattctctagaatttgtgcccatcttgctgattgattactcgggacttccttcttcatcctactccatgtgcgtttgcgtttgtatctctctacatcgcagtcgggaggcaatcctgtcaaacatccgttcccaattctataaagctgccccggaagctcttcaagaggttgaaaaaacgttactgagagtcaagaataggttacaaccgactgacgttcgccggtttgtaaaagagctgattgaggatcacggaattcttagaggcggatctggcggggaggaagagcagttttgggagaacgtgatcaatgtgttgtgatgtcaaaatagggatcttttcttaatctctgtccagagcgaatgacgaccagacgtcggatgagctattaggatgtctattttgtagaagggagtctgcgagcgttttatgagaagcgaagcaaacatgacgtcctagcacgacctgaagaccatcaaaaatgttctgcaactgaaatagctgaagtacgattgatcggcgaaactgttcaatcgacgggttgagcgaggctacaaccacatgttatatgaggcaaatctttttcctaaaaggtttcattatatttctgctcaacaagcagttgatttcaaagacaaacaaggtcaaagttcagtttcattctgtcttgaacttcctccacgttacgattaacgaaaggaagaagggagagccgcctagacttactcagttccaagattgatatctcatagacacctttctgtcctgctctctatctctttcccttctttccgaccggcgccttgggctcaaccacgacctttggcttttgcttcaactcgaccgcgccttcactcatccaatcctcaattccactagcaaacggatcatcctctgagttttcagaacctgtggtagcatatttcgatttgaaccttccgatccttccgaattcatcttgaagatccctcgaagagaccttgttcgggtaccaaagcgggtggtttgacagatccttggtcaacttgtagaccgatcgaggagaggtcgtgtagtgagtgaatgaagaaccatcggcaaggacgacttgttgagggaacagtggtggttgagccggaggcaacggcttaggcttgtagacatgagttcgaccgagtttgctaggacacatggcatgtttcaagtcggtctgtctcctagctttaagaagaccaaacattcgtttcgagcttgccggagacggtctcatcttggttccttcctaggcgattaagcgtgtacaagagatagaggtgtattaggggtttgtgcaagtggaaggtgtgttctcttgtttggtggtcgtgatgattttgatggtgaaaagggcaagatattgaaaagcccagacgagccgctacgatcatggttacactcgattataaccatgatcgtaaccgctcatctgagtgaagactgcatcgatcgaaagtacatccagagagagcaatagacgaaaggtcaagagtcggagggtaagtaaggatatgaaatgaacgaagaactcttgtggaacaagaccctttcgtccgagagcaatcagcatatgaagttacataacatatgtaaaaagaggagagacagcttgatgatggtggtgatggtaatgacaatggagctttattgtgtaggggcagagacacacaaaggaagaaaagaagcaagctaggtatcgaaacccatgagggaacgagaagcgaaatgacggcttgccacaggaaaaggaaaagaaatagatagggtggcacttgaggaactacgagaggagaaggaaagataagagagagaacgagcagaggaagcggaggggtagccagagagtttattgaaaaaaaaattgatggaatgaacaaagacgggatatgtcgccagggttgaatgagattaggaccagatggttatgtatcgaatggatgagattccgaatgaacaacagaaaagagaggcagtaataaaggcaagaacaaaagaagagaatttttggaaaaccaggtcggcatagatacaagtcgtaggacaaacaaagatggacaagggtggacgaacgaaaacccttgtccagcaggaggaagaggagagaccggagagaagctgaagagtaacacaaaaaggcagaaggggcctatttgtgatgaagagggaataaacaattcgtttagtaatccgagtttgtatgtccctcgccatcctctccatccgaggcagaggtttgtctggtcttcatcagctcgatatcgaacctgagttcgtcacccttcggagggttgaacactaagccctccatctcacagaactcctcatcgtcggtccggtatcgatgaatagcccattctcggacatatgtcgaggccttcatatacttcttggatgcatacttcttggtaaaacactcggcctgcttctcaagcggtcgaaggatatagttgagcatgagctgggcagccggcagaagctcatcctccgcgaacgacgaatagtgaaccaagttggcgttccatttgcctcggttgagaacatgtctggcaagccaggcggctccagcggcaatcaaactaggtttcaggtgaagcatcttgtgatcgacacaggcaatctccatgaagtatttcgccaccgtccttgtctggatgtcgtagttgtccgccttcgagatccttcggagaaagtgaattgggtttggatatgccatattaaagtcaagcgtctggagtagatacctttcggcacctaagatctcgtcatcaccaaagccattatcggccatgaacaaaaagttctggacagacgggcagatgacctcctcatacttggcggcgacgaaaagggcggtcgtaccaacgagctgaagcttgacgagtgagatcactcgagcggataggaaccgatcgaccaagttgatcgcgaggaacaaggtttctggcaacaatcggaacttgccgtggacctcgatcaaccagtcaacaagaattcctcgcatcttccactgtagctctggctgaattgacatgtagtctggattcggttgggttgttaactagtaagatgacaagagagaaagaaagcaggtcagtaacaagaagatagaaggaggagagtgaggccacaggaaagataagcgctaacctcgagctcttgcatgtatttaaagatatctacgacgtattcgctgaccatcatcggatcatccgcatcctcggcatcgagatcttcccatccggcgtccttatccttttcttggtacaatgcatcctcttctgccttggctagagcggccatggccgcgacctctgccggtggttccgagagcgtgcttccggatctggagtttgtatgagcgatttcaagtttgacgggggacgaggttctggcccgcttagcagggacggcatcctcctcagcctcgagaacatcttcgactggcaagccggctttggtgtcaccttcgccggcgtcaaatacgtcacggtcgacagcggttgtgcgtggcgggggcttgatcgccctagtcgtcgaagaggtagtagcagctgaaccagcggtcgatgtcgttcggcgagccgcggtagatactataggacgaggcacggcggaagtgttggtcgaggtggaagcgtgagaggaggaagtagcggttcggtgggtagtgacaggcacccggcgtctcggtgcagtctcgacgtccgtgccgtctgtgttgtcctgagtatgtgaggtgagagcggcggcctgttctgctgccaagctggtccttgttcttcgtccagccgttgccctggttggaacagaagcggtggtggccgtcattttcttttcagccacctttttcctaccagcgtcctttgctcctattgggtttgaggcaggaccgccgttccggtcggaaacctcgccaaaggcagcccgtttgcgagtaccgagaacttgttttccattagcgacacccgtgccgccatccatggcattgatcgcgccgttcggatctttgaccgagtgggtggacagaccagctgctcgcgaggttatcgtcggtttcgaaggtccagattgggcggcgatggcttctttgccgacgaggttaattgtcttgccagccacggtcgcccgtggggcgttttcatcaagggtagcagtcgctcgagtcactctggttgtccgacgggtggtctgagaggtagaaaagaataaagagagagaaaagggatgttgagcgagagtcaaagtacgggaagggtcaggaacgcgacgacaagttgaacgacaaatgaagcaatattcagagttgtagtaagagaagagagctggcagagacatggacgaaactaggaaaggaaagaaggatatacgcacagggatgccgctagccatgttgaacgacggaaggaacgcgagtgtgtgtattggagattgagatgttcaagtagggagggagtgaacgtttagggtgagaggtcaagaatgagaagcgaaagaaagcggatgcgaaagggagcgaagaaaggaaaggaagggagagtagaaaaagtgaagagagaaggatgatggtggtagcactggagagaacgtatccaagtaccaaggtgaagagaacgaccaagaaggagcagacacggacgaaggggaggaggagaaaggacaagaatcaaggtcgagggcagaagggaaacggaaagggcagagtgagaaaaggaggcgggctcgacaggcgagtcgcgtcaaaatgttgcctgaccggattctctcacacgcgacgcgtcaggcctacctgtttccgtcaactttgaacgtgaatgtgtgcctgaagaactgtgccgtttgattcggtaacacggatgcaacggagacagcaggaggctcagagagtagatcataccagcttactagttcgcgttgccacattgatatatatacagatacagacatagacgcacagacgcacagacgcacagacacacatatatacctacatacatcccctgttcagattgagacagtctctttgccctcctcgtacaacacatgacccacaccaagacgctcagagaatgggacgtcaagcctacctcttcctacgccttctcctcttcggcctgaggagccgtcagtggtctttgctgtagcggctagcttagagagagcccgatgacgtgctcgttcctgtctgttcctcttgagcgtcctggctggcaaagaggatgaaacaaggggggcgctatgttcttctgactctgacgagagtggcagagagtgaaattctgtttcgcaacttggagaatacaccgggggcgcgggaacagaccgggtagtcgagcagtgggtgcagacctctgttcgaactttctgatgagacgacgaggctgatatgtagatgcgtttcaaacaagatcaacatataatttgatggaaaactgttttcagtataaagaagaagagataaagagaagatatatatatatatatatcatgagaccatacctttgagcttgactctcgaggtcaccccagggaggagaacggtatgacatgttttgcagatcgatcttttgaatgttggatcccttcggttgatcaggaacaaaatagcaaagatgtgagcatgccgtgaagagttctgactatcactgctctgtatactcacagttgagctcggttatgtctggcgacactgccaatatctctacctatatgtcttgctagcctggataggcattcctcacctcctgcgttaccttgagctccatccaactctccagctctatcttctggtctcaactctatgagcgctctttctttgcctttgtgggaacgtcgcggttctgagaagaaatcagccgtgggaggaaggagtgcactggcctggtgaagataggtcgctgcatggtgcatataagtgagcctgaggagaagatccttattcggaatttggtttacatttggttgtacgttcgctgttgccgctggttttgatttggccatctttccagctcaatcctcaaagtccctgtgggttgtgcttgactaagagacggtaaaagcatagacatgggtatacgggcatataggtagcagcatccaagcatgggaatttaaacaattccgattacgtaaaaaacggaggtcaactccggggtacgaacggcctcaatgggaacggccaactctatggcttacgcatcctgcgctctcttcgcttacgactctccctgcccggtttttgatatataaacatccttcaggaagttttgcaacactatctcttttcctttctcatcttcatctttgacttctttctcttccaccttctttcgaatcattcttcgacctcagaagaaactaacaacgttggcgccctccatgggtcaattccctaatgacttacaattcactgcgcaattcggacaaccgtccgacggacacacgtgcccgagttctcgccttttctgctattttgtctttttcttaatttcgagcgaattttgtccacagatctgtccattaatcgtgtcgtttcttacatgctcgttcactagagcacagtcgcatataaaggaacccgctaaccaggaaacaggggcccagaaataaatgtgtttttgagcagcaagtgaagagaaatgttgtgtggtattgagcttttatcgaacttttttcttcacaaccgacctagtttctgtatttactgcgtacgtgaaggcctgcaggcctgcggaacacaaggagagatcctttcgacctcgtttcccgtcggttggttcagcacttattgttctcggtcccacagaacatgtgtgtctatgggtgtgtgtatgggtacatttggacggctcgttgtcaataaggtgtaaatcctgttcttttcaggtcgcgctttaacagttgttgttgttgttgtcccgactaatggtactgggcaccgcttccaatattatttgccgctgacccgtccgcctacgccggtgtctatggcctctcctactgcatctttgctccaaaccccttccatttgagggctcttatcgatgttattggggctgtcctgaggcaggcttaaccagatctcatgcttttcacccattttcttctttggcctgcctctttgctttctaactctctctgcattttaaatacttttcgttccttccctctcttcctctctctcacacagtataacccccttcgtctctctcctcccttacgcacacacacacacctttcgtctccgattctctctgcaaggccgttcctatccatccatctacacttgatcttacccttccatctgttcagtcgcatgtcgtttcattccacactggatcttgggatcaagcccttggactttcccctgactcctgtggccacaccttgtcaagaggttgctgagtttgacttctctcagccccaaccggatggatctttcacgatgggttcccttcttgagccggtaactgtgtctcactcgaaaatatgccttgagaaagatccgatctcgccaccgatctctccagatacgtccccagtacttcgaccagtttcagtacccgtcgtcccttccaccgagcatctagactactccgatatcacacagagaactctcactttaaatagagagaagatccaaagagaagttaaattatggactagagaagcgatcgcacacgatgtgagtcccacaactattttattttatttttcaggcgtctcttgcaatggaaatctcgttcaggctgttacccgctcgaattgctggagaaaagcgttttggctagccgcagcgtgggctcagagcgggaaacgatgaattttgctcccgagcggcataaagagaggcaaagcactgagagagtgaaaatgaaaaatgaagcaaatgaaataaagattaaaaactaaaaattagaaaaagcgtgatcttggttcagaaaaacttacactgctttctttttaaggggctgaaactgccgcttgtttatagttatcttatctttagcatactaaacatttcttcttcctattcgtagatcctcgacggacaccttctcctcgtttacgacttcaaagtatacaaggtcaacaactggattgttacccatcccggagggaaacagttgcttcttcattttattggtcgagatgtacgtgatctcttcctgcttcctgcttcatgtttctcttcacttatctatttattaatcgttcaaccatacgttcacaggccaccgatcagatcaacgtttcacatgcaaaatccaccatcaaactgctcaaagcgttttgtgtaggagagctggcagacgctcgagctggagtgagtgccttgtcgttcagacgtctgattcaaacatatatgctcatcgcttctcttgtatcgtccgttcagtcctaccgatcgctgttgcccccgtccatgcttgggtttcaccctgccgctggaacaatgggcaaaggaaagcttgtccggtgggtccaagaaggagagacacgagccttcctcgaaggccgagaaaggcaaggcctcctggatcttgatgagagtaacagggtaaatattttgtttttatcttgccctccaatttcagaatcgcatttggacttattaactccttttccttctcacaacatcaccaccagatcacccgacagctgtctccgaaacctcttttgaactacttcgacctattccctgttgtcattcagccgttcaccgaggatgaagctcaggcctcccaaaacttcaaagaactaacaactattatcgatgaatccggcttgatggcttctcctccgttcctctcaggttattctgtcgagatcgttcggtacctagtatgcgcgaccatcagcttagcttgttggtgggctgctaccaattatgctggtgcttggaaccatggttggcgaatttgggttgccacttggggtagtgccgtcgggttaggagtatactggcacctggtctcttttacagcccatgatatcgtcagtcctaactttataatccttttctgtcgtaatgtgctcgctcgttatgttttgattctcatttttgttttattttttggcacaaactggcttttgtcatcaaaatagggacaccgaagtgtcgctaacggatcattcttctggaacaactttctcggtgtcatcctgtcttgtttcaccggaggtctcagtctagactggtggtgtgccgaacacaacattcatcaccgttcgtctcgtcaaattctcttccatcattgtcgtactctaacatctgtcggaaccacgccctttcttcttgatcttgcctgcgtctgatcagatatgaccaacgatgtagaacatgaccctgatggtgagtccatcccgccctacaactttcccctgatgatgtcgagtgcaatgagtgttgatcgcgcatgcatacgaatccatcgtttgtttcagtccagcaacttcctttcctttgcctcaacgaagcttctttgggcagcttgtggtccactcgatacaagtcagtatcgcttggtgattttaaggttgaaaacagactatagcttactgatgtctgtcttgggttgtttggctatagagaatacaagatgtttgacaaattggccgcgctcgccgttcgggtacaacatctcagctactattgcttactttccgtaggcaggttcaatctttgtattctgtcataccagcacctggctatctatgccaagcgaagcaaaatgtatgtctactccaccgtacatctacatctacgtcctgatatgctgacccaactggctttatataggtgggtgtttgagctagtgtgccttactgggttcttctactggttcggcggagtcgtcatcgccagttttcctagttggaaacttcgggcatttttcttggtcgtatcattcatgaccgccagtccgcttcaccttcaggtatgatcgcctatcaaagtctctcttgaatccatgcattgatgtgctcatattttctcgatcactcttcttgaaacagattgttcaaagtcattattcacgatctatggaagacaaagggtgagtgtacattcttatcctttcatccatccgctgcttcgattgacgtgtctagtcgttgtgggggttcaaccatagcgtgctggagagtcacatgaaccacaatctccggactactatggatgtgagtttgaaattctttggccgatcgaatcgtgaatacgcgcagtccatgactgacctagaacttgttgacactctgtgtctgatagattctgatccatcctgccctcagattttacttcggcggacttgagcatcaagtatgtccgagccgttggggtttcctcgactgattctcgatgcgtgctgaccgttctatatctttgtctctcttttcaagaccactcatcatcttttcccgaggtaggtcgtatgattatttattctgatgagattagtgtgatctgacttgagtcgatcatttttcttcgcggctgatctcaaagaatgccccgacacaacctaaaagctgctacagtcatcgtcaaagaggtgagttatcctcgttccggtaatcttatcagtagctcgttgcactaaccacgtaattcatcctctgatcacatggctatagtggtgcacatcgcatggctactcgtttgacgcttacgggtttgtcgagtacgttcaacgtttgttagtgttcgaatccgccgccgaaggaccattgaccatcttgcttctgctttctattgacttccaaagaggaaataagatgacgctatccgtgatgaagagcatcgccgaccaagtcgcatttatgggaatcgtcgctgccgactcgtacgttttctcactcaggttctctcgatcaggcgcgtggtctgccgtgttgaactgagcctagccttgcctttcccgtactcaaattttagcgtggatgagatgaccaaaaaaggagtcgttcaagcgttcatgccttagttgaaattctcttcctggaccttctatctctcttgctgtgtatcgttctttctctttctcagtgaaacgcagagccaaatccgaatttgaaacaagaataaacggccggtttcatttccttactcatgcaatcttttacgcttaagattatcgcactcattcattcctgttcgtcgtcttacatctctttcgtcttctttgcttcctgttcatctcgtttctcctctgtcagttcgcttgttcgttagctcttgttacccctttcttttcacgttttaaaaagccgctgtctttcatcatgacacaacgcacttcatcttcattcacggatgtatcgctttctttccttttttccctgttgtttgccttctttacttgtcgcaatctccttgtcgtctctttctgttctatttcttgtcttggtcgtaattgcatcccagcgaggagggtttcctcagcatgtctaacattctctctgttgttctggttcttgtcattcagttctcacacttagaaaaaaaacggcttttctcaagcgtgatgcatgctcttttcctctacccaacaacttgaactatttagtatggcccaaattcagagtacaagacaaaagggaaagatgagattggtcggttgatgacgtcacatatcaactattgttcctataagtacttcaattatcaaccaaatttcacttcttgagatctattccgctttgaaatatgatctcgtttgcgtaatccttcttgtctcgtacagcttgagacagatgtcatcagattcagacgagtttgactcatttcccgatttgccactatcttcttcgttttatgagcgactaaatattctcgaacaagccgttccaagcgataaatctgatgcttccctcatcgacaaaatctatcgagaggatgaggatgaggatgaaaatagggaagctttacaattcaagacgccaataagagcgaatgaagaaatgaaagacaatgacatctcgaggccgatggaggatggcgatgctagcccagatctggagaggaaggaacagcaggtggacagtaacgagccgttcgtatcgatccttctcatctaaactggaacacggtggaaagactgactctccacttgagaccttccagtgataaaacgaggcaacgaagcttgttttctcaattcaggaaaagagggtttttctcagttactgatttgactgctccgacgtggtgtgaggtccaataccagtacggtcttcttgggaggaagcacctccccccgtcggagagaccgacttcgattatcactccgaaaggaaatgtgatcgaattggatcagtctcgggctatcgagaaccataagaccatggagtacgttgaagtttttccatctttcatactctatcatgggctccgtcatcaatcattaacatcgtactattatagacaaggaaccaaaatccatgcggctttggagaaagagattcatccgatccaaatcaaagtgaaagtatctactcgggaagagacctgggctttgagggtaacttcttcttcaagaatctatgccagacaaagcgccgctagctgatcgtcctctcttgcacgttcttcgggtagatcataacaatgttgtctagcttagaagctctcatgactcttggaatctgcgtaagtttttcttgttcaggtcgtccttgactctgagcatgacctaagccttcatctaatttgtagagagagatgcccgtgatgggatttatcaacggttttctcgtcatgggaataatagtaagtgtttaaatcgtatgctgagctgagcttcaagactgatattctcatcagcttacgttctcaaggatgagattcagcgtcggccgatctcggtgctctctacatcatcaagcggctcttccactgtccgcacatccaaaacaaagcaatcatctccaaagccgaatggatctttggatgatggtggtgaaatgataacgaactggttcaagcctttggaaccattctctcggtctgatggatcaaaagaaaacacacgtagaaggcggcagaaacaaatgtatactctcttgttgagtgactccaaaacgagacagacgaagagtctgcccaaagaggatgcgtcgttagctggtatgtgtcgatttgcgcgtgttctgctttctgctctcttgaatatctaaactgcactaatttcggtctttgattaatatgcaataggtaaacttcaggtccaagcttacaaactcttgttggacaatctccttctttcacccacaagccattctttgtccccgccttctcaatcgggttctccctcattcgaccccatgttctcatggtcccttttgttttctcatctcggactcgacaaagatgccctactctctttggaattccaacaagaggcacaagtggtgatcgacgggaatggcttaagatttttcgaccaaggccatgctctcaatctgaaactgttgaccgaaatttgggacaagtacgccgatctactagaggtcgaccgaagggaaggatgcgatcgagaattgtcactagtttaccgatggcagtttgcgcaagatgtcggtcggaaagccattcgaaaggaaagtcgaagacgagcagcggcgagtgatgagagaaaagagaggaaggtcagggtagaaaacgcagttcaagaagaagaggaacgagcgttggagttggcaacgagagaaagtttagcacaggcggaagggatggcgatcgaggatgaaacagggaaggaagaagcagaggaactcaagagagctatcgcgaccagtctagaagttgccaaagaagaggcgcctcccacttccgcctctcatactcaaacgtatataccccccgtcattatcgatgttgatgacgatgacgcacaacagcggtcgatcttggcgctctcttctgcatcagtaccctcgaccttaacttcaatctcaactggtccttctgtcacacgatccacagctccttctccctgtcctgatatccccaacatctttcaaaaagcaaggacggaatctccccgaacccgtaggagtttacgaagcgcttcctatgctgctcctgtttcacagccttcaacacctaaggtctctagaagactgtccaaggccactcttgatcaacctgagcgtgctaccgcgcttcttacaaaggtgtacaccccggaggtcctgtcacgaatgaaacgagtggatcttcaggcattagctcggaacaagggactttctacttcaggactaaaagctcagcttgtggatcgacttaaaggtctttcgatagaaactcaatctcatgaggaagaggaaagcgatctatctgagccaccctctcgaacgagacaatcgagactagggtcgcttgaggggccgtcagatgtcttgtctgattcttacgctcgtccatctagttctatctcctcctcctcctgctcgtcaacgaatggcacaagcaagtctggatcgatgcagaatcattcggatatgataggcattatacgattcacctattcagcccaaacgatcaagaatcacttagaggacatccttcgtttctggttgggtgagcgagaaccaaggggtgtcactctagaacatacctcgaggtgtgattggtgtacgtcctttcgcttcatccaaaggaagtatcaatgagcttatgctaatcactgagttcggtttactttgttgtgggtatgcgcgggattcaggtgagttcaaggacggatgcgagtggagagaaggacagagaactcgattgtgggaagaatttcagcagaagaaaaagaacggagaacaaaagatcgattggtgatctatcatatgtgcagcttgtgtccttttctgatccgaatagttatttgatcagattttaatccgtgtacaaccagaggagcgatattaagtatcaaagaatcatgtgtgaacatgataacacccaagtgagggacccagatacgagaaaagatgagaccaaggcaagtgagaatgaatgaaccccaggatacaaatgaatccttgaaaagaaaagcagacgaggggaatagaaatgaagaaagagctaggaacagaacgaagagttgagcgagacagagcggaagttcgatgaaaaacatccacttgaacaagcatgcagaaaagaaagaggaccggcaaaggctatgtaaacagatcatgggaaaacaagacgaagaagataaggtacagaatgatgttgaagacaaaaattcaaaaacttgatattgaagatgtgaaaagagagggagtggagtgagaaatcatgagggaaagagaaaaagaagaacatagacgatcgagacgagacatcgttagacaattgatatcacgccgtcgttccagtcttgaactctaagagaagcaaagagactgtatgttgatccctttgagccgactagaacagaaaattaggtaagaaaagagatgatcagaaagattaaacacacagatagagatctcaaaactaacgaggagatgactgtcgacacttactgaagcctttggcagaggacatcatcgccatatcgatcaacgtaggccaccaattgtccatcgaatcaagggtattaaggactttgtggtcgactcgtttccaaccaagaacatctgtaacttcgttccaccaatgaggattgacctcgtcctggttttatggcggagcagaatacacaagatcaggtggaagattcttcgtggatgaggatgagataagagataactcacactaaacatgatgacatcctgatcgccgatgacgaccccctgttcatctaaaagaacctttttgatccgagtgatttcctcgaggtacgtcgtcgcgctcttgaaacaagtggccgaggtttgatctgagcacggaaaatcgttgtgtctggcgtgaatggcgataaaaggtcgttggtgaccaggtagattggattgagcgtgttgaccaaggacgagatcggtgtatcggtctttcaggttctccaagtgggttgaataacggaggtatttgcccacgtttgtccatcctggccaattgggatcccatctggaaaagatgtcttgtttgtcggtaacccaatacatgtctgcccaacaaacgaaatttctattgagcgaaccaaactcagatcctccattctgagtggttactgtgcgctcatagaaatcccaccagccaccttccgaaaattcgacgaggccagccatcgagatcgcctggttgctaccggtctcgattggacacggccagacattgacctggacgccttccggttggattttattcatattcatctcctcggacatgcggaccggcggtttatttgtgagggagagaataccagactgaggcgcaatacaggccagctggtcaagtgtggttgaagaatttttgagatcacggaaggtcaggctcgggtgagaagtcagctcggtgtatcgagcaagatcgaagatcatttccttttgatattgagaattggacacatagagaaggtgagctgaacggacaatgtcgtgatcagaaaaacaaaaaagaaggaaggtactaaccacaggcaatctatcttggggtggatgttctgcgtcatcaatgatcgggtatcttacgaaatcgttcaggacactgaaacagtcaagagccatcgttttcataagagaagcgactgtgttagcgtactgacgggcaggtatggggctcaacacagaatacagggcgaaatttaccctactctacctgagcgctgggcataatccaagagttctagggactaaaggtggagagagagagagaggagaatttagtatttgaatacatatgaagaaaagaagaatgacgagcgcaccccaacgagctgattggatagacctccttggatcaaagccgtagcgtatcggacgtcaggaagcagggtttgatagaagctctctctataagatgttcatcagaagagaacacactgattcagatttaaatagcgacatgtactctggagagatcagaacgaagagcgtgacttactgaggatgactgacgttcacccaagacttcccctttccatggttccaagcgagtcgtctatgttcggcatcttgaagatgcagcgcctgttgaagccgtggtgccgagtttgcgccggtccatcttgcagatagagcatcatccgtcgagtgtagtgagaccagtgttcctatcaggaagaatactgatatgaggaggacgtgtttgagcctgacggtaggtctgacatgtctggcatagaaatcttcctgttgcatattatgagaatgatgtgaattcagcggaggcgcaatcgttggatgactatcggcgctctgatagcgagatgagtggtggtatctctgccaactggaagagtggtgatgaggtttgggcatatttacggacaacgttcgagaggtggttgtgataatattatgataaaataaaggcgttgggagaataagaaggacgagggatagagaagaaggagagaaaggaaagacagcaatccccagcgactgctgctttatgaggctttcatgtagctctccagagtgttcagagcgggagtaatagacaatgcgagggaaagcacacaaatcccgacagaacctgcaagagatgggtgtcgcagcgtgcatgcatgcagaactcatccatacattccatatgtttaagcctgatttgtatgctcagaaagtgtaatctccgtcggcgactaccgatcgccatccctccttcctgtgtaaagtttagaacataatgagaacgacttacgatcattgtcttcgtagacctcatggatagagaggaatcaaagaaacccaaggacaagtgagcgacagatacatcagaaaagaatgccagaagatgatggtttttgtatagtgagccgggtgagaaaattatgaggtatgttttaaaaagcccgcgtcatggccgaatatgttcactcaggtttgaccttcccgctcccaagagaagtttcatcgtcatgctgtccacatcacatagtcataaagagttgcagaagaaataaagatacggccggaacatgagaaaatatacacagcactcggacaagatatatagaaaataagatagcggaggaaagagacggaaaaaaaaaagaagaaaaaaaaaaaacatgagaaaacgtggtttgagtccatcccgtgtcctcaaacttaacacataagccaacacccgaaccagccggatgattaaaaagcaaacaagagacagatgatagattctaaaagcattcggtcaccacttcaacccctccgattcgcttgacatcgtctgaattcaatccaccgacgacctctctcacatctctaatcaatcctcccggtccacaaaccccaaccaccaaaccgcatatcctcggcttttcctccatctcattttctcccttcttctcactcatcgctcctctgaccaacgtagcttcgagcttgtgttgcacgagagttaacaccggcggtctaccctgatggacatgtagatctggatggacggccgagagggcatgggctgtaggcaaactcttcattcccgtcacgtacacgtggatatgaatattcaaccggattccttcactcgtcttacgcgccctcgtcggtcggagaaggggtgtcaagtaaggcaagaacgactcgagcgttcgatcgtgtctgatatatccagcaaaaatccacgtgaggttgagaaacgatatccgaaaacagtcatgcaagaatatcaactcaccgaacgatccacacaacgtctacccggtcggctcgacaaccaccggaagcagccctggcgaccaaaccggcagcctgtgcgagaacgaatgtaattccgctacccccggctaacaacaagacggacgagaacgaggtcgtcaacgtatttcccaacccaccatatggaccttcgattaacactcggacctgtcgactgccgagagggccatccagggtatttcctccacggcttagagcggacagcttttttgtccagccgcccgagcttttgataaacagccggaggcagtctccatccatcccgctcacagagctcggagcattagcgatggtgaatggactttttgttgtagatcaaacgattggaacgttagttaaaactgaaatactgagaatcaaaacaggcacaaatgaaaagagaaaacaaggccatatactcactgcttttgacagatcttgctgaaacccatcccagaatcgatcactctgatagtcacatactgacccgttcgccaaccggtcttcatccgagggatctcaaccattgtcgtttccccgtcggccaacggagtcaacaccgcttggagtgggagaagatgttttttaagagtgaactgatacagcagatcgatagcgtacaatccgagagcggatagacaatacggcttgcagaaatcgacgtgaaagtactgaaagaagtgaaaagtgaaaggcggtaggaattccatcagaatcaaatatgcccaagaagaaagagatgaaggggagcaatatcgaagaaaagacaccccaaacttactagagcaataagagtggtcatgaagcctacccagtggcaaacctgaaaaaactcgaaggctcgtcgacggacgatcgggaaactagaaaccgtcaccaatgccacaccgagccaggcgataaagccggccaggaccaactctgtgtgtagcttcttttcaaacgccttctgccgaatgtacttttgaccaaacacccaggtgtggatggacgatccgatgaaaatcaattttcccatgaaccgatggacataattgaacttctctcgacttcgacctagtagcatcacagcgattgaattcttacatcccagagctaccacgaaaggtaactgagcggtagcgattacaccggatcgacttggatccgtcctcggatcgcagaaccagaacgtggctaagccgacgacaagaccgtacatgacgagtacaaacagttgaccggttgtgagatcgatcgaaaatagtcgctcaataaacctagggagtggcaagtttaaaagcgtcggtagaaacgaaggaaagtagactggtgggaccgttcgggatgagtatgatgattgagtatcaactgtaccgaaacggacaccgacatccaggggtctgacggtcttcagatcgagcgaaccgtccgaagggaaactactgctcatcgctttctcgtccagcgagacttccgacaaaccgtgaatcatccctaccttacctacctggacctcagtcctagtcccagtcccagcctcagcattctgactggcctttgggatgagccaaccagcccagatctcaccgcctttcgagccagaaaacaatctgatgaggatcctcgggtgagcagccacaacaaaggtaccgaatatcaccgcgcacacgatgaggaagacaaccatcacttccgagtttgtgtacaccgttgttgtgccggtggtagagctacttccactcttggtagtgctggtggaagcattcgaagcagcgagagctgtaatattggaggctagaagctctgcgagggcttctgagacggtaagaccagaacgagccgaaagaccggttttcgaatgaagggaactttgccggtgcttgataaagcctgaacgggcgaacgagtgagtcattctgccagagaagactgaggaaagatgcgcgtaagaagggacgacgagctatagggaagacagtggaccagcctactgtcgggtgcacagagcgggaggagacgaaagagggagtgtcggggaagtgtggatggaggaagaagaaaggaatgatattaaaaaaaaacgggactttatctacggtcttcgtttttcacattattcatccacgttcgctccttcacgcatccgtcatgatatccttccaagcaagagacagcgtggtaagataagaagcatggctataacaaacctgaacaagagagctttggcccaggccaacctttgttcagaatgagaagaaccacgaggggataaaagagaaacacaagacacgcgtcattgaccggaataagcgtttactgatcagcaacaaaaataagaaagcggaacattcttttattaagaattctccggcaaattagattgttgactcaagttctaccggtagaccaatcagtgcatccggattacttttttccccggcaagatgaacaagatacacccatgatatacgcacaggggcagaagcgatctctccatcgtacaaagaaaagctcgggacgcgaacgaaacgatcaacagatttgggattgaaggaaagaagaaaggaaaagcgaaagcaggacgcagaaacgagcacacagaaacagataggcacaacatggtttcagaataaagacagaagaaaattaagagggaaacatgagaaaaaaaccatcttcgggatgagaagattttgggatctggacatcttcaaaaaaggaatagtgatagatgagaaacaaaagatgacgagtaatggcagctactgctgctgtatcagagcaagagaaacaaaaaggcagacagaggaaagaaacaaaggtaacaagattcttttgttatctttctatttttgattgtcagaaccgtgctccagtttagcaagtgccgtgtccgccttgttcaaatcctattttcggacagagacacatgcgggtcagtatctccatcgacaggtatgaacaggctttgaatcagactcactcgctcggtcagtcgtagacctccagaaggagtgctcacgccggaatccatcgtgcttgatcgacctcgcctaagaacaagagggaaaggatagtgatcttcctcttcctcatcgttgttgctcatcgcgtgccagactaccaacattcccaaacaatcgagctgtcagtaacatgaaaggtactttcagtatgatacaacataaaaggaagaaacatacactttccgcccatataatccgaggtatccaaatgctgcatatcttccgtaagagtacccatatctccaggggtcatagccccgcttcggaaccgtgggctgctaggagcactcaatggtcggccgaccttgtttcctcctccaaagtcaaactcgtcatcgtcaaaggactgcagaagaggggacgacgatcagttaaaaggtaaacaagatggtctgcagggatgaaaggatttaacaacacgtacatcagggtaagctctcctaagcgccagctgtctagccttagcatactccaagcccaagctcttccaatccagtagatcagacaatcgctccgttctgtttcgctggttaattcgctgtcgcctggttttagtgacgaacgagaacatttgttcctgcgtagatgatgacagggagagaataacatgtcagtggaaccgaaggctttcgagattgaagaaacaaccgagaaaaggaacgaacagctagctggttgcaggagtcttcgacactcttcattcgtcggtcgacgatgtagataccgtagtcttgagggttatcgatcagctcatccataaaacatccgaaaccagacaagttggttgtgatcgaagggatacccatcactgtgcactctccgggagtgtatccccatggctcatagtacgatgggaagactcccaagtggcatcctcgcacaaagtcctcgtagtcgagaccaaggatggggttgttggagttcaagaattctgggtggaaaatcaccttgacacgatcttcctttcggttgaacagctggactcgtcgaagttggttcaacaccggatcgttcgcatcgtcggccatgttgtgggtgacaatcggagggagcgagtttcgcttaagagcaaaaactcgtcgtttgagaagcaccttgtcggccgaggaaagaagcttatcgtcggagaggacttcggtcccgtgctcactatgtgttgggaggaaagaatgaaggtcaactcaacagacctgaatacatacgagcaggatgagagaaagaaagcaagctttacccagtgtatcgagcggcgtgctcgaaaagtcggtttccaactctgttcttgatctcgtccaccgtatcctgaagctgcttagtgacggcttgtcctttcagggcctcaatggtataagactgagtggcagcaggcatgatgatgaatgcaaccacggtagttttggagccagattccttgagcatgtgattcaaccctattaatttaccaccacatagggtacaatcggttgtaaataaagccgagctcaaaattccttgttaaaagacaagggattggggacatacgagcaagaccttcgatgaacatgtcgactcccttgtttctgtactcgtatcgaccagcagtgaaaaggtagagggtgtcttcgagatcaaagtcgtaagatccatagaaatggcctcggataaagtcgttgattttgttcttcgaaacggcgtgaaggttctggaactcgtgcatggcagaaaacttcgtgacattcaatccattgggaaccacaccatctgtcagagttagaggagcaagaagaggacaagtcgtcaggttatgggcaagcgtgctgttgaggagacaggcgacgaacctggctttcgcttcagaagatgctcggcttcgtaagcagtgatgtgcgagactgtagtgaagacgtcagcacagtgggtcgcacttcgctctatacaatatctgttgagatgttcgatacagaaacgagttagattgacttgttgaacggcctctacagaagagagatttagacggaccggtggtagattcctcgctttcctgcctcatggtcgacgtcaaagtactgtaaattgttgtagaaatctacacttccagcacataagtaacgtccaagcaaggtagcactggagaagagagggaacgagaatgagaaggacgtggtatcagcgatcggagtgaagtatctcaggttgtgttggagaaaagaaactgactgagtggtgaagacagtggtcaggtcaatgtgccgctttctgcagagtgggatggccaatccggcctgccactcgtgaaagtgggcgacgacagccgaggtcaagtggtggcttacaaacttgggaaaagagaacccaaaaacatgttagacggctaaaaagtgaggcgcttcaaaagaaaacacaggagtttgggagcggaatactaacctcgccaaggaaccatgctacaagatatccgaaaacgatcgtctcgttagtctcatgatcgttggcgggagccgggataccagcaaccgtccaaagatcggccttccattcgtccattctattagtattgcagaggtatagttcatcgacagattagcatacgagacaaaacttgagaataccccacatatggacctgcttccagatcagatggattctcaccgatggtacatagagctggtatcgaacaagataactctgggagctccttcaatgagccagtttccatagatgagcttaacaccctgagctcgcattgagtctagcgttttagccatggctgatccaggttcaggctcgacggagtcgacctccatctagggagcgccaaagtgagtgttgaatacgtaagtatggttgccaggggggttagaagactttagaacagaaaagatagaacatacgggagcggactgtgatggaacgtgcccaggaagaatcggcggtttggtcagcgtttctggctgtcatctctatgccatgccggatcaagtcggagggaaacattcgcttaccttgtaagatagaggcccaatgagtgtgtatctctttccactaacgtaaccagagaggagcgggtgtcaggcaagctctgaagaaggctagagagattgaaggggaaaacgagcgacatactattcggcgcatgtcactggagctttcgtcttgatgactgtataaattcctccaactgtatttttgtccaagcgatgggagaagagtgacgcggacaaataacgaatcggacggattcacccccgagcgttggagagagtttgagtttgagatggagaaagaggtcaaaccggggtaaacagaattgtgatggcgtgcaagttgaaaaagagaccggggtcagtgggatgaggattgtttgactcgcggcaatatttgatggatggtccctatatctttttttcaatagaattctcgctctaggctcaaattctttcgtccctcatggatacaatgggagatgggaaaagaagggaaagattggacagatacacacccttgttggctacttcccaagcgcattcgaacaagagagcatcgtcgactgtacgttgttgaccagatgcggacatgtcaagagagtaaaaggagatgtgatggagttattgggcgatgaagcaatcgagcgatggagtgatcgtgcgagaggatgctagtgagcgatcaagggaaactagtcagagatgtcttaagggttgtagaaaggaacgagattaagaccgatgaaaagttgggagaagagagatgggaagagatgatgatggttgaagaggaaagaagggaaagaggaacggcaacagatggggacgaagtaaagaacaaaagcggaggaaagcgtagagaaagagagcgccagtgagaggaacaggaacaggatcaggatcaggatcaggaataggaacagaccgggtaaatcgtcgccccgggggggggg

SEQ ID NO: 401 - DNA, 54622 bp, Xanthophyllomyces dendrorhous
ggggggggggagacgtgcgatttcttgactcggatcgacgagatgccctacgcgcgtctagaactggttacgaaatacgtcatcagatattgacagggttacatgtctatagtcgatcagtctcgctgcgcattgaaggaaacgtgcccagaagacctggccggcgaactcggtccgatcttctgtgcctttgccactctgcgttccgtcggtcgtccagacagtcagtcaattagtcagtcattcagttaacaagttagtcagtcaatcaggcattcaatctagccaaccaagcctcccatagaatctttcagtacacccacgtacaaataagaaaatgcttaggtatagttgcagacagttttgcaggccgcggtcgaatccattcctcctccgccggtttcacatcttcacagacttcgagaaagcagcagaagagccagcaggcgatccggatggaaacgaacacgccctttctttccagcatggacggattcaggtggacgggatgagcttgtgagtatcggttattcttgtgggtgggtggtgtgtgtatatcgtgtggtgtggaaatatagtactgatctatcttgctacagctctcctatccatctaagagaccattgcaggtcaccacaatctttccatccgatcactaggcagcgactgtttgacacattttcggtaagttcttttccaatctttgccattcaaatacccccgtttctgtgttcattggcgttctctgatcctcgcatcattcacacagcttccaaaggatcttcatccagtcgtgcttcggagagaggcagacgagatccatatcacctgtacgttccgtccatcatgcccaccatgtcagatatgcataaatctcagacgacgcatgttttcgctatctcacttcacagggtccgacaatggtcatcaatcccgctatccaatttcgtttctccggacgattgcgcctgatgtgcccgttcaaaacaccgaatcatcaccctcaaagtaagtggttcctgtttgttctgtttgtcttccattaaaaattttctctatcccgctgataaaacatgcgcacgctcggttcaacttcataaagaaaaacgctctggacagaaccactccaagccgagacccattcgccctctgtcacctacgattcactgacttcatcccggacatcccttcttcaggcgctcgacctgatccaccaacatggcgttgtatttatcaaatccgttccaccaaccgccgaagcgacagagtctctttccctcctcctctcgaataaccatccccgtcggacacattacgatacgttctgggaattcacagcagacctcaagcacggcgaccttgcctattccaatcaatctcttcctccacatacggatacaacatatttcgaagacccctgtggcctccaaatatttcatcttctggaacattcgggtccagatgctcaaggtggggaaacgacattggtcgatggatttgcttgtgcagaaattcttcggaaggaggatgaacattcgttcaatgtattaagtcgggtccaaacaggcgctcatgctttagggactccaggatacgctttccatactggtccacccggtgcagccggattccctgcacttgaactagaaaaaagaggtagcgcaccgaaggagaaacccacgttgagattaatcaggtggaacaacgaggatcgatcaaagttaggggcaggatggggcgtaggcgaggtcgatgagtggtacaatgcagctagagctttcgatgagatcttgaagagggaaagtagtgtggcaaaagtgaaactcaagcctggcattgtcgttggttcgtctctctgtctttatctgttttttctctctgccttctgtgtctctgtctgaccttgatttgtttctctcactcgtacgtagtgatagacaaccatagggtcctacatggcagaacgtccttcacaggcttcagaaagatgtgcggcgcgtacgtcggcaaagacgaatggctctctctccgacgggtccttcgtcgcgaacagaatcatttggctcgtgtcgggcagggaacatcgagtgcgcaggaggatgtttatgaaggaaattgttgatggatttatattctctctatgtctccaaatgcccttgaaataacaaaacaaaaacaaaaacaaaaacactcatttgtatctaaaattcatgtgcagtttcgactcggtcgtatcttgttctatgctggtaactaaatggactatatgcattgactaactcttcccttcttttctctgtctcttctataattgggcctcgatcaactgtcagttcgtcaaacaaatccaagaagaaaacgtcccaagtcagcaagcagaatctaaggaaacaagtgttgcaaggatatcaagccgtacctctaagtatcgaccatctttggcaaccaactcctcgtgggtcccagactcgacaatccgcccagagtcaagcacgtagatcttgtcagcgtcgcgctggttgttttagataaacacacacagagaattgtcgactcaagatgtcagcattacaagaaaataatgataataatagatggaaacatacgatggtggataaccgatgactaaagagattcaatacaagacggatacatagtaaagactagtcagaacactactcccatttcaacagttgtcgatgcacagataaagtgtactcacgcgatcgtgatggtcgttcgattggcagacgctcgatccagagcctgttggacgagcgcctcagattcattatccagagctctgagaacgggtaattcaagtttcagcatacatctcagtgcgctggacaggtgaacattatatcacagaactcacgaggtagcctcatcaagctgtttgagccagaaatgataacgaccaaaacctcttgtcagtgcttttcgctcttctcttcgggtctcagttgtaaatgaaatatatatatagagagagagaagccacataccaagaggatcctggcatctctcaacaaagctcttgctatacaaagtctttgtctctgaccaccactcaggctaagacctttcatcccgatagccgtgtctaatccttggtctaacgagagcaggaagtccaagattcgagcgtcccgacaggctgctctgatctcctcgtcagaaacttctcgatttaatccaagaaccaaattgaatcggacctatcgaattacaaggcaaaacgaagggaaaccagaaagagttaaatagaatgactgtatgagacatcaattgagaagaggaagactcacagttccctcgtaaagtacggcatcctgcgagacaagggcgattcgatcaaagtgatcgtccagcgtcgttgctcgaatatcctcaccgtccacaagaattgttccctgactataaagatgagaggaatcaaaatgaatggatagtccattgtggaaagggtgtagcaacaacaaaagaaatagagatgaacagataacgtactttggttcataaaatcgagcgagcaaagcaattactgagctttttccgcctccagaaggacctatgagatcgaaaaggtagcataccagcgacaagcatgacttgtcagtctccggcaactctatatctgagcatgtagaactaaagatctcgcgcaccacaaaaggcaatcttctcgccgggatggatatggaggttaagatcctcgatcgctcgtcgttcttttcgactagggtatgtcaagtccacgtttctgaacacgatatctgctccctttgacgatggtttggtagacagaatagtcgacgaagaagatggcttgagagtggccaccatcggcttcctttccatccagccagaaagaatagaaaatgcattgctggcccgagagatgtctccgaggaaggtaaacattctagaaagagagaatccgccgataaagacggcttcgaacgtggcatacagaccaaggatatcgacggagccatcggcgagtcgttttccaccgtaccagaagatgagcaaggccataagcttatcaacaggaaaggaagggggggtttaatatcaacacaatagggaagttaacaatagccgctgacaacaacaacaggtagaaagacgactaacgggaaggatggcttgtgaaagcccaaaggatatagaagccagtagcatggctatacgatgtttcttaatatcaggccgttgcttctcgttaaacgagttcaccacgtgtctctctcgcccaaatgcagctacagtctttatcaaccagagcgtgagcgaagagagagaaaggaggatagaaagatgtcagctgactgaagtaagaagcaaaaggtttggagagcttcgaacctttatggcgtcaacattatcagatgcgtaagaagtcgccaggttgataggcttggtcgactcttcttcaaactttacgaaatagatgatttcgccacaagctgccggaagggctaaaatcaatggcgagagtccaacgagaaggatatcccagctagaaaagatgacgagaggacaggagaaatatgttttaatcaaagatccataagcaaagggtaacatgtagtgcatattgggtcttacctgaagatgaacccaaggatcatcgcgccaacgaaactatcggtatcaggtagagtgtttcaatgaactcaagttcagtcttgtgttcaaatagaacagaaatggttcatcaaagacgatgagagtaaagagaagaaaagaacagacttgacgatgtttgagatgatttggccaccaaccaggccgaatagtacaccaatatctgccgggtgtttcgccagatcagaagtcaagccacccgatccattttcctccatctcaaaccaagcgacttcctatatccatgaagtccacaacaaagaacccacccgtgcgcgaaagaggcgtcagtgatgaaccttatgtcttgcctgctttgatcaaaccaatacgaacctgtttgagaatagcctcggttccttcccgacgcatccgtctgatgatcctgatcgatgctctctcactgaaccaagcaagaatgaggcctaacactagatttcctagagacatcacaaagaaccagagtgcccatcgggacgtttggtattcgacctcgttggcgtccgggacagaaagactttcgaccgcgcgacctagcatgaatccggacagaggccagctcgatccactattgagatttttgtttaattattttaaaagagatattgacaatcgaggcttcagttccatcagaacaatcccaattaagagagggaggggagaaataaggaggaaaggagagaacaaacatgaggaaggcagagataacaccaaagaacatccatttccattgccaagtcgcgtatgacaacagcctggtccagcgcttcccttttaatccctggctcttctcaagctcttcaagtgactgcatagcttgctctgcatcctctactcctttggcataggctcttcgagtctgcttcgtcattccatgttcgtctagagtggcagatagtgcggttgccggtgcagcgcttgattttatcaggtctttcgagatgaatgaaggtgtatcaggagtgtattcggttttacttgagactgatccttgttccatgagattgtcatcgctgtctgggatacggccatggtgtcgctgagtcatcttgtctaaaggaatgacagaacggatataaaatcagatgaaaggaggatcatcagatctatgaatcttacgggcaaaggaggaaaacggaggaagggagagatatagaagagatagagagaaaggaagaggaaaaactgacagtaagctccattgagggtcatcaacgattcgtgagtgccctcttcgatctttttgccacttccgataacgataattttatgagcatctcgaactgtggacagtcgatgggcgattaagatcacggtcatccctgtttgggcttgctcttccatcagttcggtctgaagtcgtcgctctgtctctgaatctaaagccgaggttgcctcactattgaagggagagtagaagaaaggaagtcagccagagcactagcattgaggagaaagatcagatcgaaacgagtcagcaaggaagacaagagagaggaaaagctcactccatgatgagaagctttggccgacgaacgagcgccctagccacagcgactttacacacatcaaataatccaatcaactcttactcaagggacagagaggtagaaagaagggacttacgtcgctgacgttgaccaccagataacaaaccggtcttcattccgttgacaacagtatccaaaccttcgggcaacctactgatgaaatcccaagcctgagccgttttcagcgcccgagtacacaactctctgactttttggtcgttagtcttatcagtgtcatactcgtccggtgtgcctgagagtccgacagcaacattatcaagtatactgccagcaaagagtaagggttcttgagagacgatagccatctgttgacggaggaaagacagttggtaggcggacactgggatatcgttgatcagaacgttgttcgtgagtgagctcgggttgggcacatcgaattgacgaaggagctataagagggcaaggagcaaagaaaacgagaaaacaaaaataatccctattagatttcagaactcaagatctgtgtggggagaaaagagagaaaacgtgatcggacttgccagagctgtcaatgtagattttccggaacccgaatggccaacgaacgcggtgatctttccggcaggtacatccaatgagattccatcgagactcttgtaattcggtctcgaagggaacgaaaatgtaaggtttcggacctcgacgcttagctttgccaacttctcttcgtctgtagtaccaagagcgtaggaagaaggcaaagcagtaacaccctcggtctttcgacaatctatcggagatggtcgctcaatctcggcccgaatccgagcttgagctctcaatgcatcgtgtagggtggtaagatgaggcaaagtgttgattaccgctgttttcggtgagaataaaagtttgaataggattaagaaaccagtcagagacaggagtaagagttgagaacaacagtcgatttgaagcaatagacggaccaaacatggcattgaacattgagaagaatgaagtgacgagttttccgcttgacaggccatgatgagcaactctaattcctccgtagtagactgaacataaaacagttggagagaacgacgagaccaaaacacaaaaacgtcagtgagacggaaagagaggtgtgagaatcagaaggcggaagaaaaacaaacaagagagcgcgtaggcgataaagagtccaaaataggcggtcgagtaggagaatcccttggagagcgatacaaagtttccgtccttttcgatatcggcgaggtgagcgtcgtataccttgacgagggattcggatgctcggaagaccttaacaattctgacggaggaaaggatctgctcgaggaaggaagaggccgttccctccgtcttagaaattcgggcggacgcccgagaggaaaacataccagagagatagaatctgcagaaagggggtgattcagaaacagttacacttggagaagggaaaccgagaggagaaagaagtattacaggatactggcaaaggggataatgctgaataggacaccgccaacatgaggggacgcatagagcgacacgacgactgaaaacgattcacaagagaagaaaggccatgagccttgtcagacagttggccgcgggagagagaaagcagaagatatagatactcacttccagcgatgagggaaccagtgccccaagccataaaccccaacttttcgccgatacctgtttcaatgagtccgatatccttgacaagtctcgagctgacttccccgggaccggtagcttcaaagtatgtagcgtcttgtgcgaggacggccgagaggtaagctgttcttattcgggcggatactctggacgaagcgagcgagactgtatatgtatacaaaagcagagtgagcgaacagagagcaaaagggagagaaggaaggatagaagcaggacgaacatgcactgaaaaatgtaaaggagaacagccaagacgcgagtactacaccgatcatcactatggagacgaactgagatactgaacggacctcatctggcgagcccgtagagcctctctggacaactggaagtgttcatgcagaatgtgaggaaggaaattgtacaaggaaatagccaagagtcaaatttgtcgaaacgaagaaggataaggcaaacagaaagaaagaaagaaaagaaggaaaggatgtacgaccggcagtccagtgtccgtacaagagatcgatcgctgcgaacgggagggaacctggaaggaaagatagatatggttggtatgttgtccatatatctacgggtctttcgtgaaaagaaggaaacacctacagcaaagaccgccgacaaggccgagtccgtatagagcgagatcggcccgggtagcatatgagaggaagctgaggttagatgcaatgagaaagaaagagaaatggagaacccgatttgagtccaccaagaatcggatgagaccgatgaaatggaaagtagaacagaagggacagactagaatactccaggaagaggtttgaaattccttagctctggcatttctttggcaatcagctcgagctgtctttgtctggatttctcatttgattccggaagagtgaccttgactctgtctttctcggactcaagtgcagggtctattgatggctgctggtttgccggagacatggttcactgggtgatcggtatgtgggtgtgaatgtcaatgtagagaagatgaatgcaacgcggattgtctatattttattgcctttttttcatcccaaggagagtcaatgacttggccgattcttgagtagagggagagaaggaagaggaaagaagggagtgcagatagcaaggtatgaaggcgagaatgaacgaatttaataggtggttgaacaaccggctttgtcacgatgagtagataactctttccgcgcttctgaagcgacgagccgagccggcgagtccgggcaggatggatgatgcgctatggcccgaccgaccgacgcgacatcattaccatcacggcgttttatccctgatagacagataatatgccacctgttgcacaagcagtgtataaacttccgaaacataactctcaaaaaggcaattgatcaggaacagcaaagggaggaatactgcgttgttacgcttccggttcggttgcgaagacagacacagacagacaaagatcggtcgaaagagtcggagaatttaccagtcatcctttcagcaaggttctatgagagatgtcaaatgccaagagagtggatcgaaggaaataattgaaggggttacgctcttgatcacatgcttacgtaactcttccgacacgcttgctgcttattactttatgatgaagactgatccacagccccacgaccacgtgcaaatcaaatacgcgctgcggccggaccctgttagattacttgtgctagtcttataacagcggcgtctattggtgtctgcattgtttttgtgaaaagtgatagagaacctattagacgaaagtcctagtaattttctaaatacaaaatttctctattgttctaggaaaaacaccatagatttttgtattactcgtacctcggttagggttatctcactgactgtttcaccccaaggtcactttgtttcctttccctctctgtcgaggtcccactctcttcaaccaactctcaaactcacacccggtacatcaactccatcctcaccgaaacctggaattgaaagaagttaacagacgcacaaagcacacacgcacacctacatcccagaacccaatctcttttgggctgtctcttcttctgtttttcccttctccctcttgcatctttgacggaccttttctctctgttaacacacatacacgcacacgcacacagcccatctctcttctcttgtcctctttacacacgcacacacacttccaacccttgcctggtcttttgtttgtctcttagttctcgctcttttgtcttgatcacctgcacgccgacattccatccgctgtcaatctcgatctatcctctttgttgatctctctgtttcccttgctaaagggatatccatcagatcagctctccctccgctatgcccttcttttcaaacattgcaaacctgtttggggttgcgaattccaagcagacctcgttcgagactcacagtcattcaaaagcctcgtcaagaggaagagcagctaacaataatccagacttgttttctcgttcgtcttatgttttctattatctatttcttcttttctttcctcttatttttaaaaaaatatgtttctttcttgatttgccttcacgctcttgctcacatcgctgttattgtcttactcgccctctcgtgcgtatacctacagcgtctgtacggaacagaccgtacgcgtcagacctttcctctcaggttgctctcggcgtcggtgattccttccacggaagtcgacctgatagtccggcccttccctcgaacgctttcctctcggtgagaccctgttctttcagccttctcttcttgtccctctttcgtcattgttcttgtctttttttttttttttggcctttcttcttttttaccgttcgaaagactaatttcattgtattcatccgttgcatccatccttaaaaagggtatacaacgaccagactcgcctggttccagtcgattacagacctctttctcttatccaccccgagcaatcagtgctgatggaggagccgcctatggccacgtggtaaacccagcagccgatgcttatgaccctagtcgggcttctatctctggctcattcgtgaatgatccccgagcgccaagatctggactatggcagccctctgcccctcacccacacgctgtctatccaccccttggtcaaacctggcaacgtattagactattcctcgataccacgtatcccgacctggccgactcgctcaatctgcctgctaccgggctcggtctgaacgatctcgagctcagattaaacatgccgctcccttcatctgtcagagagtcctacctgtgtacagatggtcaagataccgatggtggctgtaccgacggcttgtttttcggcctcccattcatgccgctcgaagaagttctaacagagtggcagtactggcgaagggtcgagacggatccacagactggggcaaacacgatgttacaagaacgcatgcgatcattccctccccgatggtgtaagcgagcctacgccaatagaggttggctcccactcatttctgaccgagcaggaaattatatcggcgtcgacctcgatcctggaccagcaggcgagtggggacaggtcatcttgtttggaagagattttgacacgaagtgtgttctctggaagggtgaaggcgaaggaggctggggccgctggctcgccagttttgcagacgacctagaatcagctgaaggttgggaactcgagagagacggaaacgagagcagcgtatgtctatcttctctcttggttgttttatgccttgaaagaggctctgaccggcttctcgtaccttcctcttcctcctctttcttctttcttatcacttctgcctcttgttcctttccttctcgtaaaaaccctctacaggattctgaggatgaaattggctacgcatcgtactctggaggcaacgtgtacggggacgaagccaacggtttgcgtctctccggtcactatcgaggttggccagtgttggaggctttgtttgataagagtgctcgagagtgggaccggattggccttttggtcgacaaggctcaggaccgagatgaatttgggctggaagctaaaccgaactcacaagaaaccaatgtgccagagtcatctgatccttcatcaactcagtctcagcctcaaccatcgttgctaatatctgaatccgaaagtccaccctcgtcctcttcactgtcgaatgggggccctcggttgctcgtctcgcctgcatcttcttcatcaccatcatcaagcggcaggctgattggcgagttgaagaacccaacattgctctctccaatcgttactaataccaagtcatcatcgtcgtcatcgtcatcgccatcgccatcgccatcgccatcgccatcgccatcgccatcgccatcgtcaaccaaacctcggcattcacacacccatacggcatcactccctccgaaaccagttgacctcccgacccggtcagatgttattgccgtagaggccgttgctgtcgcagaggacaaaaatcttcgaggaggatggatcatgggcgggctcaatgtcgatgcaggccccggactggatgatgggtcgcacaccgtcgaagatcctcttgttcagtcagaatcgtccaagccgggtccaactttggctaggcgatcagcaatggtcgatgtcgatctcgaggagggcctcggctctcgattcggaaaaaagtctgccgacgggggcgccagtggtggtgatgacgatcagccatcgcctcggccgtcacttagttcgttcttctctaggcgatcatcagatggccggattggtggtgtccttccacaagaattacccctaccaatgtctctgccaccgacgcctcctcagtcactttcaccgcctccgtctcaggtgcatataccgttgatcgaaccgccggcgaggttgaaatctccgttagggatatcgaccgtcctccagtctgctaagttcgatcgaccgactacgtctgatcggttggatgagaatgaaggtggtgatggtatgatggacgtcagcctgcagactgcagtctaggaataaggttctctcctccttttctctcgctttgcctatacattcacctgtattgtcaataggtcttctttctcgactgtatcttttacatctggggatctctctccttatccaccagcaggcgattttttcttatccttttcttcttctttcttttgtcttttttgctccctttccatgctatcttgtccgaaaggagagaaaggtaaagaagaaagacttgtttcgttcaacatcttatccatccatgtgttcaggcatctgtcatctctccctccctctctttctttcctctattctcttgattccaaattgacattacacctagatacccctttctacctggcaactcttcttcttcatcttcctagccttcttgttcttttcctttctttttctcttatttcattgtcagtaggtctctccagatatacacactcatccttttcctatcattctttcttcttttcccccttcctcctgctacttcaaatccatggtggaaaaagctcgttcatcaaaaggttcctgttcccctcatctcttccccgataaactttccttcttttagttcttcttttgcatttaccatgtcttgtctaccttcttccttctgctccgaactgccaggtcacgttcggtttcttgtggatgtataggtacctgaggatctatacatcattcatttcattccatctcatttcatctcatctcattctcttccttcttcctcgatctttccccctcagcccgatccaacactttgaacaagatctaggatcaaggactgaggtcaaagatggttagagcgtctatggtttaaccgagtttcgaggactctgattagatccagaaggtcatcagcaagcgagcaagcgagcaagcaagcaagcaagcaacgaatggcaaaaagagtcagaaacagactggacagaggtagagcgcaagacagaccttatgaaatcaaggacattctctcttccgacccatcctacctcacccctcgggtcgtttgggtcgcctggggtcatgtcgttttccgcatcgatatcaccagccccagcctcatccccatatttaacactaggatgagagttgacatcaggaagaggggtgtgatgagagtcggggttagtttcatcaccaaatatgtaaggtgttccagatcggataaggaggattccttcatccttgctctgtctccgttccgcatcggataaattcgatgtcgaaggtacacccaactgatcgctctggaccatggacaagttaggcggagaaggaagagaagggagtgaagaggaagaagattggtcgataagacccttccctagatctatccaagcggaaatgttcatcatgggtccatggacagggataggaatcaaccgttgtgggtgtttgaacggtggttgagcgagttgggatgatgctgagagttctgaaagtcttgattggagaaaaagaactctatttaaacatacgtgtgtatgttcatgtttgtcagagtgtttgttcgcaaactaggtttgaggtgctgggggtgtgtacaaaagaggtaaaaagaagaaggacgaaccgaaaggtagcttcgttggaagctatgtcaactcctctccatttcaaacaatcgatcacatcttgagttccatcacccattactcattcagtcagacctcaatcttcttggagaacaacggatataaaagaggagagaagaaaaaaatagagcacatacggataaggccattgaatttccacccatcatcgagcacgcagtcgagaattgtctctgctggtaaaggtgaggcccacctgagaagtacccttgcactgatcctagtatgtaaacttgtcggagcccctgcaagtgccgaacggcaagaagattgaatgataagaagacaggtctatgtcaaaaaaaaggtgttggtgtgtttggaagcgtctgacgaaacacggaccatgtggaccagaaacacaaagacatctttttcctcttggaattggtgatagtgcgagccagtcggtcgtcagttccgaagtggccggaagtccatcagcaacaaagtccgggtggttctttagcgcaggtaaaggatagaggtaggcgtatgtcaacctacgagaatgaccgaaattgacatccagaataagtcgctatgacgagttcgcaaacaatcaagaggagggatgggcctagaacgaacacattggaaagcgaaagatctcgctgcttgccctttcttctcccctttggccttttcttctttgagccgacgctcagacttgtatcagagggatcaacagtcaaatcattgatcccacctgtgaggttgtccacttcattcgtaaatattctggcagaacgtgacgcgacaccgaggtgtccatcttccccctcggaagatgcagagggtgatgaggagcgagagggtgaggtggatgctaaatgggagtaagcagtgatgtttttcaatcgttgtgctacagtaagaatattccgtttctatggaggcaagcacagtggacatagaatatgagcggaaaccaccaacaggatgttgattagagtgcggtgaaatctattgagtagcagtggtccggtaaccttacctttcgctgttgatttactatatcttcccttttggaccgacgagcttgatctggagaactcattaatggattggccaaatattctgatgatctatgagcgaaccgagccgctttgtctgtcgtaggtgatccgatcatgatggatgaacaaatgaatgagaactacagtcaagggtttgagaattctttaagtaacgtttcttatcagataacgattagtttctgagatatttagtcgagtattcaaatcagattcaaaaatcacgcgacgcgtccggaaatggaaagccgtcagacaacgatctctggttctttccatcaccatccctccattgaccgaacaacctttccgatggcaccgagagtctcatccagtagacagaaaaccagattcgaccctttgttagtcaaaggacagtcgtcagacgcgctcctgaagaaactcaaagcgttccatgaggagttgaaggaggccaatgtggaggacaacaacttagagatcgagaacccgcgttcgaaggtcttcaaatataaggatgagctagttgatcgaacgatcttgtttcacaaagagtaagtcataagcaaatgaacgatacagaactagctgtctgtacgtctcagctttgagagacgtacattctttggagaggcgaggagagtctcaaaacgaacgcgtcaagggattgttcaggcaacagtcggaaggtgtctacgattaaacctcaaccaagcttacgatgatgcttcatgttcctcttctactattctgtttagtccaggggtaaaagcatatgcggcctgttgtctggcagacatcttgaagctatacgcgcctaacgcgccttatgatgggagaggaatcgaagtatgctctttgtcaacttgtctactcgtctcagttatgctaaagaccttccttttttgacaggatatctttgcgttctttctaaaaatcataacaacccaactgagaccctctaaatcagtcacctcccgaacaggatccggcttgtctcatccaaccaagaatgaattctacaaacaatactattaccttgttgacagtatggcgtcgtggaagagtgtggttcttatgctggacgtcgaagaagccgaaggagattctgctggaggggttaatggaagtatgatcgtccagatgttcaaagagttttttgatctcgtcaggtgaattgtcctttctcggttgtaaatatttcggccaagagagtcccctgtttgactaaatatttagctctgggtctactgtttgtgatattttctagatatgatctaccaataactttgacagatcatttggcagacatcctgtcgacattaatcgaagaggctcaaacactgaatcctgaagtccgacagatcatcctcgatcaattcgatccttctcttcctgtttgttcacatctttccatttgctgcgtctgtgcttctttttcgatcaacttgtctttgtcctaacctgtagacatactttacacttcttttcaaaaagggtcaccatccactggccgttcaattggcagtctcggtgtgcgaatttgattacaacatgcaaaaactcgagcgtggtattgcccagtactttatggacgtcctgatctcatttccgatcgctaccagcgcatccgaccgaaagaaaggcaaatcgtccaaagttcggaaagtcaccaaaggcaactctcccgtgccttcggatgattcgtccgatctctcgagcattcttgacttatcagatgtcgactcgtcagacgaaaatcctcgatcaaagagatccgctaaccctcacgccacgctggattccacccacacacttctccggtcaattggtcgatacacacccctcactttactatccactttgccaattttagcgtctgagttagaaaactcagagttgacacacagaatgccggcggtggagactctgggcgatctgtttggccatccggccaagggcgccgagatcgttggtaaagcagagaaggtctggatggcatgggtcgggagaagtagagatccagacggaaaagtccgaagggtttgggttgataaagtaggaggcatgatgggtactgtaggcggagcgggaagtggagtggatgtcaagagcgccttagaacgtacgataatcctcactagcctttctgcattgaatatcaagtgcaaagtgcatataaccgattgagtgcctctttttttcctcatagctcacttaaggctgaagatgaacgaccaggacgacaaggtcagagaatcggcctgccggatcttcggaaagatggatttcgaaaccgtgttgcatcacgtccagcctgatactctcaaagatcttagtatgcggaccaaagacaagaaggtccgttcgtcctgcgccaatcatgaagcctgcatcgcatcaaaattcaagtgatattcttctcattttttgtttctttcgcactgcaatcttgatcagatctcggttcaagctactgctatccacagtttgtctaaactgtactcactagcttcttccgaaatgttcgtcttcctcttttcgtactgagcttcctcagtgttatgactgacactgtttctcaatttgaacccacagtgaagacaacgagccaagtgcgatggagcggtttagttggatccctcacgagcttctcctctgctgccactctgccacggcagcgatcaggtctgtgccgtcttaacctgcagcgatacttttgtcttgttctctcagattgttagaagcaactctcatcatctgtctcgacttaatcgttcttcctcctaccagggaaatcattgagcagagcttcatccgctacatccttcccttgcctgtcaaaggggatgaggagaccatctggaccgacaggatgttgcttgtcttcaaagggcttgacgagaggagcagagctgcattctttgccatggctggatttacaccgttggttgcttcttgcttttcttggtaaacagaactgagcgctgaccttttctaatgattctttgttggggctgacagtatcaagggtcactactcgaggtttatcaagtgctgtgaattgtataatgtatgtttccttccttccattttcctcttttttaggtcatagctagttttctctatagcataggtacaatcgaaagctaaccaattttctctctggcctgcagggtggcataatggatcaagacggagaggcaattaaaaaacagttgactcatcagatcaaaatcatgtctggtaggtgaaacattgttcctttctgatcacccctccatcatctttgttaagcaatctcttcgtttgagtttcaagtcatgttccctgatgccagtaaggctgcttccgacctgagggagtttgccgagttgaatgagaaccggttgtatgtcctcctgaggtctgccatggatcctcaaactgacctcaaaacactggtcaaaatccaggtaagcgttgcctgttgaggaacctacgataaagttgaatccgacttaatttgactctcttccttcgcgtcctctttcagacggagttttctcgtcgagtgccagaaacgattcgttccacatttagtatcgtcattcgccgatcatccttttcatacgtcaatcgatcgtccattcctactctccttaaacgacttcagaaacagatacctcaacctcctgctactcctgcactcagtacagtctctgttgctagcgcatcgcagacatctcaactacagtccacgcattcccagttccagtcacttgaaattcgaacttcaatcgcccaagcccggagtgaaggagctcggtttgtgctcgagacgatttcaaaggtgtgcccaattatgttcaaggcgcacggcaacgagcttgggaaagctgtgttagaggagtcacccgaagtggagagtgtggcagagattccattacaggctctgggaaatttgggtagagttgacccaacaacttcagtaggcgacaagtaagtgattcttctactttccaaaccgcaaagacagctgtgatagtatgctgtacaacactaatcaatcaatactgcaattttgtgataacgcttaaccttcaaatagaaaattactggatcgagctatgttctttgccaaggaaggatccgctcgacaagcaaagtttgccgctcgacttattgccttctctaaaagagcagacagccttactcctgaactggcggaggtaagcaagcacttcttcgactaagttcgtcttttggaactaggccggctgactagttctctggccgtgcaccttgtgatacgtagactttggcaaaaaatctcgatacagatgacgaccaacacctatacgctcatctggccgcgctctcagaacttgcccgctcagcgccaggcgcattcgaaactcagagcaagacgaccattggatttatcttgaaaacgtttggccaaaataatgaggaggtgcgttgtccttttgttttgcccactccgtcttcttgttctgttcttcctccttgacgaaacgccctgatgacccaatttaacttcgttggtcttgtagaatgattatgacccagacgattggattgaggactatgagctaaccgatcgagcgcgggcaaggcttaccagcttgaaactatgtgcgaaccgatgtatagttcacgccgaaacgaccgatggcgcccaacttgctttgcctgttctcaagcttttcctaactatccttacacagagtggattcttcaccagtaaatcagaccagtgagttacatcgatgtatcgggtcgacgtagttagagagacgcacgctaaaatatgtgtttcgttatacttgtagctgcaatcttaagagtcgcgttcggctccaggcaggacgatctttgttgaagatctcgacgttcaaacgatacgcggaaatgattatgcccaacttcttggttgtagcagttttggttcaggtaatgtttcttctgttcatctcaccatttatagaaacgaatcgttgacatcgaccctaaatctcaacatccaggatccttgcttctatgttcggcaaaacttcattggtaaagcgtgcgagtatttaggtcgagataaacttccttctgccttcaacgtcatgctcttccttgcggctcatgatgagccagaaatccgatctagcgtaagttgagcgcaagtcgatcattcgtctactgtctataagctaatggagtctgagtaatttttatacaggcaaaaaacacgattcaacgaggaatgaaggcgtctggatactcatctgaacgtgagcatcctttctggtccttctcactaggcgttgaaacccggatgctcattccatcccaatattcctgtgttttttcttacagggagaatgatcgaccgatatatcttcatctttatccgactgatccatactctggcgcatcatcccgattatacaaacgagccagaagaccttcaaagcatcgccaagtgcgtaaccagaatttatctctaacatcagatacggcttacttacttcatcgcttatttgtatgaataaataggtatatcgagttctatttggacattgttctctcaaaagagaatgtttcattgctttacactctagctgctagagttaagacagttcgcgatcgggaggaagagtactctgaggttagtgcttaaccatgactgtctctcactattcaagcaatttctctcatagattccaattgttctcttcctggctatagaatctgtatactgtaggagagcttgcccaacacattattcaagctcgaacgaagatccatcactggacgcttgagtcgtaccctggccatataacgatgcctaaggatatctttaagcagatgcctagcccagagatcattcagaaggtgcgttgcgatgtttctcacttgtagaaagagtatattcatgtcatctctttcttttataaatctattctgctaccaaaacagaatctgctcaaagtgtatcttcctgaagaaactttgaactttttcagaaaggatttaggtaaaaccattagagaccagaaggtatgcatatttttgatcaatatttctttctgtgaaagggatcatcaaaggggccttctgacttgacttgaccctgtctgtacaataacaacacgaatctaatcagatccgtgtaaagaagccgaccgtttctggccctgataagtccccgaggcagaaaaaggcagctgcatcccgaaagtgagtttgttcgcttcaactaatttcttcgcatgatactattccgcctaacgtgactctcaatgttttatcatcctcaggcgtgccaaacggcgtaaggagtattcttctgaagaagatgacccgacttcctcagaggaagaagatgacgaagagaacgacgaggatgacgttgaagaagaaatgccgcctcctccgtcgcttgtcaaaaagagagccaggacagagtctgccagaacaaacgctcgtggtcaagcagctgtggttgattcggatgacgaaatgcttgaaattgaggctaatcctgacgacgcttcagaggaagaggagcaaacgttgggtagaggtgggaagagaaaggctgcctccaagcttgtaggtctttcttacctcctatcaatacatatatcttctcgtctttctcttagttcgtcgcgtctgacccaattcggttgttcctttcttccccttaaaagtctcgacccaaaccgaaaacacggtgattatcaagggaatggtattgcgttgaacatactcccaatgtataccagatttattttcaaacgtctgaaggagagtgttttatacaactggctttccaccttttgtctccttactttgtatatatgttctttcgtttgtctctgcttttcgttctccttgcctctcgaatacttctcatctcctctaacttccgcgcctgttatatattatctcttctgtccgttactagcttccggcatatatctttctttctcgcgctgtttctatcacatgctactcatttccctcagtcgtccactcgtctatttgtgtgcacagccgcgccatcacgatctcaaatgtttgagacctctgaggaccattacatcataagtgtatggcgtgtaacaatctaacaatggaatggtgcaaaaaaaaatacgcagggcacacatcgagttggattgaaacagagatatcaatgaagaagcggacagcaactaagaagagttgaacgagaaagaaagaagaggagaagaatggaggtattggatgccggatcagggatgaagaaaagctaacttcaacgacacaacgattggcggtcatcaaatatgtatatacataaaacaaaaagatattaaagctgaccaagatacgcaagaaagagttttatgaccaagagttcttgtcccatgatgggtctgtttttgttgattttttttgaacaaacgataagaaacaaaattgcgtcagtttctttacatgtacgattcgtcaagataagaaatactaggttggaagaacaagagggctgaccttgtaggaatgcgcagaggactttgcttcccgtcttttgaatgcacgcgtggaaaaaccgactgacgtcagccttgcaagacagatacgtacaagatgtattcggaatgaagagaaggatgcaaacctgtagcagcggatgtccagcaacaatctctaagaacctctgcagaccttcccttcgctgatcgatgatctcgtcagtgaacctattggtaaagatttttcctggaagaggtggaatattgacctggttgagatatataggtgacatttttgagttagttagagctgcacgtataaaataagtagctattgaacaacacactctcgtagattctctctcgagagtatctctgaaggcctcgaaatcagaatatcgccttcggacgacagaatgtctgagcttaaacgccggtatgtttgtctatcagatatagatgccatgaacaattctctgagagttagtccaactatttcgatgacacacgagcgattgagaaattgttaaatatcaaacgaaccaagcagacgatctcgtaatcggtatacatctttctgcccacacctacactcggataattcccagtcggtttgtcgtcgtcatggtcatcattagccacacgcatctagaagaaaggaggagataaacgagtgctgaccatgcgtctgtggatctttaacttcaatctccaagaacgactctggagcagcatacatctcatcaaactgttagttccccaaaaatcccacagaacgataggatacaacaatgttttgagtcagcaaacacatgaccaacatttacggatgcgtatatgcatacttgcgcagaactaggaacagatcactcagacagaaggaaagtgatccgagagttgaagacgttatgtatgtgttgtatatctcaacatccagacaatcactcatcgacctatagaacgagccatccgctcacgctccacgagcccatcgcgatcggatctccaccatcaccatctcctccgagctgactcatctttttttctttcctttgtgactctaactctcatatttatttcttggacctcgtagagcgatagtgaagcgagaaaaaggttgcagtggaacaaaagaaggacgagcaacctacagtctgagctctcattcccgggatccgggtaatatctccactgaaagctcttgcaaaaggagaaggctgcggaggcggctgctgctgcgaatatccatcaccatatgggctcggttggtgctgctggtgatggtgtggttggtaaggctgttgatgttggtactggtactgattgttctggtatggctgttgatgctgctgttgctgatgcgggtagggctgttgctgttgttggtgcggattgcgctgctgtgaggaagaaggcgaggaaggagatgcagaaagaggacctggagggagaggcgttggcatgaagctcatggtgttaacgaacaactacgatggcaggtttatgggaaagacggagagatgatgacggtaagagatcaggagagaaagggcgaaggagcggtgacggaagaaaggccggcaagatatgtaggcacttaatattcaaatacaatttcaaataagcaatagattgaccaccgcggctcttccctagcgatttgtctcaagaaaacagattgtataaaggccgctggaaagcgtggattctaaaaacacaatgcgggagggaatacatccccaaagaggacggagagggagaacgatggaaaatggaaaagggtaacaaaggaccggagaaaaaaaagaaagcaaagaaagtagaaacgacatctaacatcctcttttcattttaaatgtccatcttttcgtatccctcgtttggatgcaagatgaccaaaccctcaagcacatgactgtacgcaaagaactcctcggtagcaagctcagcacgctcgagcgtgccgatccgaacgggtgtctgatgagtgacgaatccagagattcctctcggctttccagcctgaccgacaacatcgaccgcctaatcaaaagcaagaggaagaaagaaccaaaaagaaacggagaaggaaaaaggcaagctgagtacttttcacagagcaagaaaggaaggatagaagaaagaggagtcaaaagtgcaacttaccaatccaactcgagttgtcacctgctttggttcaagcttctcatccaacgtgataaagaagcggggatacatggccgagacaaggaagtacatcatccagtgtgacttgtccagaacgactgcatgaaagatccaaaaaaggaaacgtatcagtagaatgaagagaaaaccttgaatcaaaaacgcaaatgaatggattacatacacttctttgcttcggtgaaggccataactgtggccagcagaccggcaatcgctgtcttggacattaatgaccgatccgaatggaacgggttaataccaatcgttcctttacccatgtgaacaagaccctgtatgggggtggagaatagcattcagaactaaagatcagttcggccgcacgtttatttctttatggaagaacagaaggaaggcatccgcacctgagcgaccctgacaacgaacaagcaatcctgttctttttggtagtatccggccaactgcctcaacatctgtgccaactttgcgttgttcgtacccgccccaacaagaccgagcgcaaaaatcgcattcagagcgacctcgagatcgttatcgtgcgagtacttggacaacgtatccaagatagccaactgagggttcgacgcgcttaacagaccgagcgcgagagggacagcctttcggataaccggatctccatagtacatctgatatgatcaagaaagttttagttcgtcgaaaccaatacaaaccgagttgaaaacaaacgacaagtagagaaaagagaaagacaagacgaaccaagtggttgaactgtctcaaactcatctcggcaccaacatcctctcccattgctataatggcgattcccaagacggctaagccctggtatgtgggatcatctttctccttgtccaggtggtcattacagtggtgaagcatcgactgaaccttgagcacgttacccgttccggcataagcgcacacatcagtcaaaatagaggcctgcttggccaacagatgagggatcgtcttcaagatttcgcacgtcgcatccgaagcgtcttgtcgaccaacatatagtagagccaaaccaagagccatgaaccgagcccacttctctccgagtgcgtcatctgtcctttccgtcatggtcgtcaagatgagctcggcgacctctccgttggcagaaccgacaaagatgaaaccgagagcgagagcggtgagagaggcaacttccatcgaggtggtctcgtctgcgatataaggactgagaaggtcaagcaagtcttgtcgttgtgctcctgaataggccaatccgattctgagattgattcaatcgcaaggcgaatcattgatgagtcaattcttttgaacagaaagatagctacaagactttgggggatacacaagtaagcgagtaacatacccaatgattgcactgatcttgagtggcacgctcttgctttccacatgtggctccagaagcgcaaatgcagcatcgacctcggttcgcacaccggcgtgcaggataccggtagccagcaccgctccagcctggtacccatcagccagtttcatacccgaagtatgttagtggttgtgtttgagaacagaaaaaagaaactaaaaaagaaaactgaggacaaaccttgatatactcttcagaagagtacatgtacttatccacatgggacagtcccacatccgtgtcccagagcaaactcattcccaaggaagcagctgccgacatcatacctaaaattttagatagtgcgtaaatatgttaacaagcgatcaaacagaagtttgtgaagatattgcgtgacggggttgaaagagaacaaaccatgatccttgttcttataaatccaagagtttccctcttcagcttcaaccattaacttatcgtttccaaatccagcattgacgaacgcgttaacgaaggttcctgccaagttggctcgggcagaatcgatcgacatcatcgtccctattgtgacaatttgtagcgagaagtcagataattcctcaacactgacattatcatagagtagcgaaagaaagaaaggaaaaagaagaaaagcgctcacgagtgctctccaaatggctcttgtagatgtcctccaaaccttttggctcgacaacgtccaattccttagcaaacagtttaaagaactctgagagcttggtattgctgatacattcgacgagctcttcctcgagctctggcatatcgtccgacccttcagcgatttcaggggtaacccagtcaatcggaatgtttgacctagccaggtggaatgctagctgcttcttcattgacctaaatgattcgacatcacaggatgagcaagcaagcgcacgacaaggtggatggccagagcccgaaaacagaaggtcccgaaagagaaagatgagaattatacaaaaacagtaacacatacaaattggcgggagcattgaaagcttctcgaacaagatccttgtctccgattcgaatggcaagcgtcatagcttcggaatatcttgagtgcttagcatagatagcatgggcggttcgaaggaaccgaatgtcatccggcgggaccaacaggttgacacacctacaatcatgagtgatgtagaatcaaaggaaactagtgattagcgaataggatggaaatctggatttatgtcatcgaccaaaccagccagactccgcaagaaaggaattgaagagggcttacgaaaccatgtagagacacactcgctgatacgtatccttgtcgaccacctcgagaattctctcaatggcctcgagctccagcaacaaatcaaccgcgtcggcctcggcgttgtgcttcaagaagaacgggacaagatctaaagcaagtttcaacaaaccctcctttgttgtctctgctctcggcgaggaaggaatcttcttgtcttgttccttcgcatcctctacaattgaatcctttccgtccagttttggcttctcttctccctcatccgcggggagagaaatttccagatactcttcgcctaactcagcagcaagatgtcgaacatactcgtttccccatgaaccaggatcctcagttgactgagagatcaaccgatagtggagagtgtctcgcttgccggtatccgagtacgtcattgccaaaacagagaggatcgaggccaaaagagtctatttggttcaaacgaggtataagcataagagttgatagatcgagagaaagtgccatgacgagagataaagagctgactttttgtgtagaaagttcagctccccatgctgatcgaacggcttcgagctcagagtaaaacggacgaaggaatttgaggggtttcgggacggaagtcatcgagcttgtggatgttcggatcaggttgcggagagattcaagagcaggaatatagagagtgatgtcggattccttttttaggcaaagaaaagcccaagaggcgtgtaagcacagcgaccgagagcgatggaccaaagagaaagctcacttttaaacgttcgacgagcatttcgagctcgtttttgagactttgatcctcttcagactgttggacattcgatgacagtagagcgtatcaggaattcattagtaaagcgatctgagttgatggcgaccttatatcagaccaagctgatcgtattcatctctccaagtttcaatgtcaatgtacaagcttgtatcttgagaagaggcaagcatgatgattcccacagatacgctctcgtttaaccaatctctcctctcgaatgaaccatcgactagacagctagtcacaagatagcagttgaagagggagaattcaacaagggaaatacacgccacaacccaacagtctcgcccgagatcaacgcaaaaactgaggagagagcggagaccaatcacaagaggggaacagataggcgcatagaagaatcacggagcgagacgttactatactcactaattcgtcaacagcaggctcgttctttccactctttccttctccattgatggctttcttcttttccgtaccggatgtatccttggattcttcattctccttggactctttatcgtccttcttttttgggtcctccgaggtgaccgagatctcaaacgagggcttttcaggctccatatgtattttctgtaatgagatagattgattagaggggagacgataggaacgagagattgaagggatgtgggttctaggttgatggtgatgatcaaagcgagtagaggatctttgttccacgcaggcaaacatgccaggctaacaacgtttgtcaggctgacttgagcgtgagcgtcagtttcaaactgttacgatactacaaagtctgctatccttgtctgtttcttgcgccacctctgttgtaaatcttgatatcttcgatcttccatcctttctcaagcattgtgcattgactgacgacgattggttagcacgctgaacgactgccactcttgagacagaagtttgtcggactgcacgagagagacattgtgttaccgaaatgagtgctgtctctttccaaacagtctactgtgaaacgcatatgtacctctaacaaaagataaccaaagcctgttgaatttcgacagcgaaacagacgactcagttcgatttgtcgttcttgctaaccaactccaacgccctattatcacttgatggaatggtacgaattgttcagtttctcctcgcatctgatcttgccatgctcttgtgcgttagtccaagaccgggactgatcaagttgattttagctctaatgacgtttctcaagcatgcaaacttgttcattctttcgacctacactgggtggttatcatatttgtctttgtttaagcctttcccatacggttaaagctaatcagaacgtccaattaatgatctgttcggctctattttgctgatgtgaacaattgacgggaggtgttcctgaactctcctcgtctcttttcgaatctgttttcagagagtctaagctttatatatccggcgacaaagaagatgcctaaggaataatacaggttcttatcgattggccgttatttccacgtatcctgccccgctgtttgcaaggaagtaagaactgatcacatgcggatgctgttgtcaagcaagaggtccatccttcaccaatgtgacggaatgtttagtaactgagtttcttctgtcgtctgcacctgcagacactcgattataacgaagctttgacatctaggaatcgtcttcacgtttgtttcaaggtataaaaacaagaagaatcctcttatcccttcttagatttaaatgggatgagatttttgcttgtatttctaatttatcgacgtgtctggcctacactatgggctcgtcatttgaacgaagtgcatcggtttggtcccaagaagcctctcaagaacaccgtaaaagtgatatagggaatctagaataccatcaagatcaagcgtatcgtccgaacactttgggaggtcgatattttttgaatggctggcagggttgccgagatgcatgccgttcaggtgaatgtgttgtctcacgtgtgcttacccctatcgaggcgccagcgtgaagctggagttggcttcctctttacttccctgggcagatggagtgcttgatactttttctctgacatgaagacgaacagggttgtgaatatcgaagtgggtccagatgccagagtcttctgttggaccctacacgagtaacataataagggaatattgtctctcttcttgtttgttctatcacatacatgaagagtactgatcaggctgtctcaactgaagtttcggaggacgaacatgaggcaatcttaaagccgatggaaaatacacaaataacaaaaagtccatactataatacgtccagcatcatcacttgataaacacaacggctttctgctatattcatcatggggtgaggtttcaatatcaagaattatggattaacacatgagtagtacacacgtcaagagccaaagagagtaagcgatatcgacaattatgactaccgaagtcctttactatctaagcgtcagcaacgtgcaagagtgacgcggtctgttcagcatttggtgatgaaaggtgaagagtatgcttacgtaacttggtcgaagacccgagttaattattcaaagaaccgagtccgggtccgcggaactgtggaaccggtctacgccaatggaaccccgtctatccagtttgccttcctcgctgcacttcccgagaggacagactaaaaagtacttgaataacatgaatcattatcttatttttttgccgagaatttactgtgcgccggtgccttgagcgccttttgcttggtaccttgccctgcctctccgtaacccgcgtgtgggtgtatggtctcgctttgtctcccaacaacaccttcctggtaggaccgctgtacccaacttgcatacactcacacaaactcttagcgtacgcattcagcatctaaagcattaatctcttctccttctcttaagatgagtgctcaacatcggtcgatgtatatgccgtcgagctctccatacttgtgagttctgtccttgtgatgtttgtacgctttagggaatacgatcgattagacaagatcgacccgggggattgtacgtggagagaaaagggacgggaaatgtggggaaaaaaggggcaaaagagcggagaaatctccctccattctgtctgctctgtcttcctcctcattcccttcaatctttctaaacgggatgatgggagactgatctttcgtttgtttcgttgacatacatacacgcatcacccatgttgttatcccttgcccttgaatgtacatggtgtttatagaaccaatccgaaggtcaagaaagagggatttgaaatcccactctcggcctcggccacgacgacagccagcaattctttcttcaagaacgggtctaataacgacgactctgccagctggtttcaaaacctctcaacagactgtaaatcctcccttttctcttcttgttcttctgtatctgggttggagtctttcgacgtagggttttaggaaaacaggggaaggagaagagtcaaaatcatcacaatgaccgccaggctaaaagccgggccggcgtaggtcggtacactccgaaaaccgaaagaagatgaccgcgtcgaaggaacgaatggttggcccatcctcggtgtctccgttttccttctttccttcccttctcttgttatagtcgttgtgtaaagcactcggaaccccgactaacccgtttagcatttctcttgcgcttcagctcatcatcaatcgtcgcttcatcaattcccaccagagcacaactataatctctcggcctcttctcggggatcctcctttgcccatctacacaaatatacaaatccttcacaatcgtcatcatacagagatacagcagtactcgacctcgaggcattatcgtccttggtgaactttgccgacgactcgcccaccaaccggtcaggcacacgtaccgagggggacagctcgctcgatagactctctaacaacgccggagccaacggtgcgacatctcttcccttgcatggcttcaacttcaacggctctactggcagtcacaactaccttcacgataacacgattcccaatccacagagtctttcctcgttctcagatggcggcaatctgtctcgatccccctttcatggaatcgatctccccacctccaccagtccggccaatctgcacaacggactgtaccctccggtttctcagtccatccaataccggcctcaggatcagtctaatcatccacaaagtccaacagattcgagtgtgtactcgatcagccaagcctctggatattcctatgcggataatgttcataatggatccggaggagatcaagccaggaccacctcggcccatggcatgacctttggctcgcccactactaccttctcgtcctcgaattcatccgctgccaaccaggcaaaaaacgctggccaaaccgggtcttataacaaacagggctcttctgctactaggtctagatctaggtcggccgtccgtggtcagagtgcgataaatgcgccgcctccgtcttccgctggagggaaagccccgtcgtcccgatctcggtctgttcggaaaggatcgttcaatgcgtcccagcgaccgactgtgctagattcctccccttcggtccatagcgctagctatcaatctggtcaatcctttggctcatctcttggcgttcttccttccgtcgcttccggccgtcaaagggcgagctcgattgtgatgccaaattattctcgatcgccacctagcttcaacttggccaccggatcgtccctcccgtcggctcttcagggaattgggcttgattcctttcctttgggttacgccacaaacgcgatcggaaccggtgccgccgtcggtgttggtagcgccggtaccagcggcgcaaatgtcaatggcagaccgggctctagcggaggtccgagcagtaccagttggatgttctctccgacgagtactgatggcaaggaactctctcttgtcaaagaaggtccggtcgaaggaggtatggatgaaaacgacgatgatgatatcgaaggtgatggtgaatgtgatggtgaggctgagggggatggcgaaaacgaggaggaagatggaatcgaaattttggacaaggcgtaagtcagcaaaagtatcttactcttgtgagtttccatactgacgatgatttgtctgtctctgcatattttgctttgattctacctcttgtcttctttagggcactgctcacggaaaaacgacggcgacgtcgagagtctcataatgcggtcgaacgtcgtcgacgggacacaatcaacgaaaaaatttcggagctagcgacattgttaccccaatgcatgctcgaagcaggagccgcctacgctcaccctgcttcgtctgtccttgccaatctcggcggaatcaagttttccatggatctcaccgtcagcgttcctggtcccaccccagaggatattgaggaagaggaagaggatgaatcggcttcggtcgttgttataaagggtaagaaaggtgctaaggcaacgaccaagaagaagaagaaaaagagcggaggcgcagggggaaacaacgcgtatggggcggatggaaagcccaacaagggaatcgttttggtatgtttctcttctggccatccattttgagtggttgtctcgctcgttctgacagagtgttttcgttctatcttgccttctatactcttgaagaaaaaatcggtggactatattcggtaggtcttataacttcttctaaggtcgtcatcattcaggaacatggcgattgttgacgacggtttgacaattttttcctcacgtgctgcagatatcttcatcaaatcattcaagctcaatccagacgtacttcggaactagaagtcgcactctcctcgttttcaggtcgaaatcactctcctggtcgactctcttcggaatctcaactctctaacctctcgtctaatccctcgagcgctgcctcgcctgctatccgaacgcaaatcatcccacccgactataacgtcaccgcgccagctggttatccggattctccagatgataccagcacattccaattccaatcgatctacggacttaaagatgaactaccgcagcatttcgaacatgcacctcctcctgttcaatcatttcatcctcacgggcactcccacactcacggccatcaacagccggaggcaatcacatcgcccatgtcgacgacttcaatgtctcctccatcactactgtttcactcatggatgggcgcagcatctgcaggtgagaaaccaccgtccggtggaaattcgacagactcgcctagagggactgtttcttctgaagaagaagagagagggaggctgtcagacaggcggttcggtagtggcggaagtggtggggtaggcgacagttgggtgaatgtcgcctcaggtgagggcacccagagtacgtacgattacaagcagagccataaccaagaaaaacctgggatgagaggtttaggtctagatataggaagacagagtgaggatagtatgattgagtaatcttagagtgctttttcacttttcaccttacttttttctatcgtaaacatattctttccctttcttgcctcccatccttcctgttcccttgacggagtaaacaaattaaacgctctctaccacatgtctctcctaggctcgattccttgtttgtatataatactttcgtgtttggtctttctttctctttgcgggatccatctcatcctgtatcattctttttctgtgttgttagtttcatttatcagtttctattgttgcctttcgcatccctttgtttgtaaactccatatgtacacgctcgcttcgatgtatttgggcttgttctctgcatgatcccgaattactccgacttgccctttgtttttttcctacctacttgtgtttttctcttctccttctttctcttttcctcgacgttaaatctgtttcttgtcgaatggtgatttgcctctgtattctctgtattatcaattccttttcgatatttattcctctattcctcttcgacgatctttcgaaggccatcttactcacagacacagagcttatcgagtatattctattaatctccaaccatgaaagtatgacggtctcacacccctccgattgacccttgaaaaaacagagaaggaagagggaaaggcatctcatctcgagagagcaaactgtaagaccgaagtgacttgatcccacacatccggtcccttcaccgttcttacttcgggatcacgtgtttgatcttgattcttatggtcaagtgcgttggtgaggaggattgttcgaactttgagagtcaggtgtgggatcgaagggtttgaagggaacgttatttgagggatgatttgcctttttttcggtttatttgattgattagtttggttgtaattccaaagaaaaagatggatgttgaggtaagaagttgaggttaacatacggaacaagggaaagaacaaagacgttcggaaaacaagaaaagaatgaagggagtccttacatctcgcctctagaccactgaagtacagccagaccttttaacccatctacgaacccagttactcctccgtcatccgttcccgatcgcggtcgtggtcttagtgaagccgctttggagagaactgcgtccttcaattcaagttctagtaatgaattcagatgggccaagtctgagataggaagaatgacggttgattcagatggcgaggcaggaggtttttgaaatgtgagtctggatggaggttggaggtataagatgattggtcgtctgatcgatcattggcacagtgacggaagtagggaatattagcgcgataagaaattggggagaaggaaaatgagagaaaagaagagaaagccgaacctgccctcgaatccaactctacatgacgctcctttttccttgcctatcattcgatcagtcatctccccaactcctactccaccccatttgtgtacaccatcttccacgtaattcctaactaccgatttcaccttctcgcttaacgcccaagacattacctcattcaacacgggtcccaacactttcggccgttgttttgtttttaatggatcagaaacaggccgaagtcgagcttttagttgttctgcccggtggacgtgcaggttgaggagtgagcggaggagagcagcgtgaatgtaggtcgcataaggatgtgttgggcctttcggttgtgtgcttgtctgttgagatcaacgcatgtatgaaccatagacaaggagagaccggatcaatagagaggagacataggagagacgagagaaagaacgaacgtaggttaaacacaaagttagaccgggcgcaacgtccagagttacctcgctcaacgtcagatcagaaggtctagttagagcgtttcctctggcttccgtcaaaacctacggaacatctcggaagaagatgcatcagtcaggtgttatgtagggaagatatcagacaaaaaccgggacaaacttcgttgaagagttcttcttcccaagattctttcattcctttacgtagttttcgtaaatagtccttctgtcctcttgtttcatccatattgatgtcaccttcccgatcctgcccgtcatcctctgcctcttcttcccaagccgaacacatcctctcgataatttttccttccgatgttctttcgaggctcacgaccagtcgtttatatgcctgcgcgggaagttctaggactggtcgagaaggcacggacgaagaggttgttgtgggaggaaggtgagcgacatgcctatgtcttgtgagtggaggggctgcaagggtttcagatttgaatctgatgtggattagccatttcttgactcgcctctttgtttgtcaacacaaataagtacgtcaaactgacctagatctccagcgtaccagaccgcccaatctccagctctgctttttcctcctgtccgtccggcctcctctattctgcttgctcctccgccaatcaagccaattccccatccatcttcttttataccaagcgcgacttcccattcagcctttgatatctcacaaactctatccatctcctcttttccttttcgaaacaactcggccgtccttttgatctctgcctgcttctgtccgagtgtttcggctatcgacggtgatgatgccggggcggacagaccagattggagtgcatgctgcgcctgaggcgggggaaggagcgaggtgctgagagaagaagctggtaagggtacatatgctggcagctggttctctggatgaggtggatcaaaagatgtcagcgacggtggaagtaggagtgttagcaggtggtgcatgtgggagagtgattgatatgcttttctaagaaggatgattcgtagttgtacaagagcagaagataagaaggtcgtatcaacatttgaacgggataggacacaattatacgaactgtagttcttgggaaacatctgttttgaacgttcgcatccctttcagatctagttctgttccagcctcctcattatcctgtcctctcggatagccaacgacctctagttcattatcctcttggtcgtagttccctccgagccggtcctcggtgaagccttccaggccgcctttctctgcccagatcctctggattaatcctcctagcttttctgagtctgatttctcgctgtttgcatgttgaaaatcatttttgatcgaaacacaaaggtatgtccatatatacacatatatatattgcatgtctcatcagctcataacgttcatacttgaaacagaaactagagaaggttcaagcacaaacgtatgataaataggtgctccggaaggtccgtaatcataaatgacctgtggtttcaacgtcagtggatccaccggcggagggactggttccaaagacagctgaataggatgggtcaatgaaccgtcctccattgctacgtgaccggtgttgtgagggagggaatgtgagagaaggcaagatgatggtgatcaagacgtatggtattgaggtgataagtcacgtgatcatcagatgtcatgaaacacgtgacttctcgagtaacgtggaaggcgttcttccctccatctcgtctctcaagttcttctcatcatcatcatcatctattatcatcaactagcatggtatgtagtgtctagcttgtgccacacgaggaaatggtgctgacaaggttgatctacgtcgatagtccgctcctcttcatcttgcaccgtcggctcggtcgactccctcagtctctctcgcagacactgccaactctttcggtcttcacgatactcttcgacacggtggaggaagaaacttggctggagagatcaaggaggatccatttaaaagacgtttgaatgaggtttgtgtttctgctggagggcttgaactactctgcttctttgagatggatataaccgtgtcatcaatcgctaacgaccaactcgctaatcttctggcttgtactggcatatattctcggtgtcctccttcctttctggcatgctcaattcgctttcgttcattagtgggaacaaacgcaatttaacctcaagcttcagatgcaacgcaacgcttacggtctcggagctcccttacggtcattgatggaccgaaagattatcagccaggtatgttcaacgttttctctattctgcgtgtactgtttgtcacaggcagcagcgaaacttactaatgactttttggacaacaaaataggacgcggctcttcccgaattctcaacctcacaatttcacttggatatccttcagggaactgatacttctcttgacatccagcatttcttctctagtacgtttcatccgccttgttgcttcgttgcctcttcttcgacgagctgatgcatcgtctcatcacttttctctcttcttactcaatgaaggagcggaatcatcaaactttgaggctcaaaacttccagtcccagatggagagaaagcacaagatctagtcttgtggtttcattttcctttgttattttcttctcttcctaatccatcctggttcttttgccttgctcgacagtgtgaatatgtctatctgcgttaaggccttgtaaatgagtgttatgtgttttcttctgcttctttacatttgttcgtctgtacggatgttctggtacttggtatttatcagatgctgtatcaagagaggaatactcttcatatcggcataggcgcatctatatcttgaacatatatcttgctaagaattctttcctctgtctctcttcccgacgccgtatagaacaagtacagagacgctcaaataaagaaagagagatcaacgagaacaagagggagactgtaagatctgatgtcgaaaacgatgagcgggtctgagtcttacgatgatcagaacactcaaaatcttctcaaaccccacctgcacacacatacaaacatacaccctttggatcttctgatgactccttggttggtgatgcaagagttgacgggttcaagtgtgcgtgttcgtcatgaataatttaggatgacatttggtcggttggtttgatcatgatgttgaacaccatgttaatttcttcgagtagactttctatagatatgaacaaatgaatcaggctgtagttctaaataacaagaaaggagagagaaacttaccggcggtctgaatggtagctttatactcggcgtttgcctggtccatttcgacttgcagtgcttccatcctctgagtctggtttaagaaagatagacgaactgaaccttccgtcgggctgccctcatctgttcaagctcggcgagctaatcgaatcaatcaaagacagagacgtacccgtttgtgatcgggttctttatcgggtaatgcgtgaatgagatactcaatctgtttcgctttcctcgtcaagtcttgcacgagttcctttttgttttctagatcggttcgacatcagagaaagatacgcacatgtccggaaaaacggaataatatgagcaagttgaggtcagaattcatagacactcaatctgacagcgattaaatacgcaagcacggaaatcctgagaaagagcgaaccctcaaacacgtcgtcattcgtctctgcgtccggtatccgaaatgtgacgggtatatccggatggagtggtttgaacgtcgtcttttgagataagtaggccaacgaggccgaggtgatttgaaacagctgaagggagaccaacgcgcgcatataccatagaattccttgctcggaggtcagccttccttggttgatgaatacagagagaaagtgatgaagaagaagaggaccaaactgattcgatcgcgtcttgtagttgggttagtcggtccatgtcactacccagatgttaccgagaagcagagtacgtcaaaacgaagagaacaaactctctgtcggcttggctctaagaaaataggctaggacttatatgaaggaagaaatctcacgtcgagagctcctctacaggacggaaatgaatagaacatgatatccaagcgaaaagaatatcaaagatcagttctgagttgaatcgatagtagaaagaagaggagaaagcaaactcaccttgcagcattatctatcgggaggtccgacaagcgagacggggacggaacggactgatcggttgatattccagcagtgtttccagtcgtttactatctgattcctatgttgatccacaacaaggaaggttagatcagcagacacacgatagaaggatggatcgtctggaaggaatggttgatggttgttgtgtgattgccgcttccgcgtcacgcgctgacgagttccatggggtttcacggcacctcatatcggacacgcatatcatccggacggccgtcatggttaacctccatctttcattcgttttttctgtttgtcttagattttcatcctggtcgatccggaatgtcgtcagaaacacttggtcatcagactgctctcaaacgtggctcagcgtgagttctgtcactgtgttttccattactatcttcgttccggttgacaaatgcattatcttctatcgtcctctttgtaatcaactctggtctgaactctcatacttattcgacatgctcagctgtcagacatgtaggttggtacccatatctcgcttgcttcctcatctacttacccaaacatatatcaaaccagtatcgatcggatcatcatactaacccacacgtatctcgcgtcttctacatgtattgatccgggtatcgaatctgataggaagagaaagatggtgagattgacttgctgatctctccaagatacagtgctgactttattcgaccttgcttctcactggctcttgtatatcctttttttgtgacacgtttgatctgaccgtagaaatggtatatctctgacctctctttacacatctctcctcaacgcctttccagaccaactgattacaattgattctatgttagcacgggagagagaccgatatgcgggacttgttcaagagtaatgggtccctttcttttgtcacatcgtcgcgcgccttgcgaacccttcccatgaagggcgaaaagggcttaacccgttccttctattttcgtgtcacttttaatcgtccagacctcccagaaatgcagctttgacgaagtacctcaacccaagctcagatttcaagccctggagaataagattagtaagtatcgaatattcatagcacttatagtcgtacggcccaggactgcacaatacttgccttcgatcgttgaggcgcaaccgtttatctttgtcttctcttagcccgcctggaaacagctctctttcaatcggagaatatgcagtttaattcgtctgaaccgtttactgatattcaaaggaagaagcatctaggaacatttccttaccctgtgccgaattattccaatccaaacaccttttcgaatatctctcatcctaaccgccaatccaagcacgacaaacagcaggcttcctctcaagcgttcaaggaactgtggggaacaagctttagccctgtagcagaatattcagattctatcaggaactcagatgcgatgtcaaacaacccaatggatccaaccggtcacgacttcctctccacggacgttcttgataggattattctggaaactggcccgacgcggcctatagcagatccatgggccttcgcgttctctccatcggacaataatgatgcagaaggtgtaacaacgggtcctccatcgatggattccgatctctttgccgccctgcagatcgacactgaacaactgttgccagaccctctatcccaggatcgaacggcaactctcagggcatatattctggatcgagaagagcttccaaaagaaatcagagatccactgctccacttctttttttctagaatgttatcttttggagttatgcttcacgtcgagaggttttggaagtgagtatcaccccaagcgctctgtttagtcatcaagcatagcgttccaaggcatgtactgaacgtgtctcaatgttattctggtcgtttgatccatcctataggagcctagaaaatttggccaaggaagatcagccgcatcctgcctttctgttctctatggtgtgtgtcacgtcttacactgatgtcatcttcggtagtttacaagccctctcagttcttgtcttttgggtttgacctttcatcatgattcgtttaccggctttctccatcaacgacggcagtatcattgcgctagtcagttctcttctgacgaagccgtccgggcattagcggatgagttcttccggatttccaaggcaaaactcgatgagggagttgcgaaatgggatacacgaattcttgatatgatcagagctgctaccgtcttgaccctctcgtcctgtgagttcctcagttgatgcaaacatacacgtgatgaaaaaaggctccttctgattcgttaaggttcggattgcttttcttcatgtgctttgcgtattctagatttgagagcaaatttcctgactggctgggttctcggaggggtgggactcttctctttgcgtcaagtattttcctctcttgttgtcgctcggttgacactttgcgtttctgctcaaatgacctcaggtggcaatgcgactctgcgcactagctcattaccaaagaatcagttttcccttcagttctcattcacatgaccatcccaaagtgaatatctgtaatccggacaggagaacgtgggtacacacaaatctgcgcatcccgtctccgaaagattcggtagaacttggggaatgcatctggtcgttttggattgcctgggtaggtccggattttttcaagacgggacgttttgccttggccctgcctcctatagctgatactatcttcatacgattctttcgaacattttatgtttcattcagggtatggaccaacgtacatcgatagccactgcatatgctcctgtcagttactatcaataccttgtgaagataagcaaatgtctgtcgtatgttgacaatagtatgcgttcttacaggcaatgcactggtcagaaattgagacgcctttcccgttacctctggaacaatatgcagatgtaggttgaccacgtgtctacaacgatatagtcgttgtgtttgaaacaaagttgacattcgtgcctgcgcttattgaagatcgaccgagtgaacaatcagcccatgacggcggtgtatagtctatttgacgattcccagcagactctcgttggggacttgttcgtcactttcttatactcctatcaccctcatcatattggtaccatccactcaaaactcgattatctcttgacccgattagaaacacggcttgtttctttatctctctattatttttgatcgaggcatctcgactatcggactggttcatccaaccatcgtcccgtaacgaatacctctctcacatgtgctctttgcacagttcccataagacccctacctcgacggaaaactctcctcaggaacccgttgatcagcgaatcaatcctgattcgacaggacccataccgccagagatcattcagctacagaatgcggtcacgaggtttgtcaagtcgcttccgcttgaacgaatgaatcctgcccagaaggtgtacgtgtatctttttttttgtgcatcactgcatcagggtatcgtctaatacagtatttgacgtaacgcggacgagacagtcgtggaggagttccatctttgaaatcggaactcgcgctgcgggatcactcaagttcaggaagtccatcagcgtcgtccgaagacgattggggcatcagcgtggagaatgtactgctacacaccgagattcttacgtaagtggattgtctttgaacaactcttccttctctccagcagtgttctatgcctgaaaagtctggatcttgacttgtttttttcttctttcaacttgtcgttcttggtaacttggcacgtttctcaacacagcacgcatgctttgatcttgcagcaacgagcggattatgacccaagcgcaagggcgcaatcggtgttatctgctcgatctgtagtcaacatcatccatataattgttgacgttgatttcagtcgattcggtttctacattctggttcgtgtttattgaattatctctctctggtgtgaaattggcgttcagaattaagagtcattttctttctatgggatttctaaacacactgatcaatgtagaattgctggagggttgtggctcacatcttattagacgaggtcaaacgttgcagatcaattggaaacagcgaaggttaattttcctttcctctctctccccttcctttgttttgtttctccgtcgccatgacatgttgattctgattaccttttatccactttattgccaattctgaactgaacggttacagaggctatgagcttgacaatcgatgtcgaacgttcgtgaaaactgtctccttttcaagatgatctccacattcaaaaagacagtggaaacatataccgacgatatctctccctttttttgttacagtgataataatagctatgaagcggatcggagaagtctacaggcttgggtaagtcagaaatcccatacattcgtttaactgtcgacaatgctacaaacagagttggatgactgatcgaccgagttggtccgagaggacttacagtaatattgctgcctcagtccttaatagttaatatgtgttctaggagaattgtaggatctgctgtttgacgcgatcaatagtagttagcatatcatacgttttggcggggagggtacatacatgcacaccttctgtaggttcgttttgggaccgtatttatgcgctctttcactgtgtctatgcttaaatcctgcttcgacacttgaggatgaataatgatagagaagcgtgtctcaattatgttgacaacgacggtgatgattatgatggtgataacgacgccaataccagggaaggctcgtacccggcacagagcgacgagaatcgtttggcggaacagagacaacgcctgtcggaagaacgaacgatccctttttatcctaacatcggtactttcgaaagatatctctgagctttgctggtcgtttagctacgtctgttatcgaatgcgaactggacagtgtttttgtttgaccgataaagaagctcttggaatctatccaattttatgttccttcggttcaaccacccttcatgcgactagctctctcttctcttttttaattatataattctctttgatggacccatctgtttttgcttcgttcttgatcaacggagataacaagtagtgagatatgactgctgacgatgtaatcgaaggcctattgttttttctgacaactaacccgaaagaaatgtctcctctttgatccggccatgtatcttttttctgtatttcagcggaacacaggtttcactgaggaccaactttccttgaaacttttcttggcagcatgtatcctctttaatatttcttgggaatcgtcgagtccaatgtcaaacggagcttcaatctcccaaaccacgttgtttatttccccggagtcgcccgtcgctcttcggcctgcgagggaccggcgtttttgaatagccgtggtagatcctggagaacgaacgatcactcctgattctggccaagacgactccttgcccgtttatgttcttcacgaccggaacatcccactcgaacaagcatcatgttcgtcatctgcgtcatttttgtccttcttcattctcttactcttcgtcttccggtcgttgatcattttttcttctcgttactcatgctcgtcactcaacctttccttctatcttctttctccattctagaccgattatccctctttcctgcctctgaatgatgtttctcagcacaaacccttatcggacggtctccgaggctgaatccccgctatccaatcggccggccatcctatcctctcaccaatatcctaaagccaaacgggctcaaggcagaaggcacaagtcgagtatcgatgataacctggacgacccatatggtaaagccaaccgatctgagaacgtgccgaccaacctatcatcctacgtgacttcccgtcggaaaataattcccagaagaagagtcttccttctctttgtgctttctgtcattttctttgtgttctggccagtcatgcatcgatcaacgccggatatagtcgcctcggttgatcgcctcagacaaccgttgttccattcttcggtcagactttccatactcgattcttcttttggttctagtcggaaagaagataaggttgcttttacccctgtcaaggacgatattgtcagcacgcattcgatcactcactccgtcagcccagacggactcctccatctcgatccttcattaccggtttcccaacatccaatctatcagcttatggattctgccaggaaggaatggaacgacaagcttgcgcagcagtcaactacacttgcagaagctgttgcggagtacaaacgaagatattatattgaccctccgaaggggttcgagcagtggtggaaatggtgccggtaaagccttttattttttcaatagtgaaattcactacgtttccttagtttgttcgtaagactgattgccgtacattctcctttgttctgttctgttctgttctgttctgttctgtcgggtatagtgaacataatgttcaacttctggatgaatacgaccaaattcaccgagacctcgcccccttccgagcccttcgtccgtcagtgatccaggaacgtctggcccggatccaaagccttccagacatgttcactatctctgtcaggaacggtcaagtcaattcttcccatgtgacgtacgatgcacgagcgatcgctggttcggacgatagacgactcggtcagatcgagcttattgagcgtgttgctcaattcattccagactttactgcggtatattcgattcatgattctccaacaaggttcatcagtcattcccacaagcaggatctgttagatcatgctgatgacaacgaatgtgagtgtttttcttcgagtgattcttcttctgtcaaattgcctgatcttctcattcttctcattcttcctttcatccgcgcggcgcagttttcgatatcagaaacgaggtcgttagttcccaagctggttggatggccgcttgtccagaaaacacgtctctgggcaagtacggtatcaactctaaagtcaccaccgtcgccgctgtcgacgccgacaagacgttcatctcttctcattcggcatcgatggatctctgtaatcatcctgatgtgctttctctgcacggaacgtttgtttccctccgaccaggcactcaatcggaacttatgccttacttttcgctgtcaaaaacgaatcttcattcggacatactaggtgtgcccaccgaacgatggtcagatattgggccgaacgacaaagtcaagagatgggaagagaaaacagataagaggttgttttggagaggaaagaacacgggtgggatattcaacaagcagatcgattggaggaagaaccatagatcgaggttggtcggtttgatgggtccagtaggcaagaagaacaggggtgttaagagcagcatgatcgacatgttgtcttcgccgaggacattggcatttgcagaagctgatgacgacaagatgatactggggagaatgattgagaaaaagcggcaggctgatctaaataagcttatgatggacgtcgcctttgtgtccgaacctgttcgtacgtgcttacagaactcttatggattcgctcgtccactacgaaatacgattcatagctgctcaatacataattttactaacgatcttctcttgcctcaatacagaatgtgatgagaaggacgggacatgcgcagatatcaaggatgaactggcattcaaggattttttaaatgtcgaagaacaatcatcatacaagtaccaactcgacgtcgatggaaacgcttggtccgctagatttaagcgattgatgaccagtggatctttggttctcaagtccacagtccatccggaattctggactgatcgaattcaaccatggcttcattgtacgttactcttttcttctttcagcatgggacatttcgcgacctggtgaggaggaggactccttctgcgttgagtatactgatttatatatttccttctctgttttccttacaaagacgttcctgtcaaggtagactactctgatgtctatgagatccttaattttgtgagtttcctgacttattacttgttcatacaatcgagataatatactgactggtggttctcctggatatgaagttccgaggagatgattcggaaggcctctcaggtgaggatgacctagcggcgttgatcgctgagagcggacgagaatggtccctcagtttttggaggaaggaagatatggtacgggtccttaattgtccctccttttgtgacctttccctgtatttcacgcatgcacatagaagacctctgacggtgttgtatttttgacacttgcgggcggaatcattcatagacagcatatgtgttcagattgtacctcgaatgggcaaggattcaagcgcctgataggttcagagcagatttcttgctgaaggacgcccaggaagatccgttgagagtggtctcacctctagatggcttttcacgtcggtcggattgaacgagggttggtcatcaaagttgtattggaagatcatatagaatcagttcggccgtcctttcttttctcttcttttctttcatctttgcttctcttttgatttgctgtaatttcgctatatcgctgtttgttttatcgttatatacccttttcccctcttgcatcccttgttctgtttctatctttttttgcttctctatcactctgcttctcatttctagagccctgttgtcatcgccgtcaccaagtgtacactccgcgcatatctaatcggacccagtccagtcttaccccgtgcatccaatttaaaatatgtgaaaggtataccatgagtagctcgatcaatccgatggaagaacttgttttggccataagattctcgtctttcccgatttttgatggacatgttttccataagaacaaagagacatagacgggtgtttcatccagccggaagtgtcgtcaagcgaaagcagaagagaagaaagaaaaaatcagagcattaaatctttaagtagaagaacgacgttccaaaacagagtgaagtaaatcacagctgacgagtgtacacaaaaataaaaataaaaaaacaagaaggtagagattgaaaagaaaagatcagggcttggtgttgactctggaaaagtaaatgcaccaacgagcttttttcccaagccgagaacatgcttctagggtttgagtgttgaaagaaaggatgataggaaaaatgcaaggaatataatcactgaggagagaaaagatggtcaagacacaagatcgaaagaagaaaaaagtgaaaatcgaggtggagacggaacggttgtcttagaacgactgaatagaaacaatcaggaacttatgacccccactcgggctgttcgtcacctcgccaacccgacagataatctcgtgctctccgacttctgcattctctttgatagtagctagatcaccaacactgatcttttgagaccagtacccatctaacgtgacggctgattcaggcccataggcttcgaggtagcatgtggcggtaccaagattatatgtcgatgaacgaaggtggttgatctggatcgttctgttttgatgatggaaagaaaaaggaaagcagatgctcgatcagcgcgtaaatttcgaaaacgacacgatcgcacaaataagagacttacgctgcggcaagaagattgatcttgaatctgacttcgtctccaggattgtttccggccaggaaggtctttctgttaataaccacggtcgaccatgctgttggggaagaaggagtgataggtctgaacttggacgtggtcgagttgcatgtcggagcgtagatcgggacgatatgcttagggtcgtacggttccatcaatcgaagctacgttccgcaaaagaatcacatttcacgttagacttttcgtcaagagcgaaagcaagggaagagggggaagaacgaaccctgggaatatctgcgggtggctggaccaaaggtgtttcaggctcgatgccatgaagaaaccggtcgtgctgtaccttacagaacaccgagctaaggaactggattgtgatgtctagttttattcattagatggaacagaaacagtcagtttatgaaaaggaggagaaagaaggagaacgggacataccagccatcaccatatgtccaccgtagccgtagtggcggagatcgacagtgccatctccaaatggtccaaaatagtctccaacggactccgggtcatccaggattttaggcaggatgatctgacgggacctgaatagtttaaagtaaaacagagagacacgctgagctcgactgttttttgtctcgttaggaatagggaagaaagatggagagaacgcacgacaagactgggtggtcatagtaagcggcgacgtcgatgtggagcgaaccaccctggtcaagatcaagccaacgaatcgataagcaatccgtcgagccaaacgcagcggaggcttgtaaaggtgaggaacaaaacgcacggtagcaatcttatcaaacattaagccgaaggtctggaggaaaatgatggccggttgttgaggcaggatcatgagtcctcgcatcaaggattccattcctttcgcatccttctccatactttggggatcaggagaacgtagaagaggaagccagggatggagattcaaccgacgtcagggtcaatctctttccgggaagaactacaaagacgaagaagagaacgaactactgatcgttgatggcactctcaacaaagatgatgtctacatcgtgcgggatataagctccgaagcagaccgagaaaaatgcacttccctgggctgatttgaaaggggtgaaatggtatatgtgtgtttgagtacgtgcgccaatcaagagacgtcggatggcatcaaccagcggtagtgacagaagaagaggaagaagaaaggaacgaaccagcgacggaaccgtcgataaaggtcagattcgaatcagggaaagcgtactcccaccattcagccaactgatctgtttacagccattcaccagccgaaaggaaaaggaagagaggatgggaaaacacgctctcgtttgatcagaatacgcgtgtgcgcaaaagaagaatacgagacggagaagaggttcaaaagaaattcgacatacacttgtagtttctgtgatgtttttcgttcaaagtctgaccacacgtcacagacctagagtacgtcgaaagaaaagacgttcgaatcagatacgaaatggaggaaaagagggatgaacaaaagtaaagagcgcaccctccgagaatacccatggtaataggctcgcctcgcgcggcctttcgcataacccgtcggagtcttttggtctgaccagtgtagatacgggaacgagctatagcgtcttctctgtttgacagaatggcccgagcggagaagagtgacgggaagccaataacaggcccgaaacccgacgtgaaatacaaacagatcagagagagtgaaggcgaaaggaaagaaagaatagggatggtcctcacccgtaagctgcacagaatctgtcgttgattccacattcttcccacccgaagcttccgatcatgcattctccgttggatgcgatctcccctgtttttccagtctctggcacgagaatctggtcaacccagggagggatcgaggggatagttgtcagtgcttgctgtttcttccgggacaacgtcggtattcggcgactaggaagagagagagaatgtgccttgggaaaagaggcaaatgaggaaacaatcgattttacgactggagaagcgtctgctggatgagtatagataggatctgcagagaaccgaaggagtgtgtggacgagaacgacggagaggatggcccagggaacgtagaccatcaactgtgacctgctggcatatcgagtgttcatgacgagcacgatgatcagaagtgagcgcgcaagcgagaaagaacgttaaaggcaagtgcgaagtgagtacaagatggatgtgagagcaaaagagagaacgaaggatcctctggcgacgagatagagcagaggtgagaaccgataaacaacaggcccgaccagaggatggctaacctcggatggagctcgggagagacgcagaccgaccagtacaacttcgcatgaatgatcggcatatattgagtgagctctagacttaaagccagacgattgatcggcgttctgactggtttctttcaacgagccttattcggagaaagagatctatagtccaggttgagcgccagcttgcgtaagggattctctccttttttctcatagttttcttatcacagaagtacgtacgatcagctctacgccgcctcttgttgttctttcgctctgactactcctccttggattccaacattcggcccggtccggtgtttcaaatgtattcattttatgtccttgtggattcgtaagatattgacggtatgtttggacgttcataggtttgaatacagtctggatgtgaacatacacggtagttattggttcttaatgcgtagttttttctttttgtttaaatggttattctactttttttttctctctctcctcacgcttcaaccatgaaacaacgcctcatttgaagccgcccgtttctatggatccattcagtcccgctggccctcgcttcaattttgcctcgaattccttgaatgctctcagtccaggatctaagccggcgaacgggtctggtttgcccccgctttgggaagtctcttcatccaactctattacccttacgggccaagctgttctcggcacggtggcccgcaagagtgccacacgcaccgcttccagtgctgaagtgtattcctcgtgggacgatgcataaatgtcgtgtatgcataccctgccaaggcagtcgtgtggaaggaagagaaacggggtaaaacaaggttagcttcgttttagagttaaacattctgatcagctcacaaaagtacgcataaggaatatacaagaaatgatcctcacgcgcagccagacatgcagcattctagagtaacccagttagtttatattatataagttttatgtattaa

SEQ ID NO: 402 - DNA, 31253 bp, Xanthophyllomyces dendrorhous
atataagttttatgtattaacgttcgatgccgatgccgatgccgatgccccaggcgacagaatccgacagatcgttcgacccaatcaagtgagattttgttcagactcgaatgtaaaagtatatgtaacaccacaggaaattatgataacaagatggaacaaaaatcgaaataaaaagaaagcaagaaacaaaccttcgtcgcctggcttgatgggtcgcttaggtactttcaatcctaatatctcgaacggtccatccccttctatgtttatttcctctccttctgtcgtcgtctcgttcacaggtagcaaagtcggtattcgagcttggatctcgattggatctgctggtagagatgtatgtagtggtgtgggcggtgttgtggatggtggtaatattgatgatgatgatgacgacgatgacgatgttgatgatgtactcggaaacgctatatttgggagggatccactcaacggcgatgtactcaatgatgatatgcttgatggcaatgcactcgatgttaatcctgacacagagctcgtccgtatgggcgaagttgtcgtcgataccgacggcatcaccttttggcgttcatcgtgtgatgcactctcgtccctgctttcactctgattcagaggctgactctgtctaggcagaggaggaaggaacctcttgagcaagttccgctgatgatccgctgagtatgagaacccacgaatgacgaacggacaactaggtttaacggaggctatcgatgtgcgaaccggtttcggagggaaaacaaatggacagagatagaatgttcggtgaaccatttcttgcagtctctttccgatctttttctgacggctactactgatgctactgatagtaccgtctcttctttttctgtcttggtcagcggcaagagagagaaatagaaagcgatatggagtaatggcgagatactgtagaaaggaagaagaagaaacagaatggaacgaaattggaaaaccctcctggcagttatcaccaccgtcacttttaccactacctattggattattgccttaatctccgtggcatcatatattgtatctcttttctcggctatcatctctatagcttccctccgcattcctctcctcacatttgcgtacaattacttccagcctttctatgatgtctatgaagtccatgatgtaaactacaaattcacgagctgctagggttagttctgttgataacagacacatcaccatctgaatatgataataaagttgacgatttgattacctttggggagcttgattcttatcaaacggacgacatcaatccactcccctcgctccccaccccccaaaagagagaacgaacgaacatagatgcatatcacgtttgacgaattccatctgatcttgatcaatacagtcgtccgtccggtttaagcttgtatatacatctgtctcttcctttcatcccaacggcccactctctgtcgcgtgcgggcgcgcgcgcagggaagcgaaaccagcaactcgggcgtcagggacactaccccaacctgtccttgctgcgcattgagcctggtaacaatctcgggcaagcctgtaccaagcctgacatttaatcacacccctttggttggggtttcccttctctctttttttttttcctctcgttcgtccggaaagcaagaagaaagaaaaaggtccatctcgttcgattccatctttcgttcttgccccatctgaacatcaaccaccatctccctcccactcacccaccgataaatccaagctctctctttctcttttgggttttcttttctctttttttatttgtctgtcccgcttaatcgtctcctagatctttccatcatgtcttccaaaggttagtcgttatgctcttgtttgtgagagtgtttcacacccggatcatctctttatggtgctttgtggcgatggaacaaagtgcaagcgagagagatacctttttctttattctcatctcacctttgggttctctcttcctctgtctcaactctcaactgattggatcatctcatcctttttacagctatccgagagtacgacgccaagctacttctttctcactggcttcctctcatcaagactcccatctcgacctcgggtccttcaaccgcttctaacgttcgggtcgctcaggttcagtggtaggtctcctccattcaatctgcagagcggcttctgacccagcgcaaccatctaaagccttgttcactaacccttcttcttgctcctttctcagggacccctcgaccaacacccttgttcctccgattgagcccggaaagggtcttcctgattgggttttcaccgagaagctcgtggccaagcccgatcagctcatcaagcgacgaggaaaggcaggcctgctttgccttaacaaggactggcaggtcgcagccgagtggatcaaggagcgagcaggaaagcccgttcaggtgagtttatgaactctttttctaaggtaaacaaaaagctgtctgaacgattttatcttctcctttttcggccgaaaacgcaaaattaaacctatgaaatcaggtcgagaagactaccggtaccctcaacaccttcatcatcgagcctttccttcctcatccttccaacaccgagtactacgtctgcattaactctactcgagccggtgatgagatcctcttcacccatgagggtggtgtcgatgtcggagatgtcgatgccaaggccttgaagcttcgtgagttacttcctcttcctttctagattatagagccctatgctgagacctggtttctcgtttctcatcttcgtacctctttaagtgatctccgttggggaggacttccctaccagggagaccgttgtctcttcccttttgacccacgttccggccgagaagaaggacgttctcgctgacttcctcatccgactttacgccgtctacgaagacctccactgtacgtctcctctcttcgttttcagtctgttcagtgaaatacatgtcaatccatctgtctaaacttatcccatcctacttttcccccactcctttagacgcctatctcgagatcaacccgctcatctgccttgacggtgtgaacggaaacccccctacgatcgagtacctcgacatggccgctaagcttgatcagaccgccgacttcctctgtggtcccaagtgggccatcgctagagatacctcgtcgtcttccgccgtcagttcggccgccgtcaaggctgaccgaggacccccgatggtttggcccgctcccttcggtcgagatctcaccaaggaggaggcctacatccagaagttggacgcctcgaccggtgcttcgttgaagcttaccgttcttaaccaggagggtcgagtctggaccatggtcgccggaggaggtgcctccgtcgtctactctgatgccattgccgctgccggtttcgcccacgagcttgctaactacggagagtactctggagctcctactgagggacaaacctacgagtacgccaagaccatccgtaagtaattgtccttccttgcatgtacgctcgaccacctgactgaccatcttgatcacacagtctcgctcatcactcgaggagacgtcaatcctcagggtaaggtcctcatcatcggtggaggtattgccaacttcaccaacgtcgccgccaccttcaagggtatcatccgagccctcaaagagttcaagcagggtcttagccagcacaaggtcaagatcttcgtccgacgaggaggtcctaactaccaggagggtctcaaggccatgcgattgcttggagagtccctcggtgtcgaaatccaggtcttcggacccgagacccacatcaccgagatcgttcccctcgccctcggtgtcgccaagaaggctcctacccctctgcctgcgttctccgtgcccgcctcgatcggagccgatacccctgccgccaccatcgctgagcagccagctgccccccagctcggtgagatcaacaaggacggttcgcgagagcaggccaacgacaacattgtccgattcgataccaccggtggacctgtctccggtcgaccgtcctaccgacccttcgacgagaccacccgatccctcgtgttcggtctccagccccgagccattcagggcatgctcgactttgacttcgcctgtggccgaaagaccccgtccgtcgcggccatgatctaccccttcggtggacaccacatccagaagttctactggggtacaaaggagaccctcctcccggtctacacctcggttggcgaggctgtcaagaagcacgccgacgccgacgtcctcgtcaacttctcgtcctctcgatccgtctactcttccactctcgatgctttcaactacccgcagatcaaggccatcgccctcatcgccgagggagttcctgagcgacacgcccgagagctcctccacctcgctgagaagaagaaggtgctcatcatcggtccggcgaccgtcggtggtatcaagcccggatgcttccgaatcggaaactctggaggaatgatggacaacatcctttcttccaagctctaccgagccggttccgttggatacgtctccaagtccggaggaatgtccaacgagcttaacaacatcctcaacatctttaccaacggaacttacgagggaatcgccattggtggtgaccgataccccggtacgtctttcatcgaccacttgctccgatacgagcaagatcccgagtgcaagatgctcgtcctcctcggagaggttggtggaatcgaagagtaccgagtgatcgaggccgtcaagaatggaacgatcaagaagcccatcgttgcctgggccatcggaacgtgcgccaagatgttcaccactgaggtccaattcggtcacgccggttccatggcaaactctgacctcgagaccgctgacgccaagaacaaggccatgaaggccgccggattcatcgtccccgataccttcgaggagctccccgacgtcctcaagcagacctacgatgccctcgtcaacaacggaaccatcgttgtcaagaaggagaccgagcccccgctcatccccatggattacaagtgggcccaggagctcggcatgatccgaaagcctgccgctttcatctcgtcgatctctgacgagcgaggacaggagctcttgtacgccggtatgcgaatttcggatgtcttcaaggaggagatcggaatcggtggtgtgctctccctcctctggttcaagcgacgacttccggactatgcctgcaagttcatcgagatggtcctccagcttactgccgatcacgggccggccgtgtccggagcgatgaataccatcatcaccgcccgagccggcaaggaccttgtctcctcgctcgccgccggtttgctcaccatcggtgaccgatttggtggagcgctcgacggagccgccgctaacttcaccagcgccttgaactctggacagacccctcgagagtttgtcgactcgatgcgaaaggccaacaagctcatccccggtatcggacacaaggtcaagtccaagacgaaccctgatctccgagtggagcttgtcaaggactttgtcaagtcgaccttccccgccactgccacccttgactacgctatcggtgttgaggccgttacctccgccaaaaaggattctctcatcttgaatgtcgacggagccattgccgccgcgttctgtgatcttctcaactgctccggtgcattcacccaggaggaggccgccgagtaccttaaggtcggaaccctcaacggattgttcgttcttggtcgatccatcggtttcatcggtcacttcatcgaccagaagatgctcaagcagcccttgtaccgacacccgtccgacgatttctacatctcgttcgccgatcacagccgagtcgtcgtccagcccaagaagtaaattgtgtccatcgactcttcgtctgtcacgtgaacactcttctccttttctttctctttcctttgccctttctctttcttctccttttctttctttcgcatggatgatagcccatgaaacccgtacatgtataaccgtctagatctctcctcaatctctctgttcttccggcttttccttgtctctcttgggtcttttatctgcttttatattttgtagggtccgaccgtttgttgtctaggctcgtctatcctttctttttgatatgcagatcgaatggtatctcttttcctgtttgcgatgtttgtgaaaatccaagaaagtagttgggtggggataacggccgtggtgaccaggctggatagtatccctaagatgtgactccagatttgcccaggcgttggggatcatttacttgacacacaacagacaaaacaaattccagactctttgttcgccatcacacacagtctctgtacccatatctctctctctctcgcttactacttacccacatacacacacagtgagctatggcttcatacgaatccctcaggaatctttatcagaaggctggccaggaccatgtctttactttctacgatacactctccccgtccgaccaaacggccctgttggctcaactggaagaactggacgtagagcgagttaaccggatccacgcacaggcactccaggccgagtccaaagccaccattgatcctgtcagcttgaccggttctgcctctgactcgacctctgatgatttcgagccgcttccagaggcgaacgtagcgtctgttttggcttcgcccgctcggacagccggttggagagagagagggctgaaggcgatcgaacgttcagaagtcgccgtgttgttgatggcaggcggacagggcacgagactaggctcgaccgcaccgaaaggttgtttcgatatcggacttccggcgggcaaatcgttgttccaactccaggcggagaggatcagaaggttggaaagtctggccggtgggcaagcggtcatcacttggttcgtcatgactagtgcggccaccaggccagacacggaggcttacttcaagaagaatgcgttctttgggctgaaagagaagaacgtcatcttcttccagcaaggtgcgacgttttgtggtcataacggtctctgtttcactcgagatcatctctcgaagattggctcatcggtttctcttgtgccctgttttgcgtgtgtatgtgtctacgaacccattgacaggttaccttccttgcttgaccgaggacgggaagatccttctttcctctccttctcaagtagcccttgctccagacggcaacggcggtctctactctgctctcctccgaccggtctcgccgacagatgaccgaacagtcatgtcgatcatcaaggaccgaaagatcaagtacattcacggctacggagtcgacaactgtctcgtccgagtggccgacccgacgttcatcggttttggaattgaccaacaagtcgaatgtggggcgaaagtcgtgcccaagacggagccaaccgagtcggtcggtgtggtcgcccgaaagggtggtcggttcggcgtggtcgaatataccgagcttccacaagcaaagtctgagcagcgagatccggacggaaagctttcctaccgagcggccaacatcgtcaaccacttttacaccactgagtttctcgaccggatccattcgatcgaacacctcatggcgttccatatcgctcgaaagaaaatcccaacggtcgaccttcagagcggcaagcagatcgcgccttcttcgccaaacgggatgaagctcgagttgttcgtgtttgatgtcttcccgttcacgaaggagctcgccgtgctcgaggttgaacgaaccgaggagtttagccctttgaagaatggaccgggaacgtcatcggataacgcggtcaccagcaggcgggatctgttggctcagcagaaacgatgggtcgaggctgtcggtggggtcgtcaacgcagaggtcgaaatcagtcctttgatcagttatgccggtgagggtctggacgctctcagcggagtgatctttaacaaaggaggcgtgatcgaaagcctggatacgaatcgtctgaagcagttcgcttgagctaaaaattcagtaaaggattatttgaagcttaggtacgtttctttcaatctctgcagcgcgcgattggtgataggtcttgttgctcatttttttctttcgtctttccttaatcttgttcctctatgttagacaataaactcgaagaaaaaacctctatccttgtccttttctcatcgtcttcttctctttcttcctgtctctcccctcatcttagagattgatatatacatgacggttgatacccttttctcacacatcaacgatacggaaggtgactcaccaaaatgttagggttattggacgctcgctcgcgccatcatccgtcatcatgtacattagaattaattgtttcgttcgtccactcacctacccccaatcatcaacgagacatctcatcatgaaggcctactactacgacaatattgagtacgcttctagttcatacgtcgatattagcagaaattggtctacgagcccttgatccttaaagcgttttgatgagtaaagagcctcacatactgaccgttctgctttttttttcttcttgacctttgttctctctgtctttatcgtccaattcatgataggggtgaccagcgagctcctcatgactcaggagaagaagttactcctgacgagcttcaaaggctcggtctcttccatgagtttatccctcttgtcggcagagaagagaaggactggacggctgatatcggtttgtctcctgctgcaggtcgaacttaagcatgactcctgagcatggatgaagagcgcttacacttcttgatcttacctttctttggtcatgtgaattacttgcacacgtgtgaatggccatcagatcgagttgcgaaggagagggattacaagaacagggacgtcatcaacgtctccaaagctggactcggagagctgtacgagtcaaagatcaaggttcgtcatccccgatattcatacatataaggtcgggtggttcgactaaactcttcctcatatatccttctgctgggtgctacatctagtcgttcttccaagaacatcttcatgaggatgaagagattcgattcatcctagacggctccggtccgtatctcttaagtcttcactatccagtgttctttctttcctttcaatgtcgctgaccgagtcttaaactctttcttgtcgacggatgatgggatcgatgaatcaggctacttcgacgtgaagacagcaccgccacaggagcggtggattcgagttgcgatggagcaaggtgacctgttggtcttacctccgggggtgagcgccgttttctcgctcttgatgagctctggttttctttttgccctgtcaaggaataagcgaggaaggaggaaggaagaaagactgaccatccgattcggtctatacatgactctctatctgtctttttcaatatcaagatctaccaccgtgcgtactaaagctttcgactcttccttttcttctcctctttcatgccgaaggaatgattgactaaacttacattgatgctcggtcttttatacggcttaggattcactttggacttgaacgattcgcaagttcactctccctcctcttctttcttttctcttgctggattttcttcctaacaaagggagtggggttctcttttgctgtcaaaaaataccaaccatcgtcaacagaattaaagcaatgcgtctattcaaagatgagcctaaatggtttgtctcttttcttccttgcgaaccttcgttctcgcgttctcagactctccctcttagtagaccgaagtctgttctaaattgttccacacacttcatcttttgttcaggacaccgtacaaccgaagtgaagaagttgacgagaacccatacagaaaatcgtacttgggttcgataagcgcttgaatgaatcgaggagaagattttgtcaaccagtcgggcgtcgtgttgggagagtctctttgttctctttctttttcttgtagttgaccgctctcttctccatgtagcccttgcagcagctcattcacaagagaacgaagaaaagaaagagaaaaaaaagtaaagaggacaagaaagggttcaaagtccaacggatatgagttaagactatgataaacaagaggagaaagaaagaacggaggaaagaaagatcatattaattcagcccgaccatctttaacccattgttcgaccatcgaccatcgaacgagatgagtcgttcctttggcaaaatcagcctcttctccacttttgttttccctcacatcattccatcaagatcgtcaagtgttcaaagcgaaacaggtttgtcagatccaaagcttttcgaaagagagcgaaatagaattctgcatggaagtcaaagagtagagaagagtgaaagaagcgaataacgattgacgcacgagggaagtcgttgaggaccgatatctcgtctgcagtagatgaatacagcggtcgtcggatttggtttggcaactataacgacaaacaagtcagggtcagatcacactggcctactgacagcatcaatcagcgagcagaaaagtattataaagcgatcaaagacagacccatgctcagaccgtccgattggacctcttctaaatctcccatccggtccggtagtgaatccaggacggagagcttgaaatgtgatgcaacaagggcgtagaatcttttgttcgttcatcgatggatataccgggttttaagaaagagactttagctgtttataaccactagcattgtgccggagagagcgaggaagaggagacgggaggacatactttcgagcatgtttaagttcgagtggggataagagaggctggaccgtcggtgtaatagtaatcatctgagcatatttctcaatctagaagaggaacgttcaaaaagttttgaggcctggttagatcgttcgtttggaaaaaaggcaagaaacaaactcaagagagaaggagaggaaggaggagaagaaccttcgatagtcgtgtacgtagatacgatcggagaaggaattttgctctttccatctcggtctggaccagcatcaacttgaagtgttcctcctcgcttgtcgagtcctctgaaagaagtgttgagaccatttctttctaagtgttttcacccatcgtcatccagcattcgtttcagacgtgccgatcctttttgtttagcaaagattctatcgtctttgagcataaatggcggtggaaacgtggagacggacctgctgctctaccctccacatcaacccgtccaccaagtcgtcctcccattttaagatcccaggagcgcatctttctgccacccaagccttcatcaaccgtttcatgtctgatccttcgcccatttctcgttcatcattatcatcctcttcgtcgttgaatccgttattcatgttgataggtatatcctgctttttgtcgtcatagtccatgtaatcatctaggtcgattcccgaagtaggcaagggcggaggcgaaggagacaagtcgtatcttgactgaacagccgaccaaggtgcagatgctcgggtagctgtattgctttggtcagagaacgagtaattaaagctcattgggagagagtgtatacgatgtacgagatgatgggcggatgtatggaaacgaactcatttgacttctgacgcgtcgcgtttgacgcgacgacgcgtttagatgaatcatgtaaccttaaatatttgaatggtgtgggacttagctacttctcgactaaccgggcgacttgcctagactaccttcatctttcatctcttcttccagcactctcgacctcaacacccacagatcctcaccattatggcagcgagaatagaagaatacgactcttctgaggagttgtgagttttgttctgttgtgtgtgcctcgtaattgttcatacatgctaacctcctctgctttcgctgttgcccgggaaaaataaaaatgaaaaaccttggctggaactctcctcattagcaacgacgacaccgaccttcccctcccatcatcctctcttcctaatctaggtgacaaaggatcgattctcgaagaaatcactccatcaggttcatcaccgtcatcttctgttcctgcgtctgcgcctgagcatgatggagcggcagagaaccctatggccaactttcaagcaatgatgcaggctcttgctggtcaggatcagagcatccttcaaaggcaaacggaagcaccgggtgttcagtatgtggatgacaccgctccttttaaagagtaagtgtcttttcttttctgcgttctactcgcagctctgatcacaattctttttctctttttctctctttacacttacatcgattgtcctttctagatggcatccaatttacccgatttacttggatgctaagcgggcgtatggtaataaagggggtcgacgagttcctagagatctagctgtttggtggccagtatccaaagacattgctgccgcattgaaggctctacatcttcctgtctttcacgaggtttgtccgaataaggatttcttctaactgcagcttgatagattcgttttctaacctgataaactaaaatcgtgtaatgcgtttattcaattatctgattgttcaatcgatcggatacaaacagcaattgaaaacccatccaaaagattgggctaatcctggtcgtgtaaagaccgaatactttaaggatggccgatatcttcacccccgcatcaagacccgttcgttccatatatttaaacttttaccgtcctttatttggtataccttctaacgtttcttccactcttgcaggtcagcaactctatgttgaagtagcccgacagatggctagattgccttcttctgttcctcaaccgaaacctacaatcactcctgctcctgcttccacttccactcctgctccgaccaatgcatcaacctcaacacccaagaaaacccaaaaggtctctggaaagaaggccactgcgacttctacctcaacgtccactcagaaacctcctcgaaggcgaccaaccggacttgctagacctcccaagcccttaccaccagctgaagaacgagtgtccgagttctcacctaccattcctggaggacatttccttcagatcctgaagagagagaaagtagaggcagataagaggaaagtagaggcagagaaagcggctgctgccaatggaggattgagtctgtcagttggcagagagattgaaagctcgttgggcggagatgggaagaaggaaggaaaggaaaagaaaccgaagatgaagatcatgagaggtggaaaaagataaggccgatcgcggatagtcagagccacttgaattgtgtgtatgtgtgtggtcatttgcaacagatgtattctcttccaccagaccttctctccgtccgactcttgctgatcttggacgttgagtgatcgagacgaaagagaagcaagacagggataatgaaatcgacacagtttgatcatcgagaacagttgtttcatgtcgttctttgcagaaagtgaagagaaccctcttccccccttcctttttccctttttcccttcttttttcctttttttttgtgtgaaaagaaaccctttggtagaagtacgataaacatttatcggactacaatcagtatatatataccataagggaaaagctatgatttaatttgttataagaagagactcgagacaagagcggtatacatactatgggctctgaatcaagagggagagaatataaagtagaaaagtatgaagaacacaattttttacaatttctggtcattatggacaatcagaatgagatggaaacacctcccttccaagtgaaacctaaaaaaggaaacagagaacatgttacacaagacagaaaacatcagtaattacattttttttcctttaagaaggaggccaaacatcatgtcttggcggagcaagatcactaaagtggccaagcaagtcgtccatcgacatgttgtttcgaacgtcaaacatctgtgggttttccagctgatgcacgacgaatcacaaaaaaattaagaacagaccaaaagagacattcatttagcttggtcgagcagagagttctaagagaaaagaagagagaatgaaccgtcatcgaccaaccgaccccaaatgaagtatctgggatgaatattggtgggttgtcgttgctcatcgtcatgatgtccagttgctgcgactgcattgattgaggttgctgctgctcggaagataactggagtgattgatcctgttgtggttgctgttgttcttctggcagaggtactgggccaccgttctgaggggtatttgtaaatgacaaattgattccacgtccaaccggatcaggccgagaaattgatcctcgtttcgtcaacatgaaacaatgaagtagcaccgattggaagaaagcggcttggtaggagtacgcgtcgttcgagtctaaagacagagagaaagagcatttcccagagggtcccgagctatagagtgagtggctacatgagggattagagaataacaggcggatgtcaccatacctttagagacctgttggaatacattctggacgttgtagagagctccaatctagaatggctcgtgatcagaacacttaaacaatttctcgcacttgtaaaaaacgcgtatgtattgcacttaccacttcgtttcgatacttgtcaggcagggttgaaaagttctgcaagcacaatcccaagcaaaaataggtattaaaaagagatctcgacagcaccaagcatcactctgctttgctatatatatatcgactaggaaagaaaagaacaagtcactcactttggctaaccaagtcactgcgcccactgcagccataacaatcgtatcctgactgaattcaatcaatggcttcatgtcctccgtaatccttctcaaacactctaacgaagatttgatacacctggtgaacgaagcgatttcatccatggaacatgtcgccagcgacttattcgcaggtcctccagtcgacatgttgaatcgaatcgcggataatccacaggatatgttcaataggtctagatcgagggtgatcactctgtgtgcatacatttagtgaaaatacaaaccataagaaaagtttagtatgttccaatcacctaatctggctttctgcttcctcaagagggttaacgaaaaaaagattgtaagaaggtcgactaacgcaaaatagaacattatgacggttctacaagctgaatgcatagggaatttggctattcgaaccgggcaaacagacatatctaattagtactcacctcttcgcatagagagaaaacatgataggaaagaggacatactatcgtcccctagcttctctttcaagatagacactttctccctcaaatgacccaacatgatgagcgtaacctctgcgtcatacttttgttttcttagactattgagtcctacgaaatttctcaaaagtagatatgaagcgacaatcattgagtcgaatggactatggaatctcggttcgtcagagagccactcttccatgccagtgagagtctcgtctatcattggaggactaatagagatagatatgacagaatgaagaggaaatccatagatcgatgtgagaactccgtacgagtgcaaacgagatagaggtagatggaaaaaatcatatggataaacaaagactcacagatcatgctgcatatgtgatgtcagatcaaagcacgccatctgataccacgtcctttcccgatcctatacaccacgagaagaaagaaacacagtgggctcatgagaaaaaagcaccatggcaagtagaagagaaagagggatggatggatgaacgaacgaaaatcatcctaatctcgtgttcgtcatcgggcaaaggcctagcatgaggctcatgcaggttcagttcataagctagacgaattgctacatcatcgccaataagaaatgccaggttgagttgtgagtagccgtaatatgagaaatgacgaaggagtttgttgtaacgactgagtaaaacaacgcgtaccatagcctactcgtctaaaactactgttatccgtcgccggtttccagaatgagaggatactcaaagcctgaatgaaaatgcaccatgaccaaaggagttagatgtttcatgttctcttcgctctctttctccgccaagccttgattcttgaatcttgaaagcagtttcgatgaacgaaaaaacatacctgaatgaatccgatttcaagaaccccgaaaccgaaacatcgaccgagcatattattcgtaaaatcaagcaactttggatatatgcccggaagcacaaacttggctgacgctgtcaacacggccgagaacaggacgggagatgtttcacgggtaaagctagcagtgtgtagaacgggatctctagataatgagagttattgaatttgacggagtcaacatagggttcgactatctcatgagacaagattaagaaaaaaaactgacaagaggtcgatgaaaacattcatgtagtcatgatatctagagacatggacatagagccaaaaaaaaaagagaagcaataaccaggatcactggtcgtcagacggatatcgggagggatttatgaagacgagcggaacattgaactaacgtttcaaacatcatgacagcctgctcaaccgagaccagaccgactcccactgggtcttcccatcctatcgtctttttagtaggttccaattggactttctgtcgtgttctttctccattggccccctctttatcagcgcccacaactgtgcccgcgtctgttccaacaccactactcatagaggctgactcttcttctaccgtccacctctgtgattggtgcagctgaggggataattgagcctgattgtgttgctgctgtgatgactgagattcctgttgttgactttcctcttcttccgattcctgcttcggtacgccatccgttctctcaatcaacatttccgccaaactcagaactcctctcccttccgtccttctagcactagacttgttggaaactgatgaactagaagcaggcgatcctgccgagcctgtcattccagtccttcttgccccgggcgtcgtccccactccaccacttgaactggattctccgagaccgggggtaaacgtacttctcgaggccttgttcgccggactgttgtagagaagcgaataagctgttatagaggatgttcgagaagatgctctggaaccaaggccgtctcctgggagatcaggtattgacattataggtaacgatgcgcccggcattctctcactcgtgtgattattcctgttgtggtttttatgactgttgtcgttgtcaccgtggtcattattattgctgttcaggttcgatgatcggtctgtaaaagggaaaggttgttgagatgaaggttggaatgggatttgggtacgtatgtagctaggttcgatacctgcggatggcgaccatccgtccccacctgctccgttatcgaatgatacggaagataaagagggcccgatcattccataggccgcctgattgacgttttgtccatcggcatcttcaaaccaagagggaggaccaggattgtaagacgggtttgggcgatcagtcgggtacgatattgattgaggcgcttggccatacgacggagcgatgggcggcggttgatgctgctgtgaatgtcgatatggatgtgtccgttggagatgccgatgtcgttcggattgggggtaaggagacagggcgagctgtggttgtgattgcggatgtgattgtgattgtgggtacccagatatattatgggtgtgattgtatgctcctctcgcatctgcagggggtcgatcgataatcatatttagacctgaaccagaaggattcgtttgggtgttttgcggctctgatgacgatgatcccgcgcaaccttctggtccactgaccggaaaattaccaggagaaagaaaagaggaggagatctgaagatggcgaggctgggtgtgtgtgttatacatcgaggcggatgctaggttgtacgaagaaggcagggacgaagagccagacgcgttaaagcgggagtgatctatctgtggggggtaagcgcgagagctctgagatgagtcaaacatggaagaagatggaagaccagctggcgagataggatctggtttaacggccggataagtgttcgaacttgaaagcggtggggaggaggacggggaagagctgtctcggacatgagcgcttggtgtcttagatgatttcgagctgataattggactcctcccatcggtattcaatgcagaaactctgaacaagcaaaggacgtcctaacatgtcagctcagtacagaacacaagatacgcctctttggatgtgggcacaaggaaggagagaatgcagatggctgaatcgtagataacgggaatcattacagactttcgtttggatccgactttccgtccacgcttctgttggttatacacacactcgtacttgagtcgcgtacaacgggagcaagtgtctggaggagcgtgatctttatcgattggtctacatttcacctgtttgtataagaatcagacccaagatttcaagtcgtgagtcaccacagaaacgggatgtatcagcctcttgtctaaaggatgatcgtccttgcggtagagaacctctcatctatccacacctccgtctcagcgaagaacagagaacaagacaaagcctttaggcttgtcacagacctttgtttgcctacatgccaggcaggcttctttagcctttatgtgttgctgaggcgtcctctctggcgaggcgattgccgacacgggttcactaatcgagcatgaaggcatgacgtgagttaaaccggaactcggcgatgagcaatcggtatagactgactgatgagaattcgttcccttattcgagctcgatacactttccatattggaatctcttctacctgattttgactcgtcttcgtcgttgtcgtgctcgactttgtggttgttagcggtctacatctgaagttgaaacacaggaggatggtttgagaacaaagtccccaagcgtttgggctgatagcccagatgaatggggtcaagcccggacgcgtgggcacgtgacgcaactgaataccaaattgtctcattctgaccccaagtgtgtgatcagtttacccaaacgcatggggtgtcccccatcgtatgggaatctttacccaaacgtatgggaatccttacccaaatgtatgggcgtcaaccccatacatctgggtactcaccccaagcgcatagaatccgaggccactcaaattattaaccggttgatttctcctttcgccttgctctcttttggtcttcttctttctcacatacacacagatacacacagaccgcgatagaaacaagctacaagaactcttatcatggctccttctaaatcaaaacgagcaaggatagccgcaggaggaacggttgtgtctcaggataaacttcactggaagccggtagccaggccaacccaggcgtcgttcggagcgcttgatcaggaaggtggtgttctcgagcttgaggaggttgagggcgtagaggtttgctatgaagagctaccgggtggaggaaaaaaggtggtctttaaggtttgtcgtttgtctttcgaccagaccatcctgggcattctccgggtgatacatctaccacacaatcaatacaaacttgaacctcaaagacgttcgcgtatgcatcatgtctcggttgttaatgacctcctcttcactctcttgtttctcacatctcttgccgtgcgatcgtgtatcagacgatccaacctgtagattcttcaacagaaaacaccgatggtggagaagttgctgtcaccgaggatatggagaccgacgatatcgatgatgctgattcttggaacggaattgcttctgacgtcgagacggaggcccagtctataccaatggtggacaagacccaaagcaaagccgagaaagaggagtcttcttcaaagaccgacgcgcccaccttaactgttcctggactcgaagagaagactccttctgcggaggatcttaaaaagaaggccaaggccgaggagaagaagaagagaatcgcaaagctgaaggccgagaagagagaacaaaacctcttggtcttgagagaacaagaaaagatcgacgcgaaggccactgaagaaaaaatggatggttggtcttgtctggttttcttttgtgtcttatggaccgtacttgctccaaatactcattcgttccctttcgtttgagggcatgtcattcagaattgttcgatggtaagacctgcctctatttccctcctccttcctatgcgcgctcgtctcttttttctttcctaaccttatttgaccttattatatccccgcgaaataacaccttagacgaactacttccttcatggtcccccttcgcgctccacccccacatcaagcgatccctcctccacttatcctacacttcacctacccccatccaagccgcagctcttcccaaaggactttctcaaaaagatatagtcggtgtagctgagactggatccggaaagactctttcatacggtcttcctatcttgtcatactgcctgaatacaaacaggacagaattggccgttgccgagggtggaagacgagagctcaagggtctaatactcgcccctacgcgagagttggccatccaggtttgtcaacatctcgagcaggtcctcgatccgaccaaggttgacggaaacaacaagaagaaaaagggcaagccgcaaccaaaaggaaagggaaaaggaaagcaacagcaagctgaagaagataagcaggaggaagaaaacgaaaaggaagaagaggaagccatcaagcagggcagaaaggcacctccgagagtcagtgtcggagccattaccggtggaatggctgttcagaaacaaaaacgagtgtgggagaggggagtggacatcttggttgctacgcccggtcgactttgggatttgatcggagaggtaaattcgtatcccttccatcttgcaatgcacaggaaagacccaaatcttgatgtcaaaaaactcattcatcgatctctacctttatcaggacgagaacctagcggaggccgtacgaaaaatccggttcctcgtgattgatgaagcagaccgaatgatcgaggctggtcatttcgaagagctagaatcaattcttgccctcacacatcgttccgccgcccctgcatcttcatccgtcccttcttcgaataccattcctgtgcctagttcgcccgggaaaaaatcgagaaagaaccaaaagaaaggaaagaaggaagaagaggaagcaccggtggtcgagttggtgaaggatgatttcggagaggtcgaagaagatagagaggacggccaaggtgggacaagagaagaccttcagacgtttgtcttttctgcaacactcagcaaagatcttcagagaaatttgaaaaagtttcagggaagaaggagaagcaagaagggcggaagcaccttggacgatctgtttgaaaagttggatttccgagataccgatccggccatcatcgatttgtctccagaagatggggtggttgcttctttgcaagaatcccagataaattgtctaaacgaagagaaggtcaatttcccttgtccccctgtttcctggtctctcctttggctgatattaaatcttttctcgaaatttttctacgtaggatctctacctatactacttcctcctcagatatccgggtcgatccctcatctttttcggaagtgtagacggaatccgacgagcaatgcctcttttcgaactccttcagctacctgtgtacccacttcattcacaacttcagcaaaagcaacgtctccgaaatctggataggtaggtctccttcctaattggtttgatgacgctcatttttagcatctcgatctgaccagtttgttatctcgctcttagatttaaaaactctccagatggaattcttcttgccacagacatcgccgctcgaggacttgatattccgtcagtagaccatgtgattcactaccagttacctcgaacggccgatacgtacgtccaccgaagtggacgaacggctcgagcgcagagagaaggtttcagtctccagttggtcggacccgaagagaaaaagttgcagaaagagttgatgagaagtttaaaacgaggtttgtcttccctgtcttgtttatctatctatccacatctgatcacttatgactttgtgatttatatcgacgatacgatagatgatgaggtacccgaactacccgttgaacattctgttctgtctcagctcaaagaacgtatcatggtcgccgtcaagatcgaaaaggctatgcatatcgtcaagaaaaagaatcacgagaagaattggatgagggaagcggccgaggctatggatcttgaattggactctgatcaaatgtgcgtcctcctcctctctcctttattttcctggcgggaatttcactgtgttttcgaattttggactcatgggaaacgatcacattgataggccatcggaagatgacgacgaaggagtccgaagaggagtaaagaacggaaaagccaaagtctcaccaaaggtagcaggcctcaaggcagaacttcgatcgatcttggctgaacctctccaggtcagagggttgagttcaaggtatatcactagtggaacccggtcggtcgttgatgatctgatcagtggaaaccgtacgttctctctttctaccccttttcttcactccttcctcgtgtttcaacttctcttccccttgttgcactcttggacctggcctgatcaccatttgccgctttatcgaatagaacacgagaaaatgatgggtgtggccaagacgacagcttcggcagacgctgcttctggtaaatccaaaaagcgcaaagcagtcgttctcaactctaccgaatgagaactcctcgcctagagaagccgtttttgggcgttggtgaagagacggatttgttcgtttatagcatgctttctctgatgtcacattcgatgaccccttcagtgatgatagtttctaccaagcacgacgaaacatgattagagggacgtatattcaattataagcatggatcatgatatacgaaaaacaggaaagacgaagggtcaagagaaggaagaacaaggggtcgttttggaaggaaagaaggcggatcaaagagatgggtttagagtataagttgacagggttcaactgcgaaagagagcgaaaggggacatgaaaacaaaaccagagagccaggagagataatgaaggataacaaagaaccctgagatgagaaaagcaggttgggtagtttatgtagcaagggatcaaatggagaggataaacaagcgatcagaatatgtgatgaataggaggaataagcagacatgtgaagagaacaagaaggaaatattctagaatcgaatctttcgctttcgtgctgtgtattttgagtcggtcggtacactaagaaagaaaaggagagatggagaaaccttgttaaaaaagtggccgatagagatctgaaagataaaccaactgactgttcttttcccttctttcggtctccctcctttttcctaatagtccattctctcgttcctttgatcctatcattctccaccatctttcctttccttctctttgtccttcctttttctctcctcttctcgttcctgaccgcaccttctccatcgtcgccttcgccctcaagacctttcggtaactcgacccgtacgctaggcccatttccggcttggagaggcgatccgccaacgataagacatagataaaactttttggctttacgcgagttcgggtagtcgatcacgagaccaccaccgaacccagatttcatcgctgtggagagtgccatgtggacttgattatcggattcgggataaaactttgacgatgagagaagattgagtgagtctttaatgtgatgctcaggctttcagacgaatcgaacgaggagaggggagggacaaacctgaagaaccgctctggagcctctagacaatgcggaatgcagcgtggtgaagaacctggatagacgctgtgcagggttgtgacatgttgcgtctgcgttgaagagccactgtaacacagatatactaccagtgattgtagggatttgtttgatgagttggtttataaacaaaaggatgaagacgcgcgcgcatacaaagaaaataccaaaagagagaaagaagtgagttgttgaactaaatagtgtaagaaaaggaagatgagcagaaccgaagacgaacctaatggcaccgtcaaaagatccgggacgatatccgaaaccctgtccaatatcttgtaagaacaaatctccttgaacttcacgctccaaggccacctcttgaaatcactcgccagattatgtgatcatcagggaggaggagaaagttccaagatacggcagaagacacgatacggtctagtgagctttccaagaccaggcgcgtacgtatgcgattagtgtatagataaacaaggaaaccaaacaacataccaagcatactaggagccacgtcgactcccacccattcaaagccattttcgtccaagatttcgccagatagaccagatccacagccgatatcaagaattaacggtgaagagccttccggaagggcaaggagttcgatagctcggtgcgtcatcgaggcttgaattgtctggattcgagtgctggtgcgtggcaaacaaggcggacagatcaatttgtgaaggaaaaagaggtacacagcaagagacacatacttttgggtatacttggtggcctcgatatcgccatagtacttttgaataatgataaaagagaacagaagagagaggaaaggttgaatgtcagtcaagagtagcttgttggcttccctctatcgagttcacaacgagaattgacaacagggttctactaacgatctctggcggactgatatgttctggtctggacatgacgtgcaagtgtgtgagtgtgtatctaagccaacagaacagcaaacaaggcggcaatgtcgagaggtggtcggttcaaaaggtatcatttcattttttgggaggaaaagagattacccgggaaattatcatcctgagcctggtgtgagcatcgatagaacaacggtgtcattttgacatcaggcttgagcgtccctccaccttcctaacctcccatgtccacggtctaataaactcgacgccgtcactcttcagagcatatgatccgaatgaagataatagtgcgctctgtcatcgctcccgactctggtagccatacttgaatagtgagaatagtgagaaaggagatcagagtgagagtcgcatagcatttatatcgccacattcttaccttcacgtgcaccccctcatatctgtttatgttcctgttcctgttcctgttcctgttcctagaatctatttcagccagcttgatctctcacctttcttgcaatatctctactaccatcatctcctctctctctcttcatcttttatctccttatatttcttcttgtatgaaagatctcgactccgataaggccacgatcccttcccacaagatcacgctagatcagatcaagcagtttgatttcgagaggattcttaatgacggtatgtccctgatgcatgtcgttctatctttcgcagatcgcactgactggcgcctttacacatgtcttcttctctttatttcctttcttctagaccctgcattaaagaccctctgtctcttaggaaagatcccagacaaagatggcagtctgaagcaacctgctatcttcaatcttgagaaacgagcgttcaacgcaaagctcaacgacccccacacgaccgagttgttggctaacctatcaaacctgacgatcaccggagcgaatgatatcgtaggttaatacatatcgcgctcacacacagtactattcgttacaaccgtcccgtttagtataagaagaaagatggcgctcagaagctcacaatggtaactttttgaacttccatattcaaaatgcagtatcactggtcgactggctggttgggcgaaagccggccggcagacatcaaggtatccattatctcgccctgtacggacgtgcatatcaagaaagttagtacattggcatcctttcgctctctcgagaattttttagaagttgggtcaccaacaatcattcgttctctggctcctcgcgcgatcttacagcactccaagcaaaagacacatctcgttagggagacacctgagttgtacaacaaggtcacccttcctttcattcaatcttttccagcttctcgaacccagtgggttcggaacattctcaatggagtatctgagcaggaagatgttgtgtatacctcacccgctcctctaggattcacattacttcctgacgccaagtcagtcttcgcttctctgtaacacgattgaacgatcggatcagtgcaattcgttactcattactaacttgtgttgttgtgctacccatcaaccgtttgataggtgggatcgcaagacactggcaaccctgtatctgaccatgatctccaaggagcctattccttcgcttcggtctcttcgagcacaacatctcccacttctaagagagatgcgagtctctgctgaacgggaaatccgtgcaaagtggccggacgttgagagagggactcttagattttttatacattatcagcctagctactgtgcgttcttcccttacactttctttctaccttgcatcatatggatgttaaaaaacaaaattttcatccactccatgtcgcatagaccacttccatgtccatgtgacgcatgtatcttacaacggagctcttggcatgtcggtggaacgagcgcatcttttggacaatgtcatcagtctagtgagtattttgctcttgtcggtgagctaaagacgggcgttaacattgtcctgattgggattacccgtgcctgttctctctctttcagttggagattgatggcgacatctttgataagatgacgctcacctacgctctaggcgaaatgcatggactctggaagccgatgaaggagcacggaggatgggaggatccttcgttacaagatgaatgaaccatttgtctagttctggattgattgaaacgcactcgcccttctttctagtctcttccctttcttttgcgagtcgtctagatcaataagagtcgacaaaaggttggcacagaaacaccaagaaaaatcatctttaagtttctcttccggtcttcacactctcttctctccattagcaacaccaacgctccgcctgaagaactcgttctcgaccccgtacatctttccagtaccgacccttgtcctcgccaacttttcagaaaccttgacgggtctgaggtatctgatctgctgcttcccactcggactctcgacgatctccgttccgtcatgagcggtctggaggcgttcttcctcggcttccttcatgagttcttcaggggtgagtggatcgatgtcttcgacgaccacctcgggtgtcaatcgaccaacccgaggaaaggttgcggcggtcatgaattgagtggcacaagcgatcttgcaggtcgccactcggcatgctgtttccatcgagaaaacacatcgaagagcatttcagcaaacgaaagaaccaaggaatgaaagtgaaatataagcagggcagagagaaggggtctcaccttctcgggcgatctcttgtcggacgtttcctcctcggatctcaaacaacgtatggttcattgccacactttgatagtttgaaagaaagaagagaaacaataatcattaatgaggttcactttaaatgaatagagtaccctgccgctagaacattcgactgcaaacaaaggtgaagaagtatggagggcagaagggtgaacctacttgcaagaccaatactcgaacgctccctttcctttacccatacgagtttgatttccctatgaagaagaggaatatagggtcaccagaagagaaaaaaaagcttccgtcttcagtaatctgtccttttcaagaacgaaagcaaactagagcaaacgtttctgccaattctggacgacgaaagaacggatcaagaagtgaaggagaaaaggaaagaagttgacttaccttgacagcaataggtctatctgggaaaactctcatgatgatctccgctcctttgtaaggtttcaatttcttcctcaatgtatcgtgcatcgcttccaactgtttggctctcagcctgatccccatcttgactctgattccgaattcacctccaaaggccaaagtcgttcctctagttgaaccacccgtacggataggaatcctacccttcatcgtcttcgtagtctttgttcgcttcggagcaaacttgattcctcgggtttgcatcggagggagaagcctgagcaaggtagcatgttgaagaggggagaccgtcgaacgggctgatgatggaagacaaggagaagaccggaggacaggtaaagaggaggaagagggaaccgaagggagagctcgtcgaagcgaggagagggagaaccgggaagaaggaaggagagacatcttgatcggtaaatttagaggaatgtatctgtgtgctctgtgtgctgtggctctgcttgagacagcggttgaaaagcaagcaacgtaggagcgaggatggttgtcggaggagaagagagagaaaaaaagaaggtagtacttaagaatggccgcgtgaacccaaacatccatcccatcctccttgagcatctattaggttgaaccatgaaggtccagttgagcccattctcttgtcggtccttgcacatatcctcatgacaacagagcattaactccttgttgagacttgtgctgctttttttctctccgcagattcaaaaactggcaagccgtggccgcatggcgctgggatatcaagaccgacacctccgaccaaccgtcttatccaacatacaacaacgaaggggacgatgatgatgaggaagaggatgaagaggaagaagacgtctgtggaatctgcagattagcatttgatagtacctgtccggaatgcaagatcccaggagacgattgtccgttgagtgagttcccttccatcgtgttcattcatcactctccctctcaacttgaacccgactaaactcgattctctcgttgatttaccctcgcgttctctcttatcgctaatcgattgatgtatctgcaatgaaactaaatgaaaaagtgtggggacaatgtacacatgtgttccacatgcattgcgtactcaaatggctcgataccgaatcatcgaagaatcaatgcccaatggatcgtagaccttggggttcgttttacttctttgtttcctcccctgtcttttgagtctcgactgaactgactcttttgttgttttgctttactcatttttcttcatgacacgatacattcatgtctaacgtatagtcacggctgaacgaaacgaccctgcttcatcacccatgtctgaatctcctccgcaatcaccaccctctcaacaccattctgcgctccatttacatcaacatcaacaagaacaagaacatcgataccagcaacaccagcaagaataagaatcaccatatcggcaatgatctactctgatgttctcctcaggatatccaaatcgacattgactattatatacccacttgataatcttcactatatatggcacctgcactgaagtcgagaaaattgaaggaaatatgaggacgcgtcgtgcgttgttgtgagtatctttttctcattgtgatctttcactgctgtccctttctcgtaatttcaggatgccgagaggaaacacgaataagcgatcgatagctgactctgatggcgcgttctagtttaagactgttgatacgcttttgatcccaacctcaacttgcactcggagctccggatgtattgaatacctgtgcaggtttcttatgtcgaccaaacgttgctctggatcgaacgaagactctttttgaaagagtctttcattcttttccctcttcttctcacggttgtctcgttcttttcgtcctggtctccgcctatctgctacttcatccctccgtccagcataattcatcagaaggccatatatacgaaaacatctgatactcaagataactgttctgtttttttttagcctcacatccacagtcctccgagcctgctcttctcatgacgacgaacacgaagtcaaacgtcgaaatcttcatcttgatagctactttgatgggaaaaaacccccttaccctactatacccgtttcgttccgtttcattccatctcacttgattcgcgatttttttttgttttcggcatctggtggtgcgtcgagtttgttcttccttccggaaagacgggtagattcggacttaatatgtcaaatattcaaatagagtgaaggaaaaaagaagagagaggaaaacaaggctttacagaaacaagaggagaggagtgaaaagataggaaggaagagagggaaggagcaagcaagcttcttcagttttctttaaagattcggagggggagggcttttcggaggaaacaatagtgatatataattggaacagaccgaaggagtcagaacttgacggtatcgaacgtttgattgaaagagaagaaagataaaggagagaagaaacgagaagaatgacgacgtacactgctccataaatccccgatcctccggaagccgactctgcgtgtgcaccctgaggagctgttgaacttggcgcctgctgctgttgagcagcttgtggctgctgaaggctttgagcgtactgagctccgtaacctacagctgctcctcctgctgctcctgctgccgccccggtagctccaggttgttgataatagctgtactgctgagcttgccatgcctggaacgcagggtcattcacatcgtagccataagtagcccagtactttctgtaagcctcctgaggatcttccgccacaggtgcagccgccggaggagcagacgaaggagggccgccagccgactgactatctggaggaggaggaggcgcgtcatctcccgaaggaggaggcggtggaggagcatcatctcctggg

SEQ ID NO: 403 - DNA, 32640 bp, Xanthophyllomyces dendrorhous
tgctgttgttgctgctgctgatggtgattatcatagttggaacacgtcaggacaaacggtaagcatgaaaggcacggacggcaaccaagagaggaaacaagacgaacgtagtagttttgcatggggaatccagagtagaccccctgctggagctgctgggcgtcccgggccttggcccattcggaacgaacgaccaacaacaaatcctctgccaaaagcttggccttttctacctgagactcatctggtccactttaggagagggtcccacaaaagaatggcaaaaaggcagttaatcgacacgaccatcaaggtccggatgaggcagacaaaagcatggaggattacctaatcgagacgtgcatcgggtcctcagactcgcggccagtttcttgatcgtagaaaccggatccaagacctttgatctggactcgcgtcccggtctctgcctggatatgcttaacgaatagaccctaacgaaggaacaagaaagaaaggaagaactctattaggcttcgactcggtttggtcacggtttcaatcaaaaccttcaaacaatgttactcacacctggtcccacgactttcgctcggacgttgaagtttctcaaactctccaacccgatcggcaccttctcttccggccactttcgcctctcccctggtcgaccgccgaaccttcctccggcttgctcggccggaggtgctcctccatccggttcacctcctcctacaggagctccgtttgccccagaagcaggaatttggttaccgaatcgctcccgatttcggccccattgggatcgatcctcgaccagcggaccaaggtcggctgcaatcaagtcgttcaccttgcggagtcgaaagagtcacgagatgagtttcaagaatgaaaaataaggaagagacggtgagagagaggagggcactaccttcttgacagctccgtctagaatctcctgagacgtggcaacgatgtgaaggtagagcggaggttcggccgcagttgccttggacttgtcgggcagccaagttcctttagtggtgattgaggctccagtctcttgatgaagctacattgtgaaatgggaagaatgggacaagattgtgagagacggaatcttacgtgtatacagatatacccagagtaaagaggtcaatgagagaaacttacctgagtttgggttgaacccttagtgaggagatatctgaaggtgagaggaggttagtttcgagaagctcaggttcagacagagccatcatagacaatacaaagaattgagaccaacctgtttcggagatctagttcgaaaaagatgaaaagctttcataagtctgcttttctctgagagacgcgtcggtagaggagcagggcgatgagaggacagaccgttgatctcaatatcatgggtgaactctccatcgaagtcttccttctctcgtttaggagcaggcttcgcgtagttgttggccagctttgcggcgatagcagctgtagaaaaggacggtgggagagatataaaacctctaggtgagccatgagaacactgtagagcaaagggaacgagactggacaaacgaacctgcacgctcggcggcttcctgtgcactgacagctggagcaggcggtgtggttgccgacaacgaggccggattgggttcgtcccaagctctacttctgttggacatgtctttgagttgtttgcaaaagagaccagatgggatgagaggtagaacacaacggatgcgtgtgcgagtacgaagaagaagagagggtaaagtgggcggtgtgatcacgtgaccgatgagttgcctagacttgttgaggcatgcttagtaagcgagatgtattacctcagcctgtttgattacctagtcgtaaccctcgccggttcttgtgcatgtcctttcgcctgtgcctgtgcctgtgcctgtgcctgtgcctgtgcctgtgcctgtgcctgtgcctgtgcctgtgcctgtgcctgtgcctttacccgtgcccctgccctggtcagatgtccatgcgcccgtcccgacggccaccgacgaggacgacgaacgccaacggaccgaccaagagacagacggacggataaacggatggacagatggacagatggatagatggacagaaggaactgacgaggttgaacaagacgatgaggacgaacacgctgacgagactaacaagatgcgcttgtgaactcgagtgaatgtacgactaacgacaagacaccagacaccaaggagagaagcagacggagaaagagaacgcccatacagagcgcacgcatgaaacattcaactcctctccctcaccgctttagattggctgacctgctgccccattggctctgcgcactctgcaggtgacccggatgagaactcagcatgttcttcattgtcaactgaccttcaggagttctgttaaatacctgagcagatcgtgttctcttctcttttctcttttccgctctccttctcgttctctctccggttttatctctatccttccatctcatcccatcgcttgatcacattcattctataactctgaacccatcatggattctgcacctaacctctctacttctcctggatcgtgagttcccgtcttggacgtttgtctcagagatcatctcggtctgatatctggttgtactttcccgcctcattccgtctgatcccatcacgtcacagcatgggatccaacgcttccctagaggcaagattgaaaaccattctttcttctccatctctctgggatcctgaagctctaggctaactttggcttgctctctcatctcatcagatcgccgatgccttgttctgtacgcttatcctcttcaccctgtccatgcaagacgagttcaagctgatcgtgtgacatgttcatgtatcattgtaggcgaacacggccaggaagtttgcaccgcctgcgggttcgacgctcgagaggaaaacgatgcgtttgtaagctcttcactgactgattgaccagtgtcttccttgacgacggcctgacattctatcttttttccatctttatggggtcttcctgaacgacaatcagttcggcgtgagtatacacagttctgattaacaaaacagtttagtctcaaccatcagctaaccttgagcctcgggcatcgcaatctcctcagttctcacgtatgcccacttaaaagatagattagctttcgtttacaacgtaaaagtttgacaccttttctcggatcggttcttattacgggctggtgatcgcgggtggtcgtccgtagccgttgctgaacggggagcgtgagatccttccctttcggatcaatctcatgatgagatgcatatcacctttcctgacatcacacctcttgacttccttccatcagcctgactctagtagatttcacaagatcgaccaaggataactccattcattgcaagaagcacggaactgtgtatgccagcgttcctcctattttatctaaccagtatcttttcctgatctcctcttccaatttctccgctcttcaacagcgattgcaaacaatgctgtaagtcgcataacgtcttctttcccctttccgatgccatcactttccttcctatgctcatatatttcacttatcaaacacagtcaactggaagaagagtattgccaagctgcagaaggacgcgtcaaaggcccagaagaagaagcctaagaacacaagcaactttgagtgatcatcgtctgaaagcttgccgtcgtcatctttgtattgtattctcggtgtttttttctggttttttttcctaagcatgtatctctctttttttacctctcgatccgaaaagtttttacggttgtacgattatataccggggtatcgttgatgttgcgtcgattaaatgtgttgttatcaagcttgtgcacgacagacgaaaaggtcattgacaacaaactcgaagatgaactaactagcatacaaatcaaacaagcttggacgacaccctaaagagaagcgaccacagcggaaggaaagagaggaagccgcgctcgctcctcccaagcccagagaaagcagagatgaacgaaagcccaaccggtttcccacccgatccagtttttccatattcctttcgatcttcggagtgagagctctgaagcgagcagcgagagcgcaagagtcaacgcctgttttatccatgtttcatgcatccctccggttggctgaaccggacgaatggaaggatgagtgtaggctggagacgcaagagtagaggtagacgaataggcagaagccagagcggggatgaaatgagtggacacgagtttgagaacgattaacccttgggaactcgacctcatccatctcatcctgctctcggtcattcctgacggtatcgtcctgaccgaccggccgtcattcgtcgacagggatgagatgttatagggtgggttgagcgccgccttgtgtatcgagttggcgaacgagacgggatgtgtgccattggagttaaaagaaggatggtgtgttgtacgaaacgttgttcgctgacataggtaattgcaaattttaattgtcagaatcgaaccaacacaagagctctgaaatggtacagtgcaggcaaaggaaaaaaatacaggagagaaaaagagagaaagcagtcaaccgacaacgcacctctgtctttccactatctgaactcctgtccgacccagattccgatccaattctttcgccaactgtccccctctttctgcttcttcctcttgtgatgaacctccctcctgcccagccgatgacagcttcctgctccctccctgatttcatctccgcatattgatcttgatcttggtcttgctcttgatccgacgtgtaaggtgatccagaagtcgagtgaagcgttgtgagcctcgcctccaccgttgatgacaaaggggaagggatggctgacggtgatgaggatgatggggaagatgaggagagaggttgatggaacggcgtaagtgatgtcgataggtcagagaacgtcggtggtctggaagaactagagctagagaatggataatgccgaagagtctctttctacagggaggaacaagacgatcattaagagaaatctgtttgtgatgtggaggccaatacacccgaagagcgagtgtggaagggaaaagaaaaagagacgtacgctgagaccgacttccaagatgtgcagtacttttttgcaggatagtctccggccaggatcagtcgtcagtaagcctgcaagaatgaacaagagttcaggagggagaccccgcctctcaaagtttgctactagctcaggagtagggttgaatctggtatgtatgtatgagccgcaaatcagcatgttttccgagacagatcggttgatcaaaggacgcgcgcctaccctggataagccataatctctttctcaaggactgataatcaaagcgacaataaagcaaaccatgtcaggataggaaagaaacaaaaagaagtttgtcggacaacaacagaagaaagaataggcaagtgagcgaacggacggtcgaaatcttctgtttgagaatacggcagattgaaaaagatgatcttgtgcaggatcatcccttcaatttcaagcccattcagccggtgagaggaatggaagaagactagatcagtctcgttggccgtcaaggtttgggtaaattgagacaaagcggctacctaaactccagagatcggattcgttgccaagttccaataagttgccatccgcatcaaccgtgaacgagcctggagagcaatactctgtcgtgccctaaggtttttttacaagaggtataatttatcctatcagccgttgtcagacaaacaaaacaaaacatacagaagaccgaaaagatataaaccgtatttccagaccgagctctatcagggtgatataacaaagaagcggtcccgaaatcacttatcagtgccctgggaggtccgaattctccttcttccagatggagcaagacgtttccaggtttcagatcacaatgaatcactgaatgatcgtgctatttaaattcaagcgttatagtcgatcaatgtacggagcgcgcgaacacatgcacacatatatacacaacgacggaaggagaagaagctcaccaggtaagtcaaccctttacacacatccccaaacacgctcaacacctcttgccttcctaacagatgtacccctctcgtttcacctctgtggattccttctctcaagccaccagcgtgtccggctccagcggaagccagttgagactttcgtcgggcacgaaaggcagccttagcttgggctggagataattccggagcttcgaaatcagtacccataggtggtgaggtacgagcggttatccatgactcgagggatccatgatttgcgtattgcatgagcacactgttcagattataatgtgatcgaaggaacaaaagaaatagctgagaatcggcatgactctgatcaaagccgtctattcgaacgcagacgacaaaaaactgactggagggcttgtataggtgaaccgaagctgatggttgccccccccaaagtatgggccagatcaatcgacatgaaagatggtcagtatgtttgtctctccgaaacattcagatctcagccatagcactcgagcatacctcgagaatcgggtcttctcgatccacgcaaaatgaagcgtgatgatgttttcatgtcgtaatccttccaagattttgatttctttgagcacttgaaccaagtattcatgtgaggttcctctttcgatatgtaaatgtgcagttgtgtaaaagttttcgggaaaccagttggaacaagaaaaaggaagccattcgtaaacgactgaatgctttgaatcaccaagtctacgcagaggagagatggagaagagatatgtgcatacacagctactttctttactgcactgtaggtaggaagggaagaccgccagtgagtaaatataaatatcattgagcgcagaaaacaacggatgtaacagggtacgaactaaagaccgagaggttgatggtcgatgatatgctgactgttaagagaagcagaccaaagacgaatcagtttaaagagggcgatctgggtaagactgactcgagtaaactttcctgaagacttaccatagaaaaacggttccctgcgcgcctgtagggaaccgacgatcagtgagaccacgacggtaaagacagagcggaaggagtagaccagagagaactcacccatgccaagtcgatgctcttctttgaagtatcgtttgtagtacccatccgatccttcttgagagtcaccagtttcttcttgtcgactggtccgcgtccgttggtgtaatgatggggccgatgaacctatctgttgttccgtccatgcggtagtggatgatatggaagacagtgacgaagtagaggatgacctagaaggagaagagccaagagtaggcgtggcagtagcagcaacagtagcagaagaacgagtgatactcgagactgaatttccaaacatcggtgtcatcgaaggcgtccttgacgagcttgaccgtgatgactgagattcggggagagccggatgcaacgtagagttcacctgggaaaggatagaaaagtatcgagggttgacaacttgttgaccgcgcccagggggttcaacagatcggccatcagcttcctgatcgaacggtcttttgcatagttcgcacacatgactcccagactggaaggcagaagctatgggagagcttgaaggaccggcaatggccggtcgaggttcatattgtgcgttcgagtgacgagggttattagaatggtgaggaagaacagaaagcgcatgcaagtgaggttgccagagaacgagggcatttggtgtggagagcactgtctcccaagagtcatcagatgtgtgtggcgtgtctagatgagggacgagtgccatgatgggagggcgatggtgatggtgatggtgatgaagccgagcagatggacggtgtcgatcaagatggaagttgttcactaaccatcatcacaaccttccatcttcctttggattgtctctccgttccctttttttctttttcttggcgttgcttctgctacaaccatacacacatagcatatacacacacatataactagacaaggaagacatggaagaaatccgtcaaatccctcctgtaacacggtatcttttgggctccttcctggtcatcactttgtccataattggtggcatcctcgatcctagcatagtcggattctattggccacatatcaacctgcggttcgaattatggcgtctattgacgacgttctgctttgctggccaagatctagccatggtgtttgacctggtgtctttctacaagacgtcgaacagcctggaaactgaaacatacatgatggatagtgcaaagtacgggtggtcaattgtttggatcgctttgggcatcgaggtttgttttcactgccttgtcttcttcatctcgtcagcagatgcgcgttcatctgaacaggatcatgtatcttttggtgatcacaggcattgaacatctggattggcagctggttcttgtttaaaccgttactcatcgggttggtccacatctgggctctgcaaaacgctactgccaaagtatctatccttggcttggtctccattcctgctatctgtatgtgcattttctgctcttcttcctttttccttttctctttctttgcgatctgtgtttcaactacacagaccagcatgctcaccgatcacatcgttcgctgtcattctcatatagattaccccatggtgttgatctttttcgtgttcatccaatccggccaattgctctctccaacctctgggctcgttgcggcgcatgcataccataccttgacgagaaacctaccggagaaccgacagtctggtttcttagtagaacctccgtcctggtggagggctgcgtttgcttcaagaccggccgttgtgcgtaccgggtttgggactgccatgcagtcggacaagtcttgtgcgggtggtccgaaccaaggaagcagtggtggtggtcatctttggggttctggaaatagacttggttctctttgaacggttatacatgtgcattctctcattctagcgatccttctgttcattcttttttagcaatcccattgttcatctttctgttcatccttctttctcatcctcttcgctctagatggtgacgtacgtgggtgattcccttggctcaggctgacaccaaaatctttcatgtcaggctcagaacctacgccccccgctcttatcgtctcaacttcagcccacaacgaagaacaacgaggatcaaaccatcatcgtcttctgtgttccttctcgtttgcttctctttaggcactcgtacaacaccctcaaacacagcctagagtttgtccatgttttgctagaaacatgtcgtcttctttcccagtaggtggcgccttgatctctccatgttcgcttgggcctggctcaatctgatccggtcccacacatcccactcttctctctcgtagcactactcggcccttgccagctctcttcagtcaacctcgcctgttaacaatgaccttcgaacgcttatcgaacgatctcatgttcgctcggcctcacgatcgtctcgaaggccgtcttcccattcgttcgtctcgtacagagaacgagaggccttacttagacagcaacaggacaatgcttcgctcattggtgattcagccattgcagatgacgatgctcagcacgacagatcaccgacctctgcaacttttgggaattacggtagtacgtctatcagaagaggatccaacgcgagtgctctttccaacggaaccaagttacaccggggcaacagatttggtaggctctcgatgatcaaccacaacgttcccgccggcctggttcatctacagggcccttacccgcatcaagcggtggagagtaaggtgccaatcatggaccctcaggtccttactgccgaacaaggtggagaaaccgcagaggaagaagaagagagaattctgggtggtccggcaggtggggatcttgatgtggatggcgagattgtcctgagtgacaagttgaactggagggcggccatgaaagtcagtcggcttgtttccatcgggtggcttgctcatttcagaacaagagctgatctagcctgatgtttctctgtttcctacttactttctcgtgttcttgttctcccaggcggaggccgttgtcgtcacttacactaccattcctatcctatttacccaagctgctgagttttccttaatcatcgcctctgtaagcgcacatacatatatcattccggttgactgtgttcttatcgcatcaaacatgctcatcaactcttgtgactttgacacttgatcggtccattgcctaggtggtctccatcgggcatctttcctcaggtccgatcgacctggctgcgtcctcgtccgtatcgtcccctgctctttctgattcaaagtcgatcattgatcatgttaatctcttgctgttcatttgtattccgcatttgctcggtttctcaacagactggcgtccatgacggcttccgttacttgtttctcaattcttcagggaattgcttcctcatgttcgtaaccaagccgaatcatccgaagactttctgtcctttcgttgacgagcgactgaccatctttgatcaacccagtggacactctgttgcccgccgcctggacttcatctgatccaactcgagtgggactctgggcccaacgagtcgcagtgatctctgtcggcgccatgtttcctatgtatcttggtacgttcgttatcagcttcatgagatgatggggatgtatccaaagcttactttgatctatcatgtgaatgtgggcagtctggttcaacgcagaacaggtcctgttgttcctgaagcaaggttcgtcaacctgtgcgatcgaacattcacatacgctcacgctgatcattgcgtgttggttcgttgtgtactatcatagagcccgaagtcgctaagaaggccgggctatatctccgggcgctctctgttggtatcccaggatacggtccgtttgttcccctctttccgctgtagcctcgctgttgctcataaagtttgaacacgtttgcctcgcccaggtggagtatgcatcatgaagaaagtctttcaggctcagggcttgatgcatatcccgacaatcgtcatcttcttcgtcgcgcctttcaatctcttactgaattatttcctcgtctggggtcctctttcagctataaggattgggttcgcaggcgctcctttggctactggtctaagttacaccttggaggtaagaaggtttcttgccctctataggatcgatcatcagaaccacggagctgacagcaaatttttgctatgctccttggctccaggcaatatgtttcattggatacgccttttggagcaaggataagcgagcttggccagagttcgagcttagacaggcttttggaaaattaggaaccgtgactacgcttgctctggctgggtaaatccctctcgttcgacatatttacattccaaccacgattgttgtgttttatgacactgacttggtcaccaaatcttttcttctgggttcaaaagtattggtcaaatttgttcagaatggtggtaagtcatgaatcgagatttatcgaagaaaagaattatcattgatgtctcaagaatttgtcacgttttcgtaggtcttgggagatcgtgactctcgcggcctctctccttggacgtacgtttcacagatctctcttgtttcctcttttcattctcaagctaaacggtcatgtctgtaatttaccactacagccgctgccttagcaactcagtcaattctattgtatgttaccttccatgcttgcaattcgaacatggactgtttccttgacctcatgctgaacatcactcgacatattctcatataggatcgcctgctctatcacataccaaattcccttttcaatgtcaattgcgattgccgtccgggctggaaatctgctgggcgcccagagaggattcgaagccatgtgggcttgtcggaccgctctgctgctctcgatcatcgtctccacattcaacaggtttgcctcttttccattcttttgtatggttctgttcgagaatagtcgagaaaatgctgacaggaatgttaaactgcttgtcatgaccctcagcatacttctccttgtctttagaaacagtttcgccaaactattcaatagcgatcctgtcgttgtcaaaacagtcgcagatatcattcccttcttggctttcttccaggtaagcttcttctttcttttttttgctcgtttctgttgtggctgaatcgttaaacatgcatttgctttggggattggtaagcttgctgatgggttgatgggtgtatctaatggaattctgaggtgcgcagtctttttatcaaagttcccatcgaattgtacaactaaataatatcttttcgttcctgtttggattatcagagttatgggcaaacaggcgagttctattcgatcgacgtgtctttattccgagattttgtcgctgatgaatattgtgacgtttagcatactggagcgttgatcaatctatcgagttactatatctttggtacgtagatagtggatagccttcgtgaacaaggctctcgttcgaactgaccttctttctggcttatgctcgatctaaaggaattcctgtgggagtatatttatgcttcgctcgccacatggatttaactgtacgttcttttatcgaatttttctatccttctcattgagccgatcacttatctcatctgtccgccatttgacaaatagggtctttggatcggtctatccatcgcgttgacgtactctgccgtgttgtgcaacatcatcatctatcgcgcagattgggatgttgaggttgaaaaggcaaacgcaagaattgggttggccaatggggagattgaagctggtgggttgctggatgacgtagacgaggaggaggaaggggacgggactccttagtgatctgtcggcgtcttccttcccgcttcacgttctgtccacgattgagtcagttcttgatcctggtagtcacatagatcgaagggtgcaacccaaagacatatatctttcttttcgcgttttccaatctgttatgtctcttgccttaacttatctgcaaaaaaatctagttaaaaaacctctcgctttctctagctatttctcgcttcttcgctctctcgcctcttctcgctattcttctgttcgacgcattttcacttactgaatctatgtaaatatacctgactctcaaatgtgcatattctcttatatgatcaaggacagaggacaggaagggttatgacgtgttgactgacgagaaagagaccaacaaggtaaaacgagatgaaacattcagccatcatcggaccacgcctttttgttcttgtacaatgcaagtttggattcggtcacaacgaaggatcgagaggaagggtgggaggaacggatgggggacggtaagatgcttcggaaagaagagagaaaccagaacctggctcatagctttgtgatcaagaccatatcgaatacagaaagcgaagatgagacgtttaaaggaaagctagaaaccaaaagagggatggacaggaagaagagaaccggagtggcataaatattaaagaggagcaggtctatctagttcgatatacatctctcgtttcatccttctttctccccctccctgctcccctcccctttccaatttgtacaaatccatttccgtctcttcttctttttttcaatttacattcaaggagaggggaggtcctcggttgaggatcatgaaaaacacacacacgagagagttggtattgaatactgttgagaagaacgtagagagcagaacaaaagaaattaaataaaaaaaaaaggaagaaatcgacccaagagaaaaaaaaggaagatcagcgcccggttggcctgtagacccttccatctcgctctcttgtccgttcgtcctggtcttctacttcttcaggaacatcagtaaggtgttgcacttcttcattatagtcgttgaactgtatgttcccatccattatttcattcccatattacccgggggacagagtagatcggtcagaaaaatgcgagatgcgaaagaagcggaaaagcaatacgaacgattgaaccttcgtttctgaaatgtgtgcctgaccgtctggcccctgaagtagaaagtagagctacatcatccgcctcgtccgttgagaaccttcctccaatcgagatcctcgggtctgcgttgaaagatgcgcggttagaatttagatgggggaagagagcgagagagagggaagaaagaagaaggaggacagaagagaaaggaccaactcattaaaccagattccagccctccgtgtcttcctttcggcggttctggctccctgctaaggttcaacaagtagacacccatgaagatgaccaagaagccacacaacaggctgacgctatctgcagctcctgtagttcctaatccttggaagagaatgatcgaggcgatgaacgtggcagatgagaagaagacgtaatagatcgggttgacgacgttggtggagaacaagtcgagcgctttgttgaagtagttcatcctgaaaaacgaatgaacatcagagttgttcggtcaacgttgtcgataaacatcatcaagggtgaacatcgcaggactcactgaatcatgatacagctgacgacggccaatccgaagaggtacgtcgtcgggtgagtaaactggttgtttccggcaaacgtcaacttgacggccactcccagtccctgttttcatttgaattcagtctgtttataagattgaggctagaaatgcgctcgtcatagaagagaagcaggacacgaaccttgacggccatgatactgatggagccaacaacagaacagatcgagatatacaccaccgggttcttttttccgtgcgtcggggcgactttatagatcatcacgagggagaacacggcggatatgaagagatatgtgaggaaggctaggtgttgatcattttttcgatgtttccggagaacggtcacgaagccagacagaaaaggtctatcagcaaacaagccttcgaggtcatatactgaagcatcgaaagaacaaaacaaaccaggtgccatggcataatcccagatctcatcgaccgtggagatctccttgtctgccggcgcgtctgtttgtaaagaacaagcaggccgtaaatcgcaagaaacgtcaatatgttgacatcagtcttggattctttagggatgacatatggactggaggaacggacgaaggatgatgatcaaactgccaatcaaacataatgcgcatccacaaatcccaagctttccaagtttctcgttcagcaagaacgaagcgaggatagctctgcgaaacaatgcgatcactgtcaacagttgagatggaaaggaatcataaagaaattggcgagagttgaaaaacgacaaacccaatgatcacactgagcgctcccagtggagtaacaagaatagccggtgcaaaggtatatgccgaaaagttacagacctctccgacgaccactataggatttattcgtgtgattgatcatatcatgataggcgcgttgaggaatatccaggatgcatatgataggtgcatgaaaaaacgaaggagatccgaaacaagacaaagagtgttggtcgtgcgtgagaaagaagaggaagaaaacaaacaagagaagactaaagcctcgggccgcaagcaaacttacaggttgaaatcccggcccaccataaaggtgattttaggtatgacaagttatccgctagagagtgaattgaactgataagtagatatctcgagatgtcttgaacacaattgagaagaataagaatgataaattcttacaagcagaaccatggccattctgagaagcaattcggcctgcttgattaagaccctacatgagcgacgacaacaacagaccagattgtaagtagagtcgctttttctgaccagctgtactctcagtgttctgcgttacctttttagtgatgatgaaactcgtgctgtacagaggatgttaagagagtaagacaaagcatgagtcccgaagaaaacaaaaaaaaaccttctgtcggagctagcgccggagatgaacaagaagagaactgacccgatggcgagtgaactggcaaccgcgagggtgagcccgatatacttgtcttcaagcatgcttttccgtttcttcttgtttctacagtgctacccagtgctgccttgtgctgattgtcaaccaaacagaaggataagactgaggttaaaggctatgggagaaggcgtagcaagctaaacaagacttctgttgaatgtatgctgaactatggccgcatgcaaaccctgggcgataccttggttacgggcatggctacggcgtggttacgatcagcctttgtaaatcctaggctcgcgatacacatgcgagtactatcaactttcctatttcgaacagctcctaagcttacagaatgatttcagaggagctcatagactggtagtttgtgggtttgaacaaagaaacagaggtctgaatcacgagcgcaaggaagatgacgttgtagtccaaaggcggtccagaggatggcttggaataagccatactaatcaggtggaatgacgtgctcatctctctcctggatgcctgacgtacacatcgagtatacttcaacatagcttagacccaaggctcagagacaccatgctctttgactgttgggtcgtacgaaccattggtggatggaggacgacaagtgtactacagatcacgtgacaacactgctgtgctcttcatagcgatgtaacctacttgaatatttattcttttttttttgttttatctttctgatatttccttcatcgagctttttccttcgtacggccatccttgagtcctcttgctcgtgtcctcgttcgctttctctctctctttatacagcatttacaatctcataatgctccgatccttcaccaggcccatcgtttcggcctccgctcttgctagggctgtcccatcggtcgggagagcctttttcccggccactttcaaccgcgtcttgacctccaccaccactgctgccttcactcgtaagaatgtctcacttgttacctttcagcgcttttgtctttgcgctttactgtctggttcttaccgatcctttattttcttggcatctcgctcgcacatgcttcccatcatcagtccccgcgtcgccggcaaagaggttcaattccacattctcttccaacgatgagccggatctttcctcccttcctcctcttgcagaggagctttccgtcgccaacacgttgcctttctccaccctcaagggcaagatcaacgaacatattctcaccgcgctaactgagggaccgttcaaattcactcagatgtctaccgttcagactagggtgctcagcttgcttcctggacttgttggaccggtcgaagggcatggtgctggcgaggaaggaaagagggatcttcttgtgaaggtttgtttcttctctcctctcttctcatatatccgacctttcgcgtgagactcgtcgatatcgaaatccactaattatttcttgccgttctttgcctgttaacacgtcaaggctcgaacgggtacgggaaagactgtcgcgttcttgacgcccgcggtcgagtctcgactgcagtttcttgccaatcagcgagattctaacatcgctgcccatgacttcgtcggaacgttgatcatctcacctactcgagagcttgcggtacagatcgccaatgaggccaaggcaattactagccggttccctgctaccagccgatcagacaaatggggagttcacctatttgttggaggaacaagcaaagcacaacagttgagagactggaagtccaacagaaaggatttcatcgttgccacccccggaagactcaaagactttttggaatctgtccgagatcttcctccagctctagagaaagttcaaactgtgcgtgctctctcggtcctctcttgtttttctatagtcgatcatcggtcgctgatatcatttgcctcctccttttccttctctctctattcttctcaggtcatccttgatgaggccgacacaatgcttgatattggtttcggacaagacatcgcccagatcatgaactacctccccaaagaccgacagaccttcctcttttccgccaccgtctcccctgcaatcaagggaatcgcccaagactctctcaagaacgatgcgctcttccttgatgtcgttcccaaaggtgaagctcagacagttgataagatcgaacaacacgtcactgtcctcgaagacttgagcactttgatgcctcatcttatccgactcatttctcacgatcagctggtgaaccctaagagtaagacaatcatcttcttgtcgaccacaaagatgacccagttgttctcgaccatcatccgaaacctctcggttcacttccctgaacccaacacctccgtctacgagattcattccaagctcgatcagaaggtccgattcagcacttccgatcgattcagaaaggataactccgctgcctcggttcttgtcacgtctgatgtctctgcccgaggagttgactatcccggaaccactcgagtcatccagattggaaccccgccggacggagaacagtacacccatcgagtcggtcgaaccggtcgaggaggagctactggccgaggagacatcatcctccttcctttcgaagctggtttcatcaagtctcagctttccaacgtcccaatcaagccactctctgttgacgaacttgatcgagaagtccgggtgctgattgaaaacccacctagccagaagaacaaaccactctcagacgaccgaaagaacgaacttaaaaacaaaatcgatttgattgaagacggatgcaaaaacattcaatcccgatttgaccaggaggtcgtcggtgaagtcgtaacttcgttgttgggcaactacacccccaagccaaagattttaaacacgactaaagcagagatcgtcaaaggcttgagcgacttgggatcgttaggtctgggaatgcagacccctccccattggtcatctcaattcctctccaaggttggaatgtgggacggagggtctaacggttagtcttttttctctttttcttcatcactcctggtgttacttgtgagttataagagaaactcatccagattttccgtgtcatgcaggaggttcgagaggcggatatggatcaggtggatacggaggaggtggaagcaagggaggaaagtatggagggtacggtaagtccagcggaggcggaggtttcaacagatctggaggaggaggaggcggagtcaaaagatcgggcggaggtggtggagggttctctcgaggtcgaggttcgtatcaggggttttctgtatcctctgctccttgatctctgatccgctcggctgatgtctattcaacgtttctctgttcccgtcatcctcattcaggatcttggtaatctgcctaatgtctcttgatctcccttttgttcaagatccctcattccatacacatacgtatagacacccgcatatataaaattctcacccaccgattcattccacagatatatcatctagatctcattcaaagcctctcctctctagtcatcatatttcttttgcagctaaacgaggattctgaactcgataacacactataaaaggaggaagaccattgactgttggcttctctccactcacatcctctcttctcgatctccttcttttctagtctcctgtctgcttctctaatattgtcttgaaatagagaatttgtatgtttgtaccaggtctttctctttccatttgattctgtcacggccttcgccttgaacgatagcgcactcgcaaaaccaccctcctttccgttcgtcttgttgacctttggggaaaacattcttgagacattgcttacgtgacatgcccgatgatgtcatcgacttctgaaactggctaccagactatgtttcttccggtctaacgataaccatcaacctccatctcatcaataaaccaaccatggggctctctaatatagtcagaaacgttgtatccggtaagttattggccactgatattgttcacgtgaaagtctgattattggtatatgtctgataaccttcggggtgcattctatttgtgtaggtccgaaggcgagatttgtcgacaagacttcgaatcatgatctagatctagtgtatcttacagatagaattatcctcgttcgtcttcttctctttcttcatcagaatcttggtctttcatcccgatagtttcatctaagctgtaatttttttccggatgcttgcgggttgcttaagatgggatgtacgtaattgttcaactcttgttccatgaattccatccttgtttattaaacttcgtggtgttcctctcgatcttttcgataccttacccgcatatgaacagacccagccagtggtatcgaggctgtttatagaaacaagatgtctcatgtctctgcctttctggaggagaagcatagagagcattacagggtcttcaatttgttgcgtcctctcctttttgtttctagtggtctgtcaacagtcacatttgcttacggctgtcattcaaacctcgggtcattcagctgtccgctttcggaaaacgcttacccacctacgagtttccaaaagcgaatctcccgatatccattcccggatcatcatgcgcctcctctcccgcttctatatctcgcgaccgatgagatgaagacatatcttgaggctgatccaaagaacgttgtagtcattcattgcaaagctggcaaaggaagaagtgagtacctatcagctacgcctacttacaatctatcggtagctatcagcatacaaaagatactgaaggttactggccgatccgatagccggcacggttgcatgttgcttgattgagcgactgggaggtgtggaaaaagtaaagacggatcatgggatgactcgtggcagtgtccttcaatccgaccaagccagcgatgctcgatactcgactcctacagcatccgaggacctcgttgtatctagttctgatccgaacgaaagatctgttggatcggtcgagccggcgttgggtcgatccaaatctgtcaaggccaagcatcgcaagtctgcctctgtcgctccacatatcgctcctcaccccgctgccgaaacgctcgagtttcatacatcccggcgaatggcgaacccttctttaggtaaacctggggtatcaattccttctcaacgtcggttcataaactactacgtaacatcactccgacatctaaattcctcacaatctgaggattgtagtttgtcttcgttcgggatctaccccgctgccgtcagtcaagcagactgtaagcccatgcttcgactgctggaagtcattgttcaacatgctgcgcctcctgtcaaagaattcgcaacaacacctcggttgaaaggagaggcatccagatacctcgactctttcgttaatcatctggaccaattagtccgccagtcaaccgatcaagaaggttttcctgccgttcttgaaggcgccggcggattggggattggtatgtcgggattaggaaccgatgaagtaggtggtgagggttcgcccccttcttctggggacagaaccggtcccaagggaggaagcgggatggtccgctcgttaggagagctaaaggaagccttcgtcgagactggcgagatggattgggatgaatacggagagaagagcaagacgctcgcgctgttcactcatcatcttacaccagtggacaagttggtcgtcgatccagatagggaattgaaagtacagctaatggttgatggtctaggtgggggatcaggtggggtgggcgtgaccggactcaagtcaacagccgccggtttcatgaacaggggtgtcaaagcagggttgacgaacgttgctcttggccaggttagcttttcatcttatgcttcgtctgcaaaggtgtccctccctctgatcttagatctgtttggttaatctctttttcttctgatttattcaatgaagactgtatcgagccttggatggttgtggattatcccctccttccatctctctttgcccagcgatacacccacctctagcactgtccagagcactacctctgacctccctcaccacactaccaacaccgacatcacaaacgacacttcgactcgacctgcttctctgcctcaccttccgcctccttctcaaatccctcaggctgacaagaaccatcgaacacacacattcacgttcgatcgatccatcgttgactttagatcaaagtcacttcggaacatcaaattggtcttcgaggagatccctctgtctgaggggaacgagaatggtcctgtcgttaagaagaagagcaaggacaagggaaaggaaagagaagttgtgccagatgaggagtcgaggaaagttgcgttggaaggtgcagtagaaggcgcagagggtggaaaggattaattgacttgtctgagaggccgagatcccgttttttctccttcttcattctttgatcctcagtcttgttcttttcccatgttgacctttgcctctcacccttataagataattacacgttgatgtttttttttttcatgttacaccgtattcattagatgaatggcttttatgagcagcgaagtaaaggtcatgatcttatcacagtttacggtccttctgaaagtgttgcaccggcacgatgacttcaagcagaaggcatcaccagaggaccttgaacctcttctgctttggaagttccgagaagaactttgattatctcgagcgactgagccattcaaagtaaggcttgtttgattggtatccgagacagggcaaaaccgggagacaagcaagtagatagaaagaaaaagatggtgacgtacccagagtatggctgtaccagggccccgacttgaagatcaccaaagagtcagcaagtcagcttttacaaaaatggaataattcagatagagatgtcgatataaaaaaacagaaaaaagtggaacgaacctggtgataagattatgatgaacgacagtatcttcctcgacataggtgaactctttgtttcgaggattgtcaagaagaggaaacatatcgtgatattcagcctcatccagattgagcggctgagaattagagagagaataaagaaagagagcagacttactttctaccaacttgtccttcacactaggatggctcgtcagtctaacctttccctctacccaagttcgtctatcatcccataaaccgctctccaaagcgaccaatggccctgcgcagatcatacccaagaacttctcactgttagccgcataggatcgaacgagagacagaacggctggtgtagtagatagggttttggctccgggtaaaccgcctgggatgaggaggatagtgaatgatttccgaatctgaaagtatcaaaatgatcagaaaacaggtagagatgatgcttaatgaatagacacggaattcaaaacctctaacttcttcagaaagatcttcaaatctggaatctggaacaatcttcattcctcgactgaaggtattccgcaagaatatcatatgccgttagcttctacatttctttatcccatctgtcttgttatcatcttgttattcagaagacagtgaagcagacaaactgttcaaaaggctaacctacaaacgacaaagctctgtgtttcgtctacgccgaccgaagcagactggacagagatcccggcccgtacgagcaggtcatagatggtcgtaaactccgtttcctctgtaccagtcgcgatgagaacgagggcggatttattagaggaagacatggtggtggttgagagtagcatatcatctcacggtttgggcataaaacggatcaaacatgacgtcactacgcaggtgtaggttgatacaactcttggaaggaatatgaaaggctcatctcctaaccatccacacttccccttatcataccttgaactgcttcgtcctttgctttctctgatactatgtctttgaccaggtattttctctttcaaactattatgtccagatcgatgcagaatcgttggactgacctgatctctgttttctcttcattagtacaaccttgttggtttctctttcttttttcttttttttgactcgaacagcacaacttatacttgttactgatcatgtatatatcaacgttgaacttcaagtgatgatcaaggcaaacagcctgctcagactctcccttcagacgcttcacttctcccggcatcgccatctgaggatcctctgccagaggtcgacgagtcctatcttacacatagagggacctctgcatctacgactcagtctgttgaaaatatatatggcgaagaagccgaacggccgacatacgatgaggatattgccgaggaactgggaggtgattacgatctggagcaagttggaaaggactacgaagatgatgagggagacgatggagaatttccagagttggaagatgagcaggaagatcaacaaacgctgccgaatgaagacgatgatgaagatatatagtcatgagagctttcgtgatctgaagttgatgcctgcagttatggtttctttccagaagaaaacattatataacgatggcggccattagatcaacttccatgagcctcatcaaacattgcccaatccgcctcttcttcttctactccttgctcggattgtctattgcgacctaatgtctgctgcgttgactttttgatggcgatccctgtatatggcgcgcgggactgttcgatctcatctaatatcgaccaatcctcctcggcatcatcgtcgtcgggaccgttgaacagtggttgctttccgttcgagagctcaagcgtaaatgccggcgagagtcgttgagtcgatggtgaaacagatctcgtaggtcgactttcggcttcagcggcagcgatcattgcatccatatcatcaacctctccgtctgcgttgttgccgaatcgtattgtcgtttcagaccgggagagggaggggagtaagctctgtgcatgcatcgattgtagattactagcttgagcgctgctcaagtcggattcgagttctgatgagataacgccagaaagcgcaggctcatccaataaggaagcttgaagatcgtccaaaatgcgctgtttgtgatcgtgtttcgagtacgaattgaattagcttgtttgcgatatactgtgtatgatgagttattttgtattgagaagcaagatagaaaggatacgtaccttggacatccttgtgtggcagagattctcgatatcccgaacagtacccgagaaatctgttttaggaaacagctggtgagtccagatgcggtagtcgttcatcaggttgttcagatccgaccgctatcgatttcaaagtagagagggagcatcaattgagttcagtacaatggtaaagaacagatgtccccaacaagtagataaacagaaggggcggcacctcgtgtcctttgcctttgatttttgcccgattcttagacaactcggccagtcggcgtaaacctatcggttcttgaagtctgtatagtagtgattatgtggaataagtgaacagagatgcatcaacgatcagcaggttctcgattgagacaaatatgattcatttgtatatcaagaaaaatacaggaggaatgatcaagagaagtactgggacacacctttgaatgttcactttcagaggcgcccttcttttgttcgtgctcttctcgtcctcacctatttccaattcgtcatctgatctttctcccactctgaggttctcagatccaggtatcactgtgggaccagccagcctttcaatatcatcttcatcttcatcatcatcaaagagtcgaagagcgaggtctttctggatgttggcttttgtcgatgatagcgaacgctttgctcgagcaggaggtgaagctaccgatggtgtaggtgactgaaggaacaacggggttccaccttgcggtcttaccggacgaggcggacttggagaatcaaataagttggccagagacatctgtatctatctgaatgaaagcaagagagaacacgatagagacagaggtgtatgtgtgtatgttagtatgtacttgagagcgagttgaaagagagacgcgttctgtgttcgctggacgcgtcgctcatcaaacacgcgtcacgcgtcattgattacgtactctatcaatcacgtgactatcacctctaataacttatctacataattttttcctttctttttactctgtactttgcttcttttgacctcccgaggctgcttcgtttatcttcttctctaggtcctcgcctttactatccaacaacgaaaccttcacaaatcatagcatatcatgggattatcggagcgaaaggttaaacaacggatcggtaacgatcctcggaacctccaatggaggcaaggtgagaccgctttctcatgggtctttaaatggatcctaaatttgaacaggcagacgatctgaccatacatattcgttgatctcggtacctggtctttctaacagataccacttcctttggcgctcagtatctcctcaaggctggacacgttcccaacacatctcttggtctgaccgctgattctggactgatcaacccaatcgccgtcgcccgaaagctcgacaactctggtatcggtgtaggccgatctaggaaggaaggaggaaccgataacggtggtgtcggcggggctggttctggtttagacgctcttctcaaacggttggcggctgagagtgggaccgcttcgcctgatgggagcgcgagtccgagtggtgaggatcagcaggctggagcaaaggtgatgagtggatttcagagagctgtgggtaacggaggggtcgttgacactgtcgtcgttcagagtacatcgaacgaggatagtgagagtaaggtagagcaagtcaaggtagtggcgaggccgaatcgactagcgtacgtctgctgccatgatctgtcttcatgtttttatcaggcgctatcatcggaaggctatcttattctgactctgcacccttgattaatctctctgtccttccactagtcaccgagcgaaattcagaaatgcaaaatctcaggcatcggtatcagccacgacggctatgaacgagatccttggtatcaaatcccttcccacatcttccgccccgtccccgacttccagctctgtcccaggtacaccgatagccgacgatctgattgttcaaaacaaagatcagatgtctgtaggagattacttcaaggcaaagatggaggccaaaaaggcggcgatgatgaaggcgatcgccgatgctgctgccgcctcgggaaacggagaaaactctcagtccttggaggtcagtgtaggagacggggtggtgttcgacgaggtcgtcaaggtcggtggggatgcttctgaggaggagatcacgtctcctgaagagtcgagggctgtttccgaggagaccaccccagtcgaagaagagaagaaaagtgcggagaagaagggaaagaaggagaaaaaggacaagaaaaccaaggagaagaagaggaaacgagaagacactgagggaacggtcgatgcggtcgttccctcagctcctactgccaccgtcgttgaagatgcttccgaaagcgaagaagctcggacaaaacgagagaagaaggaagacaaaaggagaaagaaagaagcgtcagtggctggcaaggaggagaatgatgggaagaacgagagtgaagatagtaagaagaagaagaagaagaggaagacttccgaggagtagagtgagaagggtattccatttccctcttctttcctatcttatacggtccttcgtcatgtttcaatttcgttttgtctcaatttcttcttatctgtgagcgtctttcttagatagatcactctctcacattgtttccactttccattcacttcagctatccagtctcatcttttctctttccaaccatcatctatactcttcaaaaccaacttgctttttgttttctgggctttcttcttgtacaaaaaaaatctatctcaatttgatctaactacgatctaatgcaatcacactgatgaacagaggaaaccaagaaaagctccactctattgacagattgagacagatatatagagtgataacggaccccgtcagagtaggatgagtcaatagagagtggaaatgttccttgagctgacgccgaccgaagggtcgaaaaaacacggctcgagatggatatagagtgcgctcatccaagagaacaacaccaatcgcacccgggggccgaacaaaagcatatggggccaaaccccgcttcgggtggacttaaagagatgaacggtgcatgatagccaccatggccagagctcattgaactatgaccctcttgatcttgagtatggccatcgacgagccaggcctgctctatcagcgataaaacccaaggaggaaggacgaaattgcaggttgtacatcctagtgaacggtctggttggagagtcagtcgttgtgggtgtgatcgtacttcggtttgagcgtctgtaggtggacattgaggacatggtggagggtcgattgaaatttgggaaggcatcgatctggctttggccgagtcgactgtgttgacgtaagtgaacaaatcaaaatgatattcagctatcataagcgtcgatcggaatgagaaggagatagaaagatagtgacaggatgatacaaacggatatcactggatgtagcgcagccttgatcgagaagatattctaaatattccggatcaaactcatccacctcctcttccatttctatctcttcctccataccttccatttcttgtatgttctccttccaccctcctctgacttcgtcttctaataaggcttccaggggaattccaatcgaggttgaagaccttgtgaattctttttgtcgtcgtgcttcttgtgatcgcataatccttcggaagatcttgcgttgaaagaacacacagacagaatatgagcgcacggacataggtgtgagatacggaccaaaaagaataaaagaagagaaagaccgacttcttgttcaaactcatcttctccatcctcttcgtcatcttcttccgcatcgagggtcataccatccgcatctgaggcttcgctactcccgacgttcgatctttttcttcctagcgccttcttcttatcggccgagaccctgtctgcacatcttgctctaaacttgtctctccataagttttgtgttaccgaggtaaatccgagtccgttctctcctgaatgaaaatcaggagcagtattaaagaaaccgcctgctatgagagatgatgtggatgtggatcttgacaggattggtgaaggtgagaatgaacaaaggtcagatcgattggatccagaatctgggcgcgatgagcgacgtgtagatggtgaggatgctggaaatttacgagaatgtgggggaccatgagaacgattggaatggccagctcgaaagttcaggttacgtgatccaaaatgggagtgggagtgggaaggcgacgagaaagaggagggatgagtgtgagaaggaggaggtaaatttctgactcgattgggacctagagggctggacctaattggactggacgccatggctacgggtgaagagaccgacatctgaacaagaaggtgaaggtaagtgtatcaaaagaatgggatgggatgatgttggatgggagttgggagaactggacgcgtcgagagtgggtggcggaggagaactcatttacgcgtcagaggtcacgtgataaatctgagaaaggctgtacgtgtcattgatattacaaaggtttgatgtacactgagtgagcggttgccaccaaaagacaaagaaaaactagttcaaggagagaggcagagaggcagaaataggagcagagataaacagtaagggtctgtgatttgaatgatgcaaaggtgagaagaggacgagagtacttgaggaagccacgagagagtatatgtgctaaaagaagagcgaagagaacgaaacaaggacacaagaaacagaaatcctggatagaatcatttcttggctgccgcctcggaatcaacgtttccgttcttgcaggcaatgatcttgagcttgtcacaatggatcacatcacctctgaaaggacggcatgccggttggcaaaccataaagaatgagcttgagatccgatggaagcacaagatacaatgagaaggccacttacccgctgccagaactattggtttcgatcttcatggatgcgttccggacgatgaacgtccacacatcgtcgcacaacctgtacgtccggagattgccctgagatgttgtcgagagaaggattgtgagtatagacagaacgaggctatatgttgagaacgtctagcttgggaatgagatacatgccttgagggatgtcttgttcttgacttgcttgctaagggtctctgccaaactcttgtcaaactggagtacgagttggtggatgggtggcagtaagggtgcacgagagaaagacaaagcatgagctatcgaagttgacatctaggcttgacagaacaagacattaggtaaacaaacctgaacaagaaccctcatggcgagctgaggggtgatctggcctgcctggatgaggtcgtcgagcgagtcagtaagggaggctccgatgctgattgtataccaacatgtcagtcgattggtcagctgggttgatctgcaacatgagactgaaaccagacgaatagacagcgatcgacaccaacctagaacctctgtagaactcgtagaaaccactttgggaggccatacttgtagatttactcaaatatgtgtgtgttggtatgtgacggttagacggaaggtgagaacgaaagagaatgaacagactatactgatagatcttcgagattgagttgtgttaagtatcttatgtagcaggcggcatcatatatgaaatttgattaatcatatatgaggtcgctgtagagtagcaactgtttcctatcccgtgagagcacatatcacatggtgtactcaactggttcaccttctctgcgctcaaggacaggatggcagaagatggtcagacatgatagttcatctatcggtcttgttttggtggttgctttctgcaataaatgctctagtcgattcttatactcatcagactcgatagtgggtccgggctttttatcccaatgggtgctgcaaacttgatccctctttgaatgagcagacttgattgcgtcgtcgccgtcatttgatatcatcatacgcgccgtgcgggccagttgaagatgagagtcttatgcatgtagagatgcggcttgacgatcggcagaaggtatgatgccgatcggacgtaagatggcaaggtcgatcaacacggtttggtggtagtagtatattgaataaaggacaatgtcctcccaacatgcgcactgataagctggtagtccatctggcggactgcttgatctcttcacatcaatcttgttgctactggagaatgacaaagacgatggtggggtagattgtcaaactcatgaatggctttgtcttcgaggctgggccgggttcaataaaccttttgaacctcaaccagccgcttattccgtttgctgtactccatcctttctaccttcaaaccatcatcttctctctcctcttcggcttccttgcattaaccaagaagaagctttgtggtaaccacgtctgacgattgatctgtctgtcttgacatctttcctcttttggttttgtacatatcctcttgcttccttcgcttctttttttctttcccgctgttttcttttctcttcttagaccttgtccgtgagtattcgacttttcctttcttcctttgcttctgtctctcttcctcttcctctttatccttctcttttacctcaagtttctgctcgaaaaggcttgttcactcatcctgctcatggctgagagccaagaacaaagacaagaagttacatggacgtctgaccggtgatcgggtaacctacagactttgatcccacacttactctcagagtttcgcaaaccttggtgatcattcattgaaggactcttctcctttcgtccgcacttaccatttctcctccctctctttctttcctactcatatcatcttccatccttctcgtttgcctgttggatctcaaacaaaactcacaaaactgacctgtactcaaattctggttgactatcggaactttattctttcttcgtgttctcctctgtctttctctctcctcatacagattcctattcttttaaccttctcgttcctttgacgttcttacgcaaaaaaagagatggccgatcaggaatatgacccaacgcgtcctttccaatcctacgccaatcacaa

SEQ ID NO: 404 - DNA, 1249 bp, Xanthophyllomyces dendrorhous
accttcaccaatgactggtggtgttccacccgggccgtctcctgcttcaggacctcacatattcaatccacctgtgcctcctccatctctcgcccctcctgccccgactcttcagcctctgcaagccaagcaaaacccgactcccaagcaaaacaaaaggtcggctagaaataccaagaagaatcgaggtggagacctacaagcaaatctgaagaaagcactttatcaggacgagaagtacacgcttcatgagccagtctggaaagtcgtggctggtcagatgaccaggttgcactttgtagaaacttcaccctcgaatcttccaatcacaaagtacatcgcgacctccaaaaaggacgcggtcgcgattcaccaacggattctagaaaggtccaacgccgcaacttattactcggatggaagcttcaagcatggctgggcctggggtgcggccgtcgaatgggttaaagatacatccgccgcgtcagaaggaggcaaagttggaaagatactcagagaggaacttggaatgtgcgacccaacagatgcagagatgggtgggatgagaaaggcgctagaggctttctctagcgtcggaaaactcaaggaggatgagttgatcatcttttcagattctcaggctgccatcacacttatgtgagtttctttctccatggtggttccctgatctttcagatcgatcgcgtggtcttttctgaccggtttctttactgatttatctccatgtcttgaacagcgattcggggattcgctaccaatctcaactgttcacatctacgctcgagcgaacgctcactcttcatccgaccgtcaaagtcactttggtctgggttcctggtcacgttggaatcgtaggtaatgagctagccgatcggacagccgtctctggatctactaccaccttccttgccagacgagctggtagattaccaggtgtgccggacgaacaaggggatatgcctgtcatcctcgcgagacgaatgcccaaaggcgagggagtgcaagatggaattgatgaagagggcgaggaaaaggctgaagatgggaatggagtcgacgttggtgacgtagatgatggaaagaagcagttggagcatgagcagccgactgatgattcgttgatcgccggcattggctccttgtttgtcgctaggtaagttttctctcctcttctttttgttgggaagaagtgtgggtacctgcgtatatgtgcacatgtgtatatata

SEQ ID NO: 405 - DNA, 17365 bp, Xanthophyllomyces dendrorhous
tatatatgtgtgtgtgtgtgtcacaaagattaacgagagctgtactttatcactattggctggtttttaggtttcctgaagatgctacagcaaatgacctggaagtcttatttggccagtttggacaattgcaagtctttcgagtctgtgtagtttgagaacgtgttcgatgatgcgctaactgcatcttcatccctttcttttgaatttagatcgtccattgacatcttttcaatacctcccatgaccgaacggttcgccatgctttcctttgtcgacccttccgttgtggacgaagcgatcaagtggttggacgacaaacctgttaccttacctactcggtatgccgccacgagggattgtgaagtttggaaaggttggcagggttcattgaaagtcgcattgaatgaggtaggaacgttggttcctacgagcgtagctgcttcatttcccgagcttcctgattgggcaaagacgaaagcgagcccgggagacggatccgacgataagggcgctggagaagatcaagactcaaaaaatccagcgagcggagacgaaagtagactcgaagatgaattgacagatgaaagtgctgaagaggtcattccccattcaggacatggcgaaaagcggcatgatgaacctcagttgaacggcagcggtgtgggtacggacagagccgaggaagacagcttgatggtgggcatcgaagagtctgcagacaagtcggatcaggcgtctgatgccaagtttgcctctacgactgtacctgcgtctacgtcagaatcagaatcaataccgcctactgtagttgatcctactcatatttctacaagtacgcctgtccctgcgtctcctctcgaactcaacaactatagggagagcggaggagagcccagaggttttgttgagagcggtggttcagctcaagagaatttgcctgcagaagtggcgcaaatcgatccggaagatttatctcgaacgccatcccacccgtcaccacaaatacagccctcgccggcagcttgtctgttgacgccatcctcggcatcatcctctctacttccccgtcaagaacaacaaccatcacctcatcggcaaccgtcgctgtcggcccaacctgaagacgaacagtacaatccttaccgaccgggtcaatctgcttttgttcctgctccttatacgacgcccccgttcattcctcctcctggaggatccttctatccatttcctcgacctcctcctcctcctccttctatctctcttcctacccaaccgccactcccactgcctacggcggcgaggacgagcatagggacaggggtaggcgtaggcgcacttcaaccgccaggtcttccgcccaagtccggttaccagcccgctggcggtcctggtgcggatgtaaaccaacctagaaactggaaccgaggtccgccgggctcgttcaattattcaatacctcctgtggctggtccaccgccccctccacctattctccctgtcggatcaaaggttcggccaacaatgaacccaccgcccgggaggccggatcaagtcccatcggggcaaaagaggttcgaggatatgactccgtctgaaaggttcttgatgagctacgaacagttccctcccgggccgggcaacaaagtcagcagtactgggaaagcgaaaaaggctggaggaaaagcagcactagcaggagccggtgcgccttatcctccttcggggacaggtaaacgaccggcgttctcaccggtttcctctagtcctcaagtcttgcctagtcttccaacgctgacatcgatcggaggccctctgggaacaaggtctacgtctgattccgggcctgggcctaattcaggtctaccacccttgcctgttggaggtggaggagctcaaggggttgacgactcgccgttgccgacgaatgtcgcggatatgtcgagattgattctcgacttgacagcagagaacgcccacctggacgctcaacatgcccggctgacgatcgtgaccaaggatcctgccgattggagtctggcgctcgcacatctggccaaaagtatcttgagtgaacaagaggtattggaagacatcaggagggctcgagcaaaagaagaagatcaggtaatcgattgggagaatgttttacagagaaacaacgtgggcatagaggagaggagaagtttcgttttggacgtgctggacgtactagacgcgtccgtcctgaacgacactcagatcatcttcaacctccgaagacagatcgaaacaaaaacggggcaactcactcatcggatgtcgcaactgccttcaacaaccgcttcaatcctccaatcgtgcgaacatattctggctactctccaccgagcacttgaagaacaaaagaacgcgttagacgaagccgccaggcggtcgtctgttctcggagggctcgttcagatcagaagggatgctgcagggatgtggagaggaaggaaggaagagattgacctggttgtcaggcagttgactggtgatcagcagccatcacccccatcattaccaccaccacaacaacagttgtcattgttgccctctgccccacccatggttcagacgtcgatacagcagcagatgcaaccgatgcaaccaatgcatattcaacaacacctacatccatacctgcattcacatcagccactaccactgccaccaccaccgccaccgccatcatcacgcacacgaatgcctatggcgatgaacaactatcgcaggatgtgagatggatctgaatgtatctgtccataccccctaatattcgtcttaccaaccttgcactggttttgtcttgtactgtcttcatcttgtcgatgtttcttcatcattctcttcttccctatatacatgtcatatctacccgatctgttctgtgtctatcaatgacctctctgatctttcccattccttctcagcatgctgtgcccatgctttgagaacattcaaatgacaactgagcccagaacgatggccatgcaagacggaagagtatatagatcgaagtccgataagatcgttcgatcctgttttattctcggcgacttcggttgttctatctcatccgtctcatctttcttccagacacgtcgaacgatccatccatcgttgctatcaagcgatgtcgtctgaaccatcacctcctacgaaagctttgaaacgaggctcggcgtatgtctagttctttccatgctcaatcgacatgccgagatgactggacaaagattagatcgctgacgtatccgaatctgaatttcgatcttcgtctcttggtcgtcatcagctgtcaaacatgccggtttgtccttcttgcctatgctgggctcatatctctgttcttcgctatgcaatctctcttcggattttgggaagtacttgagtaagtgaggctgactctgttggttcgatccgggttcgactcacttagaaaacgaaagctggtacgtccgtgtatccgctcgacttagctctgctgacaatcacacacgctcaactaataatctggcaaacatttcttcctttgtgggacgttcgaaatgtaaaaagagatggtaagcattgtcaggttctgttgctctcgttccaaacaatgtcgtcttgaaggggctcttgagtctaacccgggactttcaacgtcgcttgtccagcacgggagaaaagccgacgtgtaaaacgtgtctcaaagtaagagtctttttctcttcgatctgcttcgaatgacggctagattcccaagctaatctccatctgctcgactggatttgtgcagaacgctcaggaatgtatatacgacgaagtggttcaacccaaaactcgaataagaaagctggaggataagatttgttggtttagagatcattctgttatctgttgatcttattggattggaaagtcgtttgatcaaagttttcctttcgttctgttctccttcatagctcggctggaatctatccttgctcaatcgggttctgatcgggttggcccagctcgatcagctcctgcgaccgaacgaaaaagatcaacaggcacgttcccctaccccgcaatcaatcatgccatatcagagtctttcccagaaggatcccctccagaacgacgagccaagcgggacggtcaagaggcattctctcaagctttcgaagagttatgggggatgagtacaactgcctccagactagatgatttcgaattctttggagatcagcagcctgccttcccggcgtacccaatgattccgtctggcttgccggaggaaactgtcgaaccagagacaagcgaccatgtcctaggcgtcctcaacaaacttattgaagagtcaaatcctgtcggatcagtaccagtcgatccatgggagtttgatttggcgctgatgaacgacggtggtgctttaaaatcgccgactcaacctctcccgatggaactcgatctatttgcttccctccggattaatcaggacatttatcatccagatcagtcgtccatgagcttcttccaaacagatatgccgcctgctactatgttgccaaccccagaggcatcctcggcgtcctctatatcctcgtcgtctgtaccgatggagactcgatccgcggctttgagagcatatgtactggacagggaagaacttccaagggaaattagggatatggtccttcgttcatttttcgacagacggaattctttcggaatagttttggacgtcgaaaggttttggaggtttgtcttctgtttttcactagttctcccccccaaaaaagaagctgcttacatacgtaagagggcagtgtattgtctgaagacgagtacttacggtgatgcttgggacttgactattaaaatttttgattgatgtggtagcaaacttgagagtccggtcgaagaggatcagccgcaccctgctttcttgtttgccatggttcatacacatacgttgttccttttctatccatgaatcctatctgatgctttgctcgttctgtggaaacaacagtatctctgcggtagtcagttttctccggataaagctgtccgggcgttggacgacatgttctttgacatggcaaagaagaatctcgatgaaggagtcgcgaattctgataagcgagtgatcgatttgatcagagccgctaccgctttgagcgcctcatcgtgtaaatatatcacctattgattataccgaaggctgagaacgaggctgtttacgttgtcatgttcttattttgggtgttttttttttgtttggaatacatcttatggcagactcaaaagcgagatttcggacagcctgggtctttggaggagtacgtccctttatttctgtagaaccaggcccgctcctctactgtaaaatgagctaacgtcttctgcatgtcttatgcatggctctagaccgctatgcggctcagcgcgctcgccaatctccagttaattaattttccttttaattccctatcatttaagcatccaaaaccaaatactcgtaatccaagcaggaagcgttggagagatgctcaccagtctgttcgacctcccaaagactcaatcgagttcggagagtatatctgggcattttggatggctttcgtaagcgtgttatcgtcttttggatcctcaagagagcgcaatttgaacctgctgttttacgccgttttatgggattcacgtcccaccagtccttggacagatgtggatctacggctactggttttgcttctgtgagttttcaatgatgctataacttgagccgaacaaggtatctcatatctcgctatgtcaccgccgtcaacctaactttgtaccttgctttcaggcaatgagctggtcagaaatcgaaacacctttcccgttgccgctgtcgcagtacgcagatgtgagtcagacatggcatctagtattatactgaagataatatttcaaaccatgtaaacaggccgtgactcaccgcggatagacattttgatcttctttcagcttgatgcagtcaacagtcaacctaagacggctatgtatgaagtacttgacgaatctcgacagattctcgacggagatctgtttgtccattcatacttaaatttaccatattgaattccgtctttgcctgactgttaactctctttcccataaatataaacgcaggagtgggtctttccagctcatcgcattatttatcttgagcgaagcatctcgactacaagaagagtttgttcaaccatccctcaaagacaattatctcgcgagccatgtgtcgtctcctgctgagtccttcggatcttcagctgaaatcttcgaatctcctggttcgataatggcctatgccgagagtccatcgaggtgggggcctgctcttggtttggaaggacccatcccaaacgatatcacaaaaatgcagaacgcgctttcaaagtttgtcaggtcgcttccagctgaatgcacgaaccctggtcgaaaagtgtacgtgatagggtcgcttcctctgttgttatgcagttgagtgagagtgttggtagtttgtcgaagttgacgacctgatgcgatgtttgtatggacaaatggttatccagactgggaggtgttccaccttggagaatggacccgatgcttgtagatagctcctttgaagatttggccaaactatcggatgaagtatggggaattgaaccacaaatcgtcctgctgcacactcagatccatgcgtatgtacaatcgtaattcgcgtttctcacttcagacagatgaacactaaattccaaatgattttgggtttccctttgtcaagtgccttcgcgttgatctatcaagaaaggtcggattatgatccgaacgcatgggctcaggcagtaaaatcgtctcgatctgtagtgaagatccttcatatcgtcgccgagatagattttagtcgactcggtttcttcatcttggttcgtcatttctgtcttactcgttttctttgaaagttaaagctgtatcaaggaagctcatgctctccatgatatgtctttaaaaaattgtatgtaggtatgttggcgaatcgtggcacatgtcctgttggaagaagtcaagcgtctcagaacagtcggagatgaggagggttagtttaatcctcttctacccagatcctcaagtcgttcagtaactgaagctgacagtgctggtaatacaccctttgtttttggtgacttgtatcctttttttccgcagaggctttacatatcacgatcgacattgatcgtaagcattgtggatacggaaggaacgcacatagttttgcactattgaccaaacatgtctcccatttttgaatacacagtcatcgttctcgccatgaaacgaattggagaagtctatgcgattgggtaagaattttccgttcaacgtttgtcagacccgctttgctaacgatagtttacttgtttcggacataaagaaatgaacttgtcatttgccagacgtaattccttcacctcgataagcttgcaaccagatgttgcctcatttatcttgcaatcgtcaccctgtttcctatcatctcttcttgttcttatcacctaaatttatacttcataatcaaacttttatgtatataccttattctgatgtacaatgaaatctctttttgagttcatttgtatctacactattgccggaaattaatcttactctaatcgattgaagaatggttgctagtctcatcaaagaaagaataatgtaaatagtgtgcgggacgcaaatgattacgtaactttgtcatcgaaacttgcacctccgcattcagatcgacgtgacaccttttcgtccagcgatgcccacctcttacgttatacatcattcgccttttactaacgatgtcacggagtgcgcatcatatgctgagacttaaagaatttctttccactcctatctagagtataaacttaatcatcgtttttgttgaatgaacttcaccaactcatcgttcgggctaatcggcgagtctaggataagtagatgagcacgatgaaaagaaactgttggttaaactgcgttgattccaaatgccgcgatgctgctgttggacagatcagtagtggtcgtccattagctgcacgtggctccgtcaaacagatgatccatgtcgacaggatctttccgtttctttctgtttctttgactctttaattgtcatatccttgtgtgtaaacggtagagccgtcacttgtggtatctcaccagatagtgtatcgagtactcatcgcttcctctgctctctctacttgctttcagacttatggaatagagacctcaatgtgtcgcacaagatacctcaccaagcccgtcatcgggagaattggggcaaataaacctgtgactgatgagatcttgatgatttgtgttctgagggcaccctcaagtccaaaaggatcatgtatcaaccaccatcggttgaggtcactctcaccatacttgaagcaaagcaaggcaaggcaaggcaagacatatagctcttcgaatatcatatatatatgcagaagataataatcaagccgttctatttcatgttcgatgaggcttccagtgagtagcaagtgttctatcaagtccatcatcaatagaaagtccatatgcttgatgaggtacagatgcttgatcgatggattcttctatgaaggctgttttacgataaccgccagaggcgaaccgagtagaatcgacagaacggaagtcgggatagaaagaagatacaggagcacgggtgaatgaagttgtttctggacgaaattcatgagaaatcctggcagatgacggcccgccttccctatgtaggccagatggatggaacaagcccgagtcatatgctgaagcgggatcaacgtaaacgaaattgtcgaatgggttgcccgatcctctttcctcctgttccgcctcatcgtcatcttcgtggccccagaaagccaaatcttcgtctaatgtataaatccttgtctcgtctgaccgactcggtcctatatcctcgtcttcattctccatgtcatgagaattgtccgcgacaaaagataaagctgttgaatcccaaccgaaacgatcttgttcgaccacgtctctctgtcgagccgagtgaacaggtcgggcatgcccaggagacggaccagaacctacggatgggacagctgaattggagaacctgctggccgggaacagtcgctttggttgtgaggtatcggataagaaatgagcacaagaagctggtgatcgatttgatacagatactctgggcgatcgacggataatcgaccgagaccgaggatacgctcgatcgatagacgagcgggagtaaggagacatttgagaggaggtccgatgagcaagctggcgggctgggttggctcgatcgaaagctcgtagaagaagtctcaatgagtcggtagaatccgaggggagatcgttcaactgaggcgtgacacgttggtgcgatttgataagagatccactgtgagaaggacatttggtcagagcacagggctgagaactagaccgttgaggaaaataagatttctcatcaggaaggagaatattcgggagagcaggcgggacagttgctgaacgaggcggcaagataagatcccaaggattggcatcgctaacatctaagttttgagcaacaacagccgtttcttcgacttgcatctcttcgacttcctccaccttaacttctctttcatcatgaccggcgctcctgtcagattctgagggccaggaaggcgaatatacgactcttctcttcttaacagaatcagttagctcgttggacgcaacagcgacaggagacttggaatgtttccggagaagtcgctcttccttatctcgttgccccttcgcccgggaggacaacaacgatggcacaccatgctcacccggagacacggaggcggaagatctaaaactggacatggttggcgcggccgaaggcgctggcgccttgtgccttgcaaagaaacgactctcagagaacaccaagtctggaactgttcatgaacatggccgaaagtgatcaaacacgaagtcggttgatcagaaatggaatgaaaaaaagaaagaaaaaaaaaactcgaaacagaaaaaacagagaaacacttacttcctactatctttgacgatcctttggcggagacttgagcggacgacattcctttgttaaaaactcctattgtcggaccgcttctcgtcaactgagagttaggacgaagagtatatgtaagtccaatacatacgtcaagttgcatatgcagttcaggagacaataaaatggatggataaacacgcactgtcagccgacctccggacttttttcccagattacccgccttgaaatgatccatcaatcccagactaagccctgctgccttgcccaaatctgcctctttagccctgtttttttctactcgacctggcaattccttctcgcccgaggaattcttcctccgatagttatcaagggctcgggaagaagtggtaacggctgtagctctctgtgttctaggtctgatgatctcagcctttgctcgacgcttctctcttcggtggttgagccctgtaaagatcaacagatggtgtcagatcaatttttctcttgttcctcaagtccactcaagaaacgaagaagctaaggttctacaaggtggatagaggagaagagaaaactttcaatctgaacgtacttacggctacatcttcatcgtctgatcgagcagtgtccggcgtcctcctagacttgacagcgcgagccttagcttggctctttatctttgttttagttgcagacttgtgttctgatctgagtttgggctgctgttgcgattgaaatctgggtctacgcgaagccgatggttggtctggtgtaggagacaacggatcaagttcggctcctttccggatcggagacatgatcaaaagttcttccatgggttcctggaaaacaaaggatgtactagcccggtgcctctttgaggacggagaggagatttctgaaggtacctgggcagtaggttcaagacggctagaaggtgaggcagcggagggttgatcctgggtatatgcacaccaaacagatccgtcagcatagaaactctccagtagacgtttgtgtaacatacaaatagatcagtcacagagcttacagcgatagaagcttcatgcttagaaatagactcctgaaagaccttctctctatccgcccttcccttgagctcctttctcgttaggaggacctcctcctctccgatcctgtcaacccgagaactagagtttagctcgatcgatctggaaacggccttcgagcttccaactccagagttcgaccgttccagtccatttttactcttcattctgtccaccattctcgtcctctccctggccaacggttttatagccgaagcttttgttggatctggccttgcttgggtaatgacgtgttccgccaggacgttgactgccctgacgccttcatgtctgcctagaactgaagcggtactttttgatgaatccctgtaaggaagtggagtatctagagatgatccgatagggtgagtttcgagccagtgggatagatgagctaaaccttgctgtttatagagctcaaggtggggtacctgagaacggataaaggaagctacgcggatatctttggacattgcgtgagctgctggtggatggaccgagaatgcgttcgattgatctaaggttggataattaattggggatgatatggaagagaacaagtatatgtaagagccagttgagcttaaggagggtggtaaagaaagggacgactaaagacagggaaagagggacgacggaaagagaaggtgaacaagagaatgagaacacgcgacagataaaatacctttgtcccggagattacgtcgtcgcgacgatatgagagcgcatacatcgcacatattaacaacgaatattcattggatacagataaaacaagacgtcatttctaagaacgaataaataaatagacaaacagatataccatatgtacagaagaagatatcaatggttgtataccaaagacttggctgagaggttcacacccaaagtctttctggccaagatggccgtgccatcatctatccaacggacatctgagatcaacgccacgtctcctacactctgatagagatcgtctacctcgttgacaatccgaggttcggtgttggtatcgtatggatgaaacttggcgacctgtgctgtaatttcttcgttgaaaaagagttgacctgtgtgaagagtctttttaggtaaggtaggagagtgaatcttgatatgaacatggctgttatcacgtaggacaaaagttagggatagatgataagcatatgtacactttgatgttgaatttttcttagtcttcctcttcgtcgaacagaagacatacgttgttcgaccaaagtaccagcccgggaagatcgtatggaatttggcgataccttcttcgtctgtcgactggatgcctcgtaggaatctcgaggtctgtgagaaacaagtcggagagaagcattctgatgagacatcgaatggtgggctcatttatgttgttgctctcacatcggtaggggtcctgggtttacgcggaccaccaggaccccctcttccccagaagcctccgggacctcctgggccacctcttcctggagggccacctgggccacctgggccacccggaccgcctggatcgcaagaatgataaaagtcagcagacagatgagacacgatcaccatatgatacaggtcatcgagaaaataaaagcttacctctgcctcttcctcttcctcctcctggtggacccatcgcaacagaatcaacaaacccgctgtatttgcctgtatatcgaacaaaagggcaaatggaacatgagcacgcatactctgcatgtttccctacggtcttgataggcagacagaagtttcagcagactcaccattcgcatcgcatgtctgtaagattcaagacgaattgcatcagctcaagttaggtcaatcgacagctcatataagcgtatgacgaacccaaatatctaccgctgcattactcataggaagattagtgtcgacgttaaagacctgaagttccaaaaatagaggaacaccctctcgatcctcagagatatccgaacggacgatgtcagctgggatatagtatggtccttcatgggaatccggagtgagggcgatttggtctttggtggaatgagtaggctcgactcttcaaacagcggaacaagaagtatcgcccaatggatgagcagcgtctcacgattagtatcgataactctatacaggcaagctgtatagcaaaagatgatagatgaaatagacaaactgcattgtggtattcagtgtttgagagaaagaggaagagggatatataagaaggtgatgatgagagggctgagacagggataatgtggaaaagaatatcgatcttgagagagcgtctttctcaggcacacactgcggcaaagggcagcatctctcatgggagtagtgttcgtttcttgatagtatcgacaggccgactgcgaagattgtggcattcgtacgtcagccaagtgaatgacattgcgggtgagaggagtacagaagtgaggtagaatgagttgacctaatgaatgctctggtaagtgtgacctagacgatcaaacggacatcgttatcatcccctagataagatgacgatgtaaaatgggatcttgttcccgtccagaagacctctatcctcctttgaatcaaaagctcatctcgaatcgtctcagtcttcatccaactagacgcatccatatagatctacggatctcatcaacaccacagatcagcatggtcgtcatggatggaacacgaaaggggaatagataactgttgtggttttcggttgaaagattacgtcattgggaaagattacgccggcccgatcgattaaccgagttagccgggcaacacctctttccctccgttgaaactccatcccagccgtcgtatctgaacatacacacaccatcatgttcaccacagagaaagagatcagaaggatagctaatttgagaaatatttcgagatccgtcgggaacccttctcagggctcgttgcttcccattattcctccgccctttgttattcctcagatcaagatccctgcacctccacttgtttccgacccgaacctcccagggtattcttctgctctccatatacttcctcttgcatttcctcgcgcatctttgaactcgacactgcggccggataggcttgatccgaggaaaacatggcttccggtggtagataagacagatcggagagaaggattgaaacgaatcaaagaagaagcgcggaccttgagcagagaggtcttttggggtagggaagggcaaggtaggatcaagatcggtcaagaggatcttggcggaacattgaagatggagaccaggagatttgttaaggatgggtggcagagaagggcaggaggcaagaagggtatcacactgatcgtggttcgtgttttgttctatcggaatgaaccccatctaaagaaaacgtttatgactaatgccgaagttcttgattccctaagggtcatgctaatggacttcattaccaagtgagtagacgatcggatacccatattggtcgtcatctatttcaaacactgattggatgtctcatttggccctccaggactggtacctgcctcttgctaaagccctatcatcgcttccatcttcgctcccaattgaagtcgccgaaatctggtttctcaccaacccgctgctcgatccttctgccggctcgtcattcttctggtcagatctaggccgcgacgtactctcattcatcaaccattaccttcctctcgagatctctcttgatgtacctcacgttctccctagaagaaatcagcctgcaaggcgacaaggcgtgttcggcgttggacacagtttttcgggttcgagtttcttaacggccgagttggaggcaggcggaaaggaaggaaaaggaatctgggacggtctgttcttggttgatgccatggtatgctccatcttcttcgactcagcacacaatggaaatctctaagaacttatggatgagaaatctctaaaacagattctgaacccgaacagtaaagtaacccaagatctattagtcgagcacccacccgatcagccgaatagaatcatgactggtgccataggtagacgggatgtttgggactctatgtaggtgtcctttgcctcttccatctctgtcagttctccatgtttcattcagtcagctaattaattgttgtcaaccatgtgaaacctaaaagtgaggaatgcagaacgtcgctctcgacttctccctttttccagcagtttcatcctacccaatttgattcatatctgacccacggtatctgtcccctcaatgagattaccggattgactacatcgaacaaccgggtgacgctcaaacaccctagatggcttgaagcagcgacgttcgccgatgggaattggggattggttgaaccttgggatcgactagagaaattcgggcatagagccgggaaagactgcaagagggtggcctttgtcgatgccggcaaaggcgggatgtacgttctcttttatctaaactgccatatccccctctcttcctctcttttctctcctgattcgttcaaaatgatctcaactgacatcttcttcctccaatatcttcgacctctcgcattgaaagggctggaagtagggctgatagagagctactcgctggcctcttagcagacaaccctttggtccaccagggaagatcccacgtcacatccacagtcatccaagactcgggccatctgattgtacaagaacgacccatcgaacttgcagaagttttgaagaatttcttagtggatgtggcagaggacgaacagatggcccggaagggctttgaagagagactgtcaaagtccgtctctgaattctcatcgatcgaataaaagatgtgtaggatactgacaccgtcaaacattcttgcgttgcgtcctgtctacccaatagattgtgaacaaccagccatgcggatcttcacctcctagatgaatgaccgacgcgagtatttctccctttgatcttctctgtttctgtatttcgagttgtatagaccgccttctgtgatccatgtttaacttatctatgttgcctctcaagagttcacgatcatcaaactgctctctcacttgcttctgaatcgtaagttcgatcgcttgctaggctcagaagaagcgaaatgaacgactgaacaagatgattagaggggtcgagaacataatatctttcgcgtttcacataaactactaccaaacggggagagtgattccgaaacaaaagagagaataaaaagaggatgaggaaggaaagatcaatgaaggaaagaagaacagatttggttttcaaagggaaaaaggaaagagaaggcgagatatagattcggaaagttgaactactctattggggaggagtcatggcgatcgacatcaacaacttgagcgcagtctgataaagaatgaacagaaaggtaggtgttagtcaaaaagttcttcagcaaggggtgcacaagtatctgaaggaactcaccaaagcaggcaagagtccctcggtaggaacattggtgatgatgttcagaagtgatcggtaagcgtcaggcaagttccggttctccatgttggacgcaacagatcggagctttgcgctcaagtcagccgagatttcatcgttgtttaacttgtcgtagaggacatccaacttggcgggtatgcgctgcaactcctgggcgatctgagggttgggggcgggcaaagtctggatatactcgaacaggaactgaatttgctcaaagatgggcaagttgtcgaacggaatgtgacttctgtctccggccgggtgtctcggaggagccggaggggtagctggagcggccggtggtggtggtggcggctttagtggttggttagccgcaggaggaggcgacctaaacccggccggtccattggatggttgactcgctggcgagggagcgtaccggttcgaggaaggcggcgcggcagtcgacgaagcttggccaggtgggggagcatacatggaagacgtttgcgagggaggaggaggtcgagcagcagcttgggcagccatattggaagacggaagtcgaggaggtccggaaggaggcgacattactcgaggaggttcagatgccaaaggagaggacactcgaggaggctgggcttgtcctcgaaggggaggggggccaggcc

SEQ ID NO: 406 - DNA, 20061 bp, Xanthophyllomyces dendrorhous
ccgctgtagtgccagctcgcggaggaggaggcaatccctgtccgggcgtgttaccacgaggtgggggagggaagaagtttcctggttgttgggattgtccaggagacattggaggagcagtcatcgctggcgagttggggaacggcgaggtgatagcattaggcttaggggcagccgatggaggtctgctgagtccggcctcgccagcttttgtaggaggtgcatcgttccacccagagatgtctcgtcgggtggctgcaggaggaagaggtggagtattcgacacagaatccaatcctcttggtggagggggaacagatacagaaccaggttgagaataagctccataagatccagcggccggctgaccgtatcctccggcctgttggccgtatgcttgctgaccataagctcgctgaccgtaggcagacgtggcgggttgtccataggggctactgttattgttaggcactccgtaaggcccagccgagacagtcgcaggagcagaggcagaagccgaaggagcagttgccggcgtatagggctggtaagaaggttgagtggaaacggcagggataggctgaacggcgggggcagcagtgggcgtatactgagaggcgccaaaggcagcgggagagttaggcctcaatagcttcatgggcacggcgccccgagtgaatgcaggagtcgctccgaaagccgaagtggtgaccgggataggtgtggatgagggattggccaagaagcgctgtctagaaatctcagaatccttaccttcgcacttgaaatccgaaggagtcatatccatgtactttgaggccgttttgaccagaccttgggtagcgagcaggtcagcatactcaaagtatcgctcatacagactggcaagtctgtaggtccgagctccagactcggcaaccgcctcggacgtggtaggcgtagccagatccttgtcgacatatccagtggcgctctggaagacggtgaccttctcaataaacgattgaagagcctgggcgtgagcagcgtatcgggaataatctccagtggcagcgatcaccgcctgctcttcctccttcatctcgtcagcccagatggtgacgaccttctccagctttctggcggctaggtagcagagcatagcattctttcgaagagtcttggccttggctgcggtctcttcgatctcactgacagaagaaactcggtactggtgttcaagtcgctgaccgagctgctcggcgaggttgttaaactcatgtgccttggcaaacgtgcaaaggacaacaaagatttcttgccactcggaaagatcggcgttttgaacgacgtcggtcaaatcatccgacacgatcgactggaagagtcgaaggtatgggaggctagtggtctgtcttcggaagtaggtctccctggtcttgtgtaacaaatcttcaccccctcgggcagccaagaggatcgcatcggcgtatcggtcagaagagagacacagtgaaacagcagacttaaaatctccaaggaccaacgctcgggtaataagtctgtcgacttcagattcatccgtggggtaaatcttgaatgtgctaactttgaggctctcggagtggacagaagaagtggcggacccaacggtggcggcagcagactcggtcacgtcgttcacatgaggaatgttgacatgagtcgggagcgcgcttcgaagcgtacccaatgaggagaagatgtcggcggcagcgtccgtttgaggagttccatttcctccatcgtcagtgaatagactagcagcctcgctagcttcggtttccccttccgttttcttagtagcatccgaaagatctccgatgctgaactctgattcggttgcctcggcctgtccggcagaagtcgcagatacctcggatccttcgagtgcagtggcctcgacggcaggctcggtggggctagactcggtaaggtcatgggtactcttaaacttgttgatagcagtagcgacctgctcggcaacctcctcctttgagaagcctaacagagagataagctcttctctagagtttgttgtgaagagagaggaaagggccttccagacttctgaggcgttgccctcggcggcctttgtcctctcctcgcaaagggaaccgagatcctctttggatccggccactacctgaagtcgctccgctcgctcgatgatgtcaggctgagtgaccaatgttcggatgtgaacggatgcactttggttcgctccagtggcggaaggcagattgctagtagaaactaaagctcctccgaatccgaaagaagccgagatagggcgtctaagccacttgggaggacgttgaagagacaatccggtcgatgcaggggagaggaagctagggtcgttgaagagatcgccgctagcagcgggttgcgattctgagggggtatcactctgaacggtctgaagagactcaacgcttatctttccatcgtaagaagcggtggctagaatgtcaggatttcgagggttccaagcggtctggaatacccagttgtcgctcacgggcaactgattgtgaaccaagaaatgatcggttaataaccgccttatgatatgtaacagaaaagtacactcacttctccaagcatctcggaactctgaggattccagaggattgtcctgttgtcctttccagacgaaagtagaagatccggatcttgcttacaccaggagagagacagaattcctttatcatgaccggtaagaatctgaacgagatcaacgaacagatgtgattagggctagatgctaagaaaacgagaagggaacgcagaaatctacgtactcgctcaggaacttcagaattcttcagatcccaaaccatcacaacaggagaagcatcgtcgtctgaagcggtgatgatcgacattggctataaacaaagaaaaggaagtttgaagaagaggttgagaacatgttctgtgagtaggacagggaacgcaggcactgacattctcagggtgccatagcacactgctcatcgcagctctaccacccgtcagagaagctccaaagccgaggccactcattccacctgcagatccagctcctccataagagagcgtccgaatctgcttgcgactccttaaatcccagataatggtgtagcccgaggatagagatgaggcgagaatactttgatgttgggtgttccaagcgagtgaggtgatatctcccggtttgctgggggtagatccgggggtgtaatgagtggaagtggaagaaagtgagttcatatcccaaataaagatctatggtgtgtcgaagagagaagtaaacagggatttgtatggtcagcaccaaacttgaactatgtgttcagtttgtctaggattggcatacctccccatcactagaaccagaagccagtagctgcttctttccatggttgaaatctaatcctcggacaggtcctttgtgtctagtcgcctggaaaacagtagaatccgacaggctgttccaatccggaggcaaaggagacatcgtcggccggcgcgtcgacaacaagagagccagtaaagatgagaacgagatcggagggaacgtacttggaacctcccaaaatctttgcaggatcataaactgatagttctccagtctccatgccggctaccagaagaccatgcgagcggttggcaataggatttccccagacaaggcggttgaatctagagccgacagacgagcgatcgacaacgagtcggagaggaagtcgatcaatataaatgtctagcaatgacagaagaagaaaaagcgggccgagaagagatggcggtagattgggaagatcggaaagatcgtgttcaaaattccgtttctccatccatttgagccaaccaactatacttccaaatcccatctcgctttttttactttctattcacatacgactagccagcttaaagctagtccagtgaataggagaacaagaggggaacctggaaactgacctggagttgaccttgaagctcttgatagatttcaactgatttgtaggcttgatttctgccaaaaagtcatcctcctcgtcttcatcagccccgccggccgtctcttcaccggccatctcatctattccagacttgtccctgtcaccatctctctcttctccatcgatcacgtcgtccgatctctcggccgactttctcgttccatccgggtagatatcccagaactccagaataccctcggacgagaaggactcgtcgagggctccagcggcggtacctgttgcgaggatgggtagggatgaggacgaagttccccaggcgaagatgcccgtcctagggatatcgatgatcttggtcatacggaaacctacgagtggcgagaggaaaagtaaggaggatttagttgtcttccgtagagaaaggagagcgtgggtctgaggaaaggtatgggtatgtggggtgttttttttctcttgttaaagaaggaggggtggaaagtgatgtagaagaaaagagagatgttgagagagagggcggacagcaaggcggcgatgattacataacacggttacatggttacaccaacagcacgcaactaggcacttctatacgttgacatacatgagagcacaggcagaaacattgatagatctaggagaaccacataaagaataataaccaaaagaacaagagagagatcacaacgagtgggaattatatgggaagagactctacgcgtagtgattctgatgaaggacgaaacgagagcacaagaccagatcagaacggtttctagagagcgaagatgattgattcgaacggataagatcactcacattaagtgactcgtaaatcaaaaagattagtgcgctactaggcgccgccctggctacggtgattccacacctgatggaaacaagaacaaatatattgaagaagccccaaagacaaagtatgatcagagtttgtccacatattggtaccttgtgaaaagatatgaacacaccctgcgtagagacctctaagaccacgagccttgtagatttctttagcggtacccatgaaagaaggttggcgtgtgagatcaggtcgaagctcagctgcagtctgtagggcggatttgacagtgtccgcagggaacaggacgacttttgtaacatggagaaatgaacaaataagtcagtccaaaaagtgatacaagtacgaaaaatatggtgttgcaatgtgtcaagaaatgagtacttactgttatatgccattccagctgcacctccggacacacagagctcccaggctttgagatccttcttggtcaccgagcctttgggaaggccctgctgggattctctaagccgcatgaaagctctgctgacaatctcgaaagcagagaaccaggcgctcgacccaccggtctctcggaggagcgtaccggactggccgagccagaacccacggagaccggtctgggcgtaggtttgcttgatgatagtccaagggcctggcaagcgagaaaagtctggcttcttgcctggttgaacagaggacgacgaggagagtagaccttcacgcgagagaagggtaacctgcatcttgactttgataagctcgattggtgttctaaatcgcgcaaacaccagataatagtaaaagaccggagaagaagatgtgagcatgctgtgggtgaatgagaagaaagcacgaacgcatgcgcagcaaacttacaacacgaaactagcgatgaagccagcgcctgccgcggctattgctaattcccctatgcttgctacctccggagcgttggcggatccagtgtctcctttgaaagaagttatcgctttttggatttgattatagacaagaaacagggtcgcattctcaacggaggcgccgactacaggagcacttagaccctggatacacgttcgccaatccatcatgaaacgcgtcagtcattcggagggatcagaacgcgccgaggagagacaaagctgaagatataaagtcgcgcaccctgtagagacctcggattccttctttagaccaggtttgcttaaagcagtccaatgggcctgtatatctaagagaaactcaagaagacagaattatcgcgtcaggctatctggtgcagcatcaactcacgaatcaggatacggccagaagcaagacaaacctaagcgcgctgtccggtggttgagattgtagacgaacctattcggagagaacagaagggaaacgacaaatgtcaaccaaatcagccttctaaatcaaagaagaaagaaaagaatttatcgtgaggagaactcttcttcaagatagacacaccttgcacaaatcgaacgggtgctcaaacacctttgcacaggatccagctacggatccaaaggctagatccttcaactgttgggactgagacccttccgggattgcaacttcagtcatcgaattccgaacagggtccttcagctgttggaacagagtcaaagaagaagcgcgtgtgatagatgaggaaggaagagacagagagagtaaagggaacctaggcgatggatgatgttttttttgttatcaagaccgagtatgaaatcgctcgaaataatacgtattttttttgcaataagatgaacccagccgaccctactgaagtatgttagggttatatggcatagagcgatagcagatagctcaaacggcaaatggttgaatggcagaagagactgccaaaagttaagcgaagaaacgaatgacgtagaggcagttggtgaacatttaggtaaagcgaaagaagcaagaagaagagtgatacaatgatcaagccgtcttggcgctgccagaatcatttatctcttacgttctacaccaactgaggctgtcgcttttctacactgttgaattagagagtccaaagaatttgccagcctattcggccggccaaccaagcccaactgacagactgaccacctagcctgggaggtatactgcctgaatcattgattaacttgcttatcaaccacccagggaccactccatccgacctcggcctggatattgatgttgagctacacagccatatagggcagcgaatgaatgataacacgtggacaattcacgccacaaaatcttgcacagctctctgggctgtgactcgtccaagctggatgactccctcaacgtttctctcattgttcgcttaaatacacaagaactacttctttcacagctcatccttccgaacaagtaccacactcttacatagcatagctcaagaacaaaaatcaagatagaaaaccattccagacatgcccatcaaaggactcacttcgccttatccttcctacccggcccacttcgatatcgaggctatcatcaggcctaatattctctcgctcgaaccatatcgatccgccagagatgactatgatatcggaatccttttggatgctaatgaaaatgcactcggtcactctatccctgttcgtctcctatctttgtaacgcgtacatcctaattcgatagatccgtggctcacaacgaaccgatcgtccgctggccgtcacttttcttcttaccatatgtgttcttacagacagatgacccgacattgacttcgcttccggctggtgcgaatctgaaccgatacccatcacctactcacataccgatcaaggctcgtttggccgagctccgaggactctcctcgaccgatcacgtcttcctcggcgttggttcggacgaagtgatcgacttggtgatgagagtgacgtgtcagcccagacaagacaagattctcacttgcccgccaacgtacggtatgtacaaggtcaccgctcaggtgaacgacgttgaagtcgtcgaagtcccgctcatcaccgatcagggaaagtttgacgtcgatcttgaggcggttagtgatctcttttgtgctcgtttcactttgaccacatcggctcattcttctctgttctcgattcactatcaggtcaacaaagcagtagcttcagatcctaccatcaagctcatcttcctttgttcacccggaaaccctacaggaacacggatccctcttccgaagatcatctcgatcttggagaacccggatttcaagggaatcgtcgtggtcgacgaagcctatattgatttcgccggagaggagaaggaggtgtcggctgttagcttggtggagaagtatggaaacgtgtgtgtcagtcagacgctcagcaaaggccacgggttggccgccattcggttcgtcctctctcctcttctctcctgttcacacacactggatgtaaagatagaatactgacggcacactacgtatgatcatctataccaacgtacgtagacttggaatcgcctattcttccgcgcccatggtccagattctctcaaacacaaaggctccctacagcgtttccaccccgactgcctctctcgcgctctctgctctctctcctcccgccatccagacgttccagtccaagatttctcagttgatcagaaaccgaacgttccttctcgaacagttcaagtcgatccctgcactcggtgccgtcctcggtgcgaaccacgccaactttatccttgtccaggtactcgacggacccaacggaaaagttagcaacacccgagccaaagaggtttatacccggatggcagagcaggagagggttgttgtcagatttagaggaaacgagctagggtgcgaaggatgtctcagggtcaccgtcggatcagacgaagagtgcaaggtattggttcagaggctgactaaggtgctggcttgagaagtgttttacttcttagacaagctcttcatgttgaaaacgtcgaatatatagaatgtttagatgagattcatcttccttagctttcttagcttcagactggttttctttaagcaggcaacaaggtcaacagcagcatcatacaaacatcgaaagatgatggtcaagagaatgatgagaatgggtgttggcttgccatgttgatcgtgtgtcgtgtgcatttacagataagattaatgccatgacgatttgattaaatcgacattcttccatctatccaaacactcacccgtcttcatcgtcatcgtcaccttcaccttcacatatacgtttgcatccacatccacatccacatccacatccacttccacacacacacacacacgaagaaggctgtaactataaacacacatacatacacaattcacaatcaacaagaaaatcaacgcgaatagccaacatcccgaggatgacgatcccccatacgcctttcctcccagcatccgctccctcaaccggtccttcctcatctttcgcctctactacacctacccttgccgaattgaatctgctcaagaacaaagtcataggagatccatcttacaaacttatcgtactcggtcaactgcctatcatccgctcactcaccggactctgtagattaaacgcaagcgggcctggtggtaaggagtcgatagaacagagagaagctaggttggaggccgtagttatcatcggttcattaactcatagtgagtaatcaatcgatattttcaacagatcactcttcgtactgttggttttcggtaaagaaagaacgtgttcctcttacaacgagctgaaccatcttctcccgctgtcctgtgtttacttgcatttcatagccgccccgagtgatttcattcctgccgtctttccttgcgccgatcttgtatccaacctcctaacatctctctcagccataccgtccgacaagctgtttgatgttcggaaactaaaagaggttgaaacagttcttcgtacggtagctggtctaggccgagtcataggagaatactgtggaggagaccgatatggtaccggtgtgaatctggaagttggagaagaggacgagcgttcggaaagaatggatgtcgatggccaattcgaagaggaggaggaagaaggggcagcgatcgagaaggagaaacaaatacgagagcttgtaggcagcaggatagcagagttcttgagcgtaggtctcctcattctctcttcctcttcctcttcattatacacgtgcactgtgctgactgactgactgactgataattacgactacgcccggaaagcctacaaatctatccataatactctcttatgtatttgtgccccaatcgtcatcccaaatgacaccgattcaacgacgtctgtacccactgatcttccaactgcttaccgcactcatccaaacttcgcatcatcgacggactctgaaagaatggtgctcgcttccgcttgaaagacctttcgaacgactcgtaaaagatgacatgcaagtcttgccagacccaaagacggaagaaattcaaagtacaaagtttttcgtcggcgagctatccgaggtattgttaaagacttttaactcagatggatcgaaggcctcaatagagatggatgttaaggtgagttgtctttctcgaggaagctgttctcttgagacgatcgcgcaggtttatcctcagtcttttaccgagattttatgcttactccgattttctcgtcttgtgacttaaaaattaaacaatcacaagacaacggttgctgcattggagctcttgacagctttgcgaaacactgaaaagaatcaagggagtcttgagtatatcgtcgagaaccatcagagcgacactagttagtacacatgtcctcatagcgtttcttggtatcgatttaaagacgtcactcattcaacgtgttgtttcttcgactggggctgatacctgacgtaacagttgacgatactcatccatacttatcaaatgagatagagtctcaactccttcaaagcaaacactgtagtgttcgtttggccagcgcgacattgtatgtggatatcagctccctttcaatacagcactttgattctgttgatttactcaactggtaattatgatctgtctttttcggattatttttggtctgggttgagacagcgcttgtgcggaatcgggtagcacgcctaagagagcggtctttgattgtttcgccaacctcttggagagaggggtaccagaggaggagagagtcaaaacaacatttacgataggtgcgccttcctcgtcatggccgtcctcatttttcaactccattagagctgatgtgtctttcttggccatcactaactatgtacacagccagagtcatccacagcaaacatcatcagctgatggaaaagttggctttggaggcgggtattcttccgaagcttggggttgctctttgtactgattcgggtgacaaacgggaaatccaaaggaaactaatcagtttggatgaactgaaagtagctggaagggtggttgtgagttcagccgaggatgagaaattgaaagccgagtgggagcgattagtaaaggaagatgttggtgggttagagtggaaggtccggttgagagaggtctgtatcgatttcgggcttctttggctttcatgctgtttccgtttctctacaacgcgcacctccaactaatcgtagttctatcgttcatcatatcttcttttctcgtgttagggtgtcttgactgccctcgctgcgctgtcttatcaggaccagactattcgacagcttgttctggatttacctctcctccttccaatactacacacctctctaacacatcctcactcaacaggcattcgttcagccgcgtgcgagcttgtcaaatgcctctctcgatcagtctcggtgctcagatcaagcctcgttgactcagggtttgctattatcctcctagagctactcgaggcagatttggccacggcatctagcgtgaaacctagacgatcgcatgatcggaagtttattggagtcagagcaaatgccctcggaggcttagcgaactttgttctagagttttcgccaatgaaaacggtatgggatttttttgtctgatctatttctaaaaacttgtgttcgtttactcagttctctgctctactctccttgcgattgtctttcctctgcatatcaaatttataggtcctcctagacaaaaatgctttgtcgaccgtcgttttctattgccaaccaaaccaaccgaacgttgttcgcttgcctgctctgcagatcttggtggtgagtttaggaaattatttttctgctcaatcaacagatcaacaagagcgttcttgggctgtatattgagaatataatcacataaataccgaacgataaactagaatatggcttatcgatcaagatgggatgtcaagtccaagatattgcaagctctcgctacaatcgatgtgaagtgagttgctgtctccgtccctctttcatctatgacttctctctagctctccttctcagctcctgtttgctaatctctcccgagtgtttttttctttcctttcactatggtccttaatccaggcaacctacttcaaccattggcgcgttatctgtcgagcccaatgatgctatcatcgtccgatacctagctgttcttcgaaatattgtcagcggtaatccgcatgacaaacggcgacctccgttggtgacgatctatcctttcaaccagcccggtgcgatgagtatcctccgatccatccttgagcgagctttgcgaatatccccttcttgggaaaacagcgatgtgcttattttagcatcgtccgagcaggtttgtctgcgcattctctgttcgatctccatctgcgctcaccgaggcttttatttctgccgttgcctaactaaactgatgagtgatttcttcatcgggtctgaataggcggtaagcgttcttcgaagtatgcttgatgtctgggatgaaaatctcttcgactggatagttcaggatcgagatttggtcgaggcgtgtcgatttgctttagaggttgccataggggtaagtctcgcccatcacacgcggttgacaaggacgaaaattttgatcatccttttccaatggtggttgattgctaactttctctctttccttcgcgcgcttttgttccttcattgttcggtgtcaaaaatgaaataaaacaaaatggaatcttatgatagaaccgggagaaatcggtttcgtcgtctatagtggaattccttcgcaggttgaccacgtcttgcatccgtcacaaacctcaagagtaccgtatgtctgcacccgttcattgtttcgaattgttctttctattcaatcaaagaaaatatcatacaagacttgaatctcaaatccaaaactttttcttcttggaatctgatgttcattcggggtttcaagaggataacttcctcccccaaatgagagaaggggtctttagcaagcatcagattgttgatccaacagtcatgtaacaacgtcactcatcgtatatttaatgacaggttaatgatgaacaaacaatagcgttgtacaatctctggacaaggccaaggttgatatcatgattagacacgaaaggggtcatgaattggagttcaggctacccttcttggtccgcaagtgacaaacctacgctcctttaaacacacgcgtgcatcccaaccttctttatcctgtctcacatagaaaactccttcgttcggctttctattcgccctttgaaaattacccgacgtctgctccaccacctctccctccgccgtatcccctgacgataggacctcgttccgatcgatccatcgacgcggaagtagccagatactttgtgtatagtgaatctacgaatacaggatccgtctgttcgtcagaacatgacccataaatccaaatgctcgaaaaaaggtcagtaaaataaatcgtcattgcgggaatggcttgctatacggacctgaatcagtcttacgacctggttcataaattctgtctttcccaatggagcagacgactgtgcttgaaaatcacccgattcgcgacccttcgaaggaacagatcttccgacaaacgctagcgcgacatctgattgaagcctttgcgagtcgagggtgtatccattcggtacgccagaaggagccggaggagggaaggagcttgtaggagcggcgcgagactgttgtaaagagggctggtttgcaggatgaggaggctgcataacctgaggaggctgaggataggaggatggagggggtacaccatgatggggagcgtacatcaacggttgagaagattgaggaggagcaggtggagccattgacggctgggaatgcactctagccggtgaaaaggtaggagttgtttgagggctgttgcttgccgaggcaaacaatgcttggagtaaatcgttccccttgaggttggttccatttcccggtcgggagggactcgtggggggagggacagatgtccttgatactccgaccgaagggtcagacggcaagggacgtaaaggagaagccggtatttgatgttgatacgaagctaacggtgggtgagggccttggggtattcttgaggtgactacaggagactgagaaacaacaggttgtggcatggcagacgaaatggaaggagatgagagccgattgagaatttcagagaaagaaagagagccattggacgatggagcaggaaccggagctgatgcagggggttgggccgtaggaggtgccacctgtgccggggaaggtagcggtggagagacgggtatacactccttgtctcgtagtctgggttttggagattcagcccaagaagaaagttcagcaactaggagcgagaatcatgctgaggatctttctacgtacgaggtcatgaggtccagcagttttttgccttcagcttcatcatggacccaaataccagataccttggctgaggagaatacagatgaggaaacataatcacaacggttaaggctctgtgacataaagtcgtagaccaagaaagcggagacaaaagaagatgaaactgaccatcagccccttgtgagccttgctcattgatcatcagaacttttccctgaatgtcaaactcagtgttttgggtgataggtctgacaaagttgtttggtccgtatctgttcaggataatgagccctaacggagggtttgaggatctatgagagagcagagagagcgaaccatcagtctcactaaagttggttgatgcatgaggtcaaaaaaagaaggaaggaaactcagccggaccttcgatagatgaacatagaaccctctataccctccttcttccacgaatcgtcgtggtaatgatacagaacaacatacgtcgctgaatcaatgatagaagagatagacgtgtcatgcctctgaaggaccttaaggttgagaggatgagctgccatcttcgagaaagaaaagccagtcgatgatggtgatgataacggtgatggttagcggttggagcgtcactgaatttctctgttccatccatctcccatcacacccttcgaatccttaataaccatcgccaccatggcatcctcatcatcttcgatagcacagaagacgtttgagttagttaatgatatcaagccgcttgatccatctgacgagatattcttgtatgattctgaagagcagaaagcgatcgatcgagctgctccttggaagcaagagtgagcgcttcctctttctctcattgtgttctcaatgagatataaccatgtttcctcaagacatcatggcatgtaatctccttcgtcgatgtatgctgatctctcgatgtctgactctctccttcaagtcccaattattttacagaggtacgcctcaatgacctctcttgccgtcacaggcgccaatagaacagaactcactcagacagtgacgtccactggtttctacattcaggttcgaatctcggccatcgctctgataaagatggtatgcgtccgaaatcttgatctctctactctttatgtttgtatggccatgtctgatatgctttctattgattcacaaggtcatccacgcgcggtcaggaggaatatatgagatcatgggtctcatgcagggtaaagtggtcggtcggacgttctgcattatggacacctttgcccttcccgttcagggtacagaaaccagagtgaatgctcaagcggaagccgatggatacatggttgaccatctgagtggaagcaaacaggttggagttttcaagccatcaccgaatcatggctgttttgtgctcacagacaacttgtgtttatcgtgtcgtctggattgcgataggtcgatcggccggagaacgttgtcggctgtaagttttcctatcatcttggcgcaagattagttcatcttacagattgatataaccttctatctcccttttgatttctctttcactttcctggatacttgaatcaacagggtaccactgtgagcatatatgcatcttgctctgcctatgaaatcgaaaccccactgacggctggactatcccttctcagctcaccctggatatggttgctggctgtccgggatcgacgtctcaacacaatttactaatcaacaataccaagatccttggctagctgttgttgtgagtgctcgatacttggagctcatcgtttaatgcagtatggggtttgattctgatgagtctcacgatgtattcgatgtctcagattgatccgaatcggactatctctgctgggaaggttgacatcggcgctttcagaacataccctgaggtgagtgctctgctatgataggtaaaggaattttcttcacaatctcagtatcaattttgacctgtcgatactcttgtgtttccatcatttacacactcttgaagggctacaaatcctcgtcgtcatcgtcagcctatcaatccgtcccattggacaagatcgaagactttggagtacatgcaaacgaatattacccgttaaaagtgtcttacttcaagagttcgctagataccaagctactcgatcttttatgggagaaatactgggtaaaaacattgagcaacagcccacttgtgacggtaagtgttggggtttctcttggtgctatcatcactctgtgttcggaagtgactgacctttggaatgtccgctggttatttcctatcaagggtcgagcgttccatgtcgaacaattgggtgacttggcggccaaattagatcaagcgaagtcatctctacagactgcgagccggccttcaatcatccctccggccggcaaacaaggaaagagcgcatcgaccggcaggactcaacttcgagaggaggaggagaaaacggctttaggaaaagcggtgaaggacaggtgcgtatcccgcccgtcggtgccatatattctagtattaactttactttgatgttggttggtttattcgcggacccaagtacgaggctggcgatggagactcagcatgcactgatggctcaagttctcaaagatcagcgtaagtcgcacgttgtcttgccattcggattgatatccaccagtctgatcctaatcatctctgtgttcacatcttcttcttcacatagtattcaacgctcctcgtatgacccaggatagctcgactgcttgaagagaaggctgatctagaatcttttggctgggatcgagacttgaatctacctggattatatatgtattacagctgtgacattggtatttgcttgtgtgtctttgagtcggatgtggacatgtgtggcggagacgggagatagggtgactaaccgaaacactcttagggcgctctccgtttcttcttctccattctatccattctattacgaacgacctctgtctatttgaaagtcagttgatgagcactgctaccactcgttccttcctcttgcgaacgagagcctgacctgttatctgtatctctataagtcacgattctccgaaagaaaaaaaagaagaactctttttgaacaatgtcttttggccgaccaggaaacttggtggatagcttcaacgtgagccctccggagaaggggtcttttccgctcgatcatgatcgttcgttttgtttcatcctgtttggtactgttcttctttgtatgatctgatatcctgacgtgtgagatcctcttactttgtgtgtcatgcttctctttcatttcgacttgatatcttcgtctggtctggatcggtccggtatggggtgatttatgcccgatgaacgaaatcggtatctccagatgattgctctccggtaatgaaaatgtacctggcatgtctgaaacagaaccagatgaagaacgagaaatgtagggtgttgagtaagcagtacctccaatgtcgattcgatcagtaagtctattgttctttatatattggtcgattgtggaggacggtgatgtctcatggatgtccgcctgatgtgaatcctcgtccataatttagtggcttgatggagaaacaagattggccgtctcttgggttccctgaggaccctacgacgatgacacgttctcctacgtcaaccgcccaacacatcgatccgtcctcctcttctacctcttcatcgacaccgacaaactctctaccgactccagctcgtgggacgtcgggctctcctcttgaattttcgagtcctccgatacctgactctcttcgtggacctggtgagttgttggatgcgggtatgggaacaggtgcaggcccggttggcgtgttaggtggtcaacatggggcgggaggtcaataatctcaatatagtttcttttgaggatcaataaaaacgatgtgacaacctgtgtgtacgagagcatgctcgtaacgtatcaaatattgtctttcgccctctgtctgaggttgtgtcgtggcttggcaaagatcaggcaggcaggaaaccattcgtcaagtggtcattgtatagaaaggacaaagggatagacaaaaatcaaatgtaaaaaggggggttgcgggagtgggatgaaaaagacactaggaatacaacaaagggcctctatcgatcacaccagctcgaaagggagaagaaaaatcaaaccaaaccgaaccaacaaaagacatatattaagagaggaaagaaaaggagaagaaaaggagagcacgtttaagctcgctctcctcggagtcgtcgagcaagctggagatccttgggctggatagtgactcgcttggcgtgaatggcggccaaattggtgtcctcaaagagagagacgaggtaagcctcggaggcctcctggagggccatgacggcggaggactggaatcggagatcagtcttgaagtcctgggcgatctctcgaacgagtcgctggaaggggagctttcggatgaggagctcggtcgacttctggtatcgtcggatctctcgaagagcgaccgttccgggtctggagagaagcatcgcaagggcatgtcagtctgaggttactctgagcaaagagccaaagatcaaaagactaacctgtatctgtgaggcttcttgacacctccagcagcgggagcggtctttcgggcagccttggtagcgagctgctttcggggagcctttcctccggtagactttcgggcggtttgcttagttcgggccattgtgttctgaggttgatggatgtaggttggtgaggtgaagatagtgtttgagggaaggtacgctggtttgttgatgattggtgaaaggaagaagagaaagaggtggtcaacgggcactcgactctttatggtcagcctcattcttgttcatctttggtcagtttttttttctcttctccgtcaaacatgcgctgacgttgacgacgaaggaaagagaaggaataaaataatggtgataaaatgatgaataaatttgttttatttcgacgcgacgcgacgcgatggattcacgcgtcagacgcgtcaaactagggaaatgcagctgaagactagacattgaactatgagaaattctaatgaattatccaaagacaaaaggccgcgtggcagaatttctaaaacgcgtccattgacgcgtctccggacgcgaatattctcgacgcgtttccatgacgcgctcagctcacgtgcacgcgtcaagagaccctggggcacgaaaaactgtttaaaaccagagatcgattcttcgtcttctttcttctttttccccatccctcaacttatgccttcaaagccaaccatcccttaacc

SEQ ID NO: 407 - DNA, 9248 bp, Xanthophyllomyces dendrorhous
cccaacccccaaactaataacaagcaaacatgtcgggacgaggaaaaggaggaaaggtttgtacatttacgcgtctctctccctctctttcttcgtcatcactttcctttgatcctgacacgcgtctctttcttcatcaatctctttatagggactcggaaagggaggagccaagcgacaccgaaagattcttcgagataacatccagggtattactaagcctgccatccgacgacttgcgcgacgaggtggagtcaagcgaatttccggtctcatctacgaggagacccgaggtgtcctcaagttgttccttgagagtgagtttctttatacatctttcgatctttcccgtttgatccatctattaatcgcggctgtatcttttttcctgttctcttccacccagacgtcatccgagactctgtcacctacaccgagcactcgaagcgaaagaccgtgacggctctcgatgtcgtctacgctctcaagcgacagggccgaacgctctacggtttcggaaactagaggaggagatcattcctttctctcctttctgtccccgcctttgtcttggtctactctactacgtcgtccacggacggtcgcccgcagccttaccatcctttgattttctctcgacttccgtttttccctctctttcggctggaattcttagttgattctctgaaaccttgaattcggggtttcttcatatatatgtgtctattgttgtacattgttcataatcagatatttgaaacaaacaaacaaacaaacaaaattatcagcaaaaagaaacaaagaacgccaagtaatcgcattgcaaaaagacaagcaagatgagagaaattgagaatgaaaccacccctgttgcgcgcaaatgtcagttgttcaaaggagaaaaaaaaagacatgctcaatcatacaaatcatttttctgtaactgtcttgaatctccgaggggataggcttagcgaagagaacctgatgggaaagttctctctttgtctccttcgccaatgggtggtctgtccatcaaacgggatacgttcactcgtctttgacgaagcaaagaaggagagggagagagaaaagcttcccctgcgtgcaaagatcagatgtttgaagaggaaagcttatccagatccagatgcagaggtagaagatagagagacaaataacgttccatcatagaagcatgtcaacgatcggtcagaaagtggacgtatatacagctagagtgagagatacagagattcaaatgggatttgatgaagacaaaatccaccatggtgtgtgcgttggagtttaagaacagatccgagaaaagacagtcaggatccaggagaaccctgggcttgacaaatgattggcgagttgcgttttaaggagagaaaagaccgttccaggcaagtgcagggcaaggcgagacgcaaagagagatccttggatgtacgcggatgtgataaagattataaatacagaatcgttgaatgaatacagcatagcatgaaaggagggacagttctttagatggtggtctcagtgttgaggagaacagcatcgatgacgtgagcgacctgtggaagagcaatccagcgggtgtcagtaaacatgcgcgcactattcatcttctgttctcgatatgctactcactccgttctggatgatcacatcagcctgaacgatcttcgcggtaaagttgccgctagtgacgaacgtgtcgtttccggaggaagagaacgtgaatgactctccggcaaacgagtttgcggtgagcgagaggttggccgcaatatcggtcgagtagatgacacttccagaaatgaactgtgaagggtaaagtaccagagcatgaagaatcagcaagtgggagggaaagatggaaaccggtggacaagggcatgaagaagagtaaaggtaagaggaacgaacatggttctggaggacggtgacggcagtcgaagtgttaacagaagcgatgatactggacacgttggagacagcagcgtcattaggcaagaagatggtcaactgaaagtcgaggaaaataaaaggtatcaggatttggtcagattcaacatgcgtgtctgtacgaaagaagcaaatagaagggggaagacggcacgtacaccctcgatggcttccaaaggagcgacgataccgaccgaggtcgccaacgtggtcagctcgggagtggcgttggcggcaaactgggaaagagaaaggggcagattgaggacctcgtcgaggccgatgatgtggatgtctccaaagtcggaggccactctggaggtgatgttcttgagaggagcagcgacctcgagtcctccggtatcgttcgagaagagaacgagagcctgggtgctatgaggagagaaaaaaagaacatttccgatgttagaagacaaatcgcgcaaaacggggatgagaatctagtagagagagagagagagagacgaacaggttggaaccaagtcgagcgtaagatccggtgagcaaagtctttgcgatggtgtgtccaggagcggcagcggcaactcgctcggcggtgtagtagccctcaaggatgtggtactcgaggacctcttgaagctcggtggtctgtgaggagaactaggtgtcagtctatgttcatgtgatagaattcggcaagacacacaacagatggagacgaacgttgctcgagatgttggcgggcactccaacgaactaggcaagatacataatcgatcgatcggccggtgagcatcaagtaggaaacctttcttcctcgatgaaagaagccaagacactcacagctccgttggtgggcgccaagagggtcaagtttccactggcctggagagcggagagaataccttcggtgaaactgtatgttgcagccgtccgagagcgatcagccacgtgatcaaggggtgaactgcgggaaggacgtatctccttctccgtgcaggatcgaggggaaccaaggggaacagagagaaagacttacttcgtgttgttctctgcgacggcgacgatcgagaggacgagcgagtagtactcttcggcccacaatgtgttgaggctgtgcgattcgtcaatcgatgtttgaatccaaaagtcagcaagggccaaatcaaagagaaagtgatccagagaaccaagagccaaaagagaaagagaaggacacacagagcggagacggtgtcggttccgttggtgaacacggtggcgttgatctgtgcagagacgagcgatccggcaaagaagacgagcggggcgatgtattttgagagcatcatgttgttgagtgttgtactgggagagtttcgattaaaatgtaagcgagaagggagtttcaaggggtttattgtcttcaaccaaagtaaggttcgataggcgcgagggactgaatggaatcaggaaaggaaggagaaggagaagaagggatcagatccttgatcgatggaactggatgagtaggtttatatacagtagaccaaagagaaagagagagaggaaccgaacagaaagtttaaagccgcatgacgctatcgagagtgatgcaaccagaacgaagcgcaaggaggaggaggaggaagaggatgtgtgcgatgtatggtgtgttcctctactgtgcgcgatatctctctctctctccacaccggatgtctgggcggcgaacggggaggacgatccagtccgttaccgttgtcgtcatcagccagcattggcagcactgatgatagcagcatcggcagcacaccacctccaccttgatcaacatcatcaccgcccgggcatcatcgggaaggttaattcggacaatgattttcttttctcttctcttctcttcttctctcttctctcctatccttccttcgctttagtcttcgtgatgccaagaaatgacgcgacatagaatagactccttgtttcctacagtctggcttccaccgattccaaacccagctgagactcagcccaagcctggcttgaagaacaagacgaggctgagcgcgagatagaatcgagtggtgggatcaacacctgtaagaatagctgcaatgacactcgtagtgacaatgatagaatcagcgtattccaggaacagccacagccaggtggagcagagggaggcgaacagggcggttggagtggagtgacgtcatcgatcgagtaggccgtcagcctttctcgagttacatccgaccgttgatatcattatggttatcactataagcaatttttcgggcgatccttctcttttcgattcctctcgagactttttttttgcatcctattcgtcttctttctcttagtctttgatccccggcctctatacctggggcatgatcaatcaatggaaacgttttcattcactcggcacgatttcaaaggagaatagaaagagggcaaagaaaagaactaggcgcgaacgtatcatcgggatccacaagtcttggatcttttcgttcggcagctctgcttggcagaatgactcatccatccatgcgctcaatcattcgctcacactaagggttattggaaacaaaggttcatccatcgatcgagacaaacacccgttgtacacacaaaaaaaaattgacttttcttccatccttcctccttctttcgctcttcatccatctttctcatccataatcacacacatacacaaaagaaaattgaaaagagagatatgaaaagaagatacttaagagctaaacacaatcatttctcaactctccatctcttttttgattccatccgcccgcttaatcccatccgggagctcctccggcagcagcctcaccggccggtgcaggtgatccagcccggtcgatagggctccttgatcgtcgcctatcgtcgtagacagcccgggggcttccaccggcagcaggagcggcctcaacagcctccgcagatcgctctcttcgtcgaacgggcgatcggtcatcccggtctcgtcgaggagcgggtgatcgatcatcccgctctcgatcccgtcgaggagcaggcgatcggtcgtcccggtcccggtctcgtcgaggggatcgatcccgtcggtagtcgtcccgtcggtcatctcgtcggtcgtctcgtctgtaatctcggtctcggtctcggtcgtcccgccggtagtagtcgtcccgtcgagaggaccggtagtcatccctattcgcacaccaatcagatcgttagttcagtaaaagatagtgatgaaacaagaaggaatgagaagagagacaaaccggtcgtcatgtcgtcggtaaggcctggcaagagaaaaagaaacacacaagaaatccctcgtcagccacctctgattttctcacagaagagaacacgagaacgtaacgaaccggtcgtctcgcctgtcccgatcatctcgtcgggagtatccttcgtcacctcggccaccagctccgaaccggtcggcctaagagagaaacagagacaaagagaattgtgtttaatgttcggttctcaacgagaactcttgtagaaatagagaaggaagaagaagaaacaaacgtcggtaccgacctcgactcgagcagagatagggtttcctctaagagtacgacagaaaaccaagtaagcgggtagctcacagccacgccccagaaaaatggatagagacaaaccggatggtaagaccctccaactttcggacagcctcctcagcatcggccacagtcgggtactcgatcacactagaaacaacaaatccggccaggcagacacgagtcatacagcgcatacattgcttcgtcagttatagttctcatatctcatttctgaaaagagaacaatgagacatacccctgaccctcgttgtctcggtcgatatcagcataagacacatctccaccttcccgaccaaagtccttgagatcctgttgaacgggaaatgaagcagtccacagaggaagcggtcataccaaaccggccgaccgaaggagagaacaagtcaggatgccgtccgggtatgtttctctttcaagatcagttatcgcatcgatggtcaagagataggaagaggagcattggaaagaggccgcatgccgtacgccaaaagtgggaaatccagtgggcgaaaagggaaggagccatgccttgaaccaaagtcgacaaggatcgctgaccaacgccgtcctgacccatggaatgaacaaaggagaaacagagcgccgaacaaggtaggaaacgaaatgactccgctcccggacaagatacatcaaaaccgaccgaatcgcccgttttagtttccccgttcgttctccctacatcccagtcttttgtttttctttcagaaaatcgctaccgtccgcaatgaaccatagggctgatcaagagatggacggcctccggtgtcataaaatggaagggaagcgagaccagtccaggacaggagcaaatacgcatgtaacctcatgtaggatgtatgttggaatagaagatcacgtcctgatgactagcaccgaacgaacggcgtcaatgaaggaaggagagaaggaagaccgcacctgccagctgacgtctctggtcaatcccttgacgatgactcgtcctcgaccacctcggggaggtcctcggggaccaccgaaaggtcctcctcggggaggtccaccaaagtctcctcggccactgttgagaacagaaaagtgaagtgagcgaagtatagatggataacatctgtaagagctatagagacaaacccagcgaaaccttctcgtcgtcgggaatccttggcgggctgaagggagatactattggaaaccacagagcaagaatgccatgtaagaagacggtattcctagtgttctaaaacacaacaaccaagcttacggctctccactgggtgttgcggacgagatcggttgaaaagaaagaggaacagaagaaaattaacacgcgtccagcagagaaaacaatgtatcaaaaaaatgagaacctaccagagatctcggccgttcaactcatcgatggcagcctcggcatcctacgaccgaacaatatccatcgaatcccaaagagacgtccaaagcagtacgttgagtatcatcttttggtaaagaaatcactccccctatcctcttctttcgcctctcattctcggctgaaactatcaactgaccctaaggctgtcaaactcgataaaaccgaaaccgttcaagactcggatgtcaataacgggtccggactttgagaaaaactcttcgacatctcgtcgagtagcacctggataagatgacagatcggagcaatggattgatacggttgattcaagagaaaaaaaggaaagagaagaagagaaggaagcaaagaataaagcatcagagaccgattgagaaacgaagcgacttttgacaaattttgatattcttccagcacttttaggtagccgaaagaaacaaacaaataaagccacgacatactggtagaaagtcgtccgatgtagagtcgcttggaagacatgtttgattttgttaaaagaaagaaagcccaaaagagatgagagagagagaaaaaagagaaggtggacagactgaaaagactcgctggaggtggcgggggagaggaaatggcgcgtaaccaatcaatgccgatgcgtaacctcaaccctaaccgacacgccctacgagattttcgttttgtcttctctacttcctcttccagcacccgttccatccttctttctatcctctctgtatccttctttcttgcttttcagtttgtaaagagcggtctttcttgttcagaagatagacaccgtccagaaagcaaaaatggcaaaaaagacaaagtcgacagagtcggccccttcaaccgctcccatcccttcgtcctcgtcgtctaccactacatccaagccttccaagaagcaggccgttctcaagatcaaagactttactgttctccctatccattacactactccttcctcgtccgcaccaaccactcattatctctacatcagatctgatgcttcgacatcgacatcgtcagctggacagatcgaagaaccccggacattgttcgtcgccaacttgcctcctgactcgacggaggataacctccgaacattttttggaaattgcggtccggtagaaaacgtcaagcttggaggacagcgaaaaaagtcgggacaggagggatcagatatggaggacaacagtgatgatgacagtgaagatgatgatatgagtgaggacgaggatatggctgcagtggaggaggacgaggctccccgacctgtactcaagagaaataagaagaaggacgcacacaagaaacgaggaccacccaagatttctccactgtacgctgaggacgagactccactcctaaagctcaaccgaacgtctcagtctgccaaggttctctatctttctccgctctctctcgccagagcgctcttgctacctaccgctggacctctctctttccctccaaagtcgaatcaaccggaaaccgaccaaccggttggtctctcccggtacatcacttcttacgctttgtccagaccttctctcgccaagatcaaagcacacgcagactcgagtatcgcccactttgaatacctcaagaagcaggaggtcgacagagtcaccaggatgggagaggatatcgtggacgaggacggctttacccttgttgtgcgaggtggaaagtatggaagaaacttggccggtggcggtgtcggagttgccagtcgggactgggagagaaataaggaggagatcgagggaaagaagaagaagagtaaagagctcaaggacttctataggtatatctcttcttggttcgagttcttcatatgaaaggccaacgactgacaaattttctgctccttttatgatactatttcctcttttttaaaccaaccaggtggcaggtacgagaagcaaagcgagaagacctcgcccagctccgaagcaagttcgaagctgataaggagaaaatcgaaaaactcaaaggatctcgaaggtttaagccttactagaagaagacaacaacaacaatcaagaaagagttcgaaacgactgatgggattgcatgttctcgttcttctcttctttcgggatgcgtgctcgattttctgagatgttgaataataagcacataggactggctatcagagcaaactacggcataagaaaacactctatcgagcatctttgcttgcatgctacaacatcagagtctttgttggacagatttttgcctatacatatcggattatcataaat

SEQ ID NO: 408 - DNA, 20902 bp, Xanthophyllomyces dendrorhous
tcataaatttatacattctatataaacagggcaatgatgagaactcgatcaagataatagagggcatcagactggagtctctgactcgttcttaaggcacccaggtagtcaaaaaagagccgctgagccttcagatcatcgctcttctctcaagagtgcgcgtacgagacgttctcctatcctctttttgacttttccttcgacggtgattgcgcttcgaaaagtcttgtcgaagataataaaaatacataatagccaagagtggtctacgctagcatgccgccttgccacatctatccaaagcgcgttttagattgaaattcaggatatcagactggtccatagcgtgcatcggagagagaaacttacaagcttttcgaaatcgtccagggataacacagatttgtcaggagcagaggagaacgacgcgatcatctctttgacctgcgcctggttccaaccctctttcaataccctagccgcttcccagacttccttgaagccgatcgccttggagctcttctggtcgtccgtaaagaacatactccacgcctccttggctcgcctcttttcgtcctttgtgagatcaatatctccgatcatatcttcatccaacaacatcctcttcgtcttcctcccttttagtttcccgactggcttcgctcccttggctagcttggcagatttcttgttggatgctccagactcagagtatgcagtttcgtcatcgtcaccgtcttcagatgagggtagcgaaggtacaggagaagcaacggcagccgatcgcgtattccggcgagttcttcgtcgattcgggttgaagatatcatcttcgtcctcaccctgttcagtcaaacgagatttgggagaagcaataaaccctccagcttgatctgggtcgtcttccatccattcatcatcctcgtcatcttcttcgtctcctccgacttcatcctcctcctcctcttcttcgtcctgctgatcctctgagttatcgtcattttcaccttcttcctctctggaggccaacaagatagcgcacacactgaaccaatcccttctgctgactcctttttcctcatgcactcttcttctacttcccccacctcctcccaaacgagaggctgctcctgccgtgttcaggtccgtatcatccgaccaaccttcggctgattgtttgaagaattcgaggacttccatatcggatggcggaaggtttgccagcttcagagctcgagggattagagacagaggaatatgtgtttttgctgatcgaggtctcgattcgtctgttgaactcggcgtggatatatcggcctggttagactccaccacctcgatatcgggatcaggcaagaaaccacctccattttggtcctcatcgtccatcagaaatcctcctcccgcatcgtcctcttcctcgtctactatgaatcctccaccctcttctccatcatcatccatgacaaaccctcctctctcgtcatcgtcctccgtgacgaatcctcctcctgcttccacctctggcatggcagtaatatcttcaggctctatggattctgtctttcgtttcttcttagatggtttttttgtgaccggcaaaggatcaccagcatgatcgaacgcgtacgacagaagggctcggttggcagaagttagatcggcaaattctgcagaatccagaaaggattcatccccgggctgaatttaaagaacagagtgtctagctcagatcataaacacgagcacacatattgacaagaactgaacgaaccatgttatccaggccctctctatagatgtctaaaggaagcaagagttctttaaggccacaagaatcgctgatggtggtccagaagagaatgcatgtgtccgggaatgagtgatcgacgcgcgttgatgatgacgaaactcttgaacacgcgtttcattccacgtctagcccatcctcttgccaaccagatgaagcgtcatctacgatgcaactccaaaatatcctatgtactccgtgtccgttgtatcgctcccttctctactctctctttctgtgtattgagtaggaggctgaggtcatatctgtctgatggccggggttgccgctgactaagcggtttcacatgtgtaaccctaacatacccttcatctctccattcctctccctttctctgggatcactcaccatctttgtttcgtctacttctcccctcttgaccacttgtagcatacccaaatcgtgagtacgaatttcatgactatgtcggattaatagtttctaatttgttaattcgttcttcagccagaaatctctttcagcggatcctgtgacacttgaactgatccaataagcacgctcgtgcttttctcctctttctcatctactcaggattcttacgccttctctcctttcaagccaagagaaataaccatctctgctcatcttgtactagtgattcggtctcagctcgttaaaaccatcctcgtagaatgcccttcttcccaaatcatacttcgtcctcatcaaatggaaccgttcaaactgggtttgaagccgatctgttgacattggcagctcgacagtatgtatccttatcctcattcttcaccagctgtcaggacgtgatcaagaagcaacaggtttatttcgtctgacgacaaactcgttttatagccagaatcatttcacacctctagctagggcagaacttcaaaagtatctgtacacaacactctgggcctcggagtcgacacggttcctagatggacctgcacctaccacggcagaagaatggtcaggattcaatctgacgagggcgcaacgattatctaggtctaagggaagaaacaagaaggacacgaaaggcaaaggaagagagattgagttcgaagaggaacgagacaagagaagaaaacaaagaggaagcaaagagtcggtaaaagacgatccggctagtaggttggatgctagatgtgggaaagcttttgagaagggcgaggtcatctaccgctgcaggtgagatatttctatcgcttctgatccaagacgcatcattctaatcatcaatccggtttcttttgcagagactgcaactttcatgatcacttggcgctcatgtgttcggcatgctaccgcgaatcatcccatcaagatcatactatcaccctcaaggtagcatctagcctaggagagttctgtaacgctggtgatccatccatgtggctccgtccagtcccatcttctcttctctctccttcagccgtctcgtcttcctattcttcatcctcatccgccatctcttctacagaagcccctcatacatcccaggaacacatctctgaatttatcaactctgtttttgattacatccttaccacgttggatgtttctccggaagaaaccacgctacctacctcagaggcagatctaacgagacaagaaagactcgaaggggttaagtggttcgagaacgcctgggcggttgtcttatggaacgacgaaaaacatacaagagttgatgtagctgttcaattgggggatgctattgggtggacagaggaggaagggctagaatgcgcagagagagtacacacagaggtctgtcagatttatttcgtcttgccttgtcctgctctgaggcatcagaggatcctgttgaaaatctgactatccatactccctctatttctgtatcgacagggacgagaagtcatcgagatttcttcgagcgttcctcgacttttgcatattgctcataccctcgctcaaatcgatctaggcgtgacacttcgatcagcgcacgatactttccgagaatgtatctcggcttacctcctttccttcctcttggacctctcaacatgctcgctagaaggaagcgattctgttctgagggaaaccatgctttgcagtttgatgtcctctcgacttcctgtcagagacagaggggatttccgagaccgagcaggcttaagtcggatcggtggggtagaaatcagttggaacgaaatgaaaagggtggattgggccatggtctatcattcgaaatggtggaagaaaccgagagtcgagtggggtctcttaatgaaccgactgatgttggttggagatcaagctagattggatatcggttcgtcggtcacctctctcatgcattctgttgtacatctacaaaagactgatacgggtttcggcattattctgtgaaatgtaacagctagtcgatatgctctcgtatttcctaggttgatcgagctgtaccttttcacagatcgggaaagcgaaaactccatgacctccgtcgcgtcaaagattttccccatcccctcagttgcttcctacttagtctcccactccaacattcttcctgtgtatctccaacttttacgatcttactatactggtcaatttgcttttaagcgaattactttccctcctggccccgccgcccgtgtcgagcccgaatccgagcccttccgtctaaagaaatcatctcctctgttttctcacctgagagatctcatttcatcctccggagttaaagcatatatcgcccagcacgcggactcaaatgaaggaatgcttagtctaggcgaaattttcaccggaatgaactctcaggtccgagctgcagagaggcacgtcgagtacgaaacggaaggatggaccaaggcgttccaagtgacaggtgaattaggccgactggctcgagcatggggcgaaggttacgcccatagttctacccaggatctgatgagcgcaatttcggctatcggaatgaggttaggaaaaattctgaacatggagataggaacgctcgatcccggaaagtaccagccgccttcgtttcatacggttcggtttggagtggattcagggactgagatcaaagaatgggaggtcgttcagtatcaggtcgagtctcagtatgtgagctttcataacccgcttcactgggtgctagctggcttgttaaagcatccggggaagcttgaaggagtcggaagtgatgcgttgatcagagcattaggcggcttagagaactctacggacgtggacgagaagaacgctagacagagggcattagtgttgttagattttcctttgcgaagttcgttccttccatttgttcatgtttcgttttgattgacccgtactgaatgatctatcatcgggctttttcacctggcctttcttagtcgttgttttcattgcccagcttcgaaactctctctgggtgagaaacggccagagcatgcgccagcaacaacatcactaccgagaacataccgctttaggtgttcgggaaggatcttgggacaacgatatgttcctacttcaagtgttcctctccctgcttgagcctgacttagtactagctactttcttggatcgattctctttgaccgagtggtttcaaggccgagtggaccaccctgtgtatccgttcccatctgcagggatggtagaagagttcctctcagtcctgattgtttgtcttagcgagcccgccacgattggagcttggtcgaccgaacgttacgtccgaagggaggtcatccatgcgctcgtgctcggcccatcgacttattctgacttatcaaaacgattgccagaacgagtgaccgagtcacacttccttcatccactattgcttgagctagcgtcatttaagcctccagagtcggctaccgatttcggattgtatgagctcaaagacgcatgtttcgaggaagtcgatccattgttccatcacttttccagaaatcagaagcaggaggtcgaggcgattttggagaaaagattcaaaaagtccaaaccgaagggagagtaccttcatatacccaaaccgatggaacctctacagaaccgatacgcttctctcttgcaaacgtacaaatcgaatttccttccgcagattgtcttcttcacgctatccaatcttattcctttacatcaacaagccgacaaggagggcactgttgaaggaaaagctcgagaatcccaggaatccgtcttggagcttgctttacacctagccatgctctgtcttcagcatgagttacttttgtttgcaaaggcggcggtcgaggtagagtatcttccagggcagacgcttgtccggattctttgctcaatcgaagatgaatatctctttaaatcgctgaaggctagggtggcttggtgtctagacactatcaagaagcatttcccatctcaagtggaacagtggcgagtggttccacccccggttgtcaagaagacaggtcaaggcgccggagctgggcgaaagcaaaaggcagccgccagacaggctgcgatcatgcagcagttctcggccgatcagaaggcatttttggatgcccatgaggatgagaatgacagcatggaagaggacgagacggacgaagaggacatcatctatggaagttgtatggtctgccaggagaactgtacggcgttcgcagcctgtggttctttggcgctcatccagccctcaaaactcattcgacacattccactgaacagtcagccttggctcgaagaggttcttaattcaccatcttctctcgatcgaaatatcgacctcagcgaccacggagcgtcatcttccttaactggtgcatatccaatcaacaatttcaagtttggtctccatacatctacctgcgggcatcttatgcacacggagtgcttcgatagctatatcaaaaccactgaaaaccgtcatcatgcccaagcggccaggaatcaccctgagaatgtagcccgaagagaattcaattgtccgctgtgcaagagtctcgggaatgtgctccttccgatgcagaacccttatgatcgaccttccaaacctatcaagagtgacgatcttcctttgagagattggttacggctgatcaacaccgaagcactcagagacataaccgacacctcgatgatgttccaacaccgaacggatacaggcgagctaccacctctttttgctgatgcaacatgtgtgattgctcttcctttggaggaacggtctcctcttcttgatgcggcgcacaagatgctcctggatcttcaggctgttgctcgaccaatctctcagcaatcagtacacctccgtcttcgaggacaacctgaatctctacgacaggatcgcccggccgttgggatgtatcttcctgacgagctcgttgctcatatgattgccggactcgaaatcacctaccgaggacaagaatcctctgggcagactgtcgcagacagcttgaataatgcgaattgtcaactagtcaaatgtcttcttggttctctacgactcgcgacatactcgaacctgggtggaaagcctggcctcgtcagcgcacgatacggattatttgctcgactccttccagactggtatagggatgccaatgctacaacccctattctctgtcgagatcccttgggtgtagtcgtggagggtgcagcaatagcatacgaatatcttcaaccgatcctcattctggcctattacgccgagctttgccgaggagtcattggaattcttcatctgatccgaagcttcccaaatcgatcgcctagtcaatggctcaacgtagtcgacagcgatgcctctcatgcagtcgaagtattcggaaatatccggcagctcttcctcggaatggcttcacattccaggatccttcagtttgaagtaaccgaatacctagctagtgttcctgatcacgtcttggcccgtcttctgtacgcgttcactctgcccttcgttcgtcgagtatctatcgtacacaaggtggtcaagatgaaccaaccttcctctagcttgattccttctccactggcaaaaatggatccttcaacttctgaatacgttcgactcatggctcatcttcgtattcctcttcccgtggtttcgttatcccctcctaccactgagcctcctgtcgcttctaatgcggccatcgtggactgcgtttcgtcatatttgaaacagttctcggcgttctatggacctcgatcccaatcatcacttatccgtcttgaatatcctgctatctatcagatggctcgtattcccaacagcctggagggagtctttgagatgtatgggcctagagaatgcgcgaactgtaaaacggccccgaatgctatggcggtgtgcttactctgtggagaaggtgtctgcgtggggtcaagttgctgccgggagaatctctggggaggcgcggaaggattaggagagtgtaatattcatatgaggaagtaagttccttctcagatcgttgattctagtcatgattgttgaacgaactagctgacatctcgacctttcacttcaagatgcaacgctcctataggtattttcttggatcttcgaaaatggcagatcctttggctctgggccggcagtggctcatggggacctaacatcttcttagacactcatggggttagtcctcagttaaattagcgttaccctcttgttcacaactgatcaccaacgtgctttctgtgaggcttttcaggagttggatcaatcaatgaaacgaggcttccctcaatctatccatcctcctcgactcgacgaggttagaaagatctggcttacccacggcgttcccagttttgttgcaaggaagatggaagctctgttgtgagtttgtcatctacactaaatctttgttcgtctaagttgtatcagccttcttactttcttttcactttgatctgttctttcttcttcaagggatggcggaggatgggggcatttctgagagaccgaaacgattctgacgattctgcggacaatggatagagattattcactgttaccgtaccactctgtatttacccccaaaatattatctttatcgtctgcagccttgaggatgcatgctcatttatttaaacattgccgccaacttcgagtccagctcgtcaggcgaaatacgtatatctgttcagagtatacactgtagatcagcaagaagttttgaagatgtgaagagatcgagacaagacagaatttttctttacgcacacttggttcctaaacttccatcatgcttggcgactgcggtcttgtaagccttaccaaccaaggtcttgacctcatctctcatccgagctttcatatcacccgctcttcctagatgattcgtcaagtgaacttgttcttgtcgatcgagaaggtcccagaatttgacaaactggtctttgacggcctgacgaccggcattaccactattggaggatgaggaactggcttggagtaaaggagacgtgagttcattccacggatcgagatatgttgctttataattttacggttggtgagattatttgagagaggaagaaaagtatgatacgtttagcgatatgtctaaacataatagattgagaaacaaagaagagtaaagcagaccttttgcattcttaaaagctttgtttaatagctcgtctccattctcgcccaagagatcgctgaaatttgaagatgaatgaagcactaggttgtctctcacgaaagacactatattcccatcgacatgaggacgattcatttgagcatgtcgttatttcccgtagcccacagaatcgatgaggaatgacaaggaggacgagtggggactaactgttgttcatcagaaatatcccccctacaccacgtcggagcgctttggctctttgatctagactgttgaccaaggcggcggtgacatcatctaaaggacaaagccagtcagatacgcgcaccaaaaaatcagcttgtcatcgtgaaagaatcaaaaagaagatcagagtcacgaaaagaactcaaaggacgaacagatgaagtgcgcgatcagtccatcatcgtcgcctacaggaacattggccatacttgcacccatcaaccacttacgatccccgatcgtgtttaagaatgtttcaatgaccgactggtagcttggcagatttaataaaaaggacacaatctgttctcaacaatacaaaaagagtacataagacgaggataaggtcctgtttcaacagcaaatgtgcgattaggtaaagattgttgcctcacgctagttgtgaccgaagagaccgacacggattgaaactcgccaggtttcaccacgaaagatacctgtccaaaaaaaaagaacaaaacgaaatggaacaaaagggttcagatgatgattcagctatggatgttctggttcgttaaagttctctttccgacacagatctagcaagtgataaagaaaagctgacctttgcactctcgactgcctctggaattgatctcaaacagatacccttcaatccagcctgcataaagccagagagttctccttgatttttcaaaccagcgctctcaaagaaatcatcccatctattgcttagcttactcagttcgtcccatagtgtgtacgccttccaaggagcggactccttctttagcagagtgagcaatgacgcaagtacaccggatgaaaagtatgtcaacgaaggagtcagtatcgtttgaagtgttgatgagatatacgccgatgaatccgggactagggagcagaggagggcatgttccgatttggccaacgcaagcaaggtctcgcccagtttcccacctgtttcgtcagactcggatggttgcgtacctccttcgtcggctgccgaggcagcgataagcactcggcgaccgaggccttccagatgcttcttcatccaactccccctggtttcgccccacccccggaatgactcgtccaggtaggtcttggcttgagtcagagcgagcggagaggagaccaggtaagtggccaggttggaggatgagagcgtgccactggtagacaggatggataacggccgaggaggatctgaaaaaaaggaaacaaagagggtaagtatcctgttcgctaggacacaacgagaagatgaatctcaccttgaagaaaggcgtcgatgtctaaagagatatttgttccatcctgaatctgttgcgtcaaaatcgtacacagtttcttgaatgcgacttcggccagtttgacctgttgacggtatgccgaaagaagattgaagatgaggctcttgttgcgcatgcacgtaagattacggaacgatcacctacgttctccttcaaagctccctgcccacctctcagcccactactttttagatccgagatatgctccatcacccggtcgaatgtggccaaatagggtcctaggttggaagggtttggcctggagacatgccaatttaccaacggtatcgttagaggttaagatcaaccggcgcagaacggcaacagagcaaacacgtactgagccatcagcgcggtctcatcactctgggtcttttcttggttgactcggacagtagctagtgcggccagggtagcatcgatatctgccatgcatcaaacatggagtcgtttgttgttcaaaaggcaatatgaatgtagtgttctagtcagccatgcaagggtaaactaagcaactgaggctttgaaacctcgagggacgagagaaaggtagatgctgacttgctcctaatcgcgttagcgactgtgtcgagttgtgaacaggtgaaagcgtcttctctagtcggataagcctcgagtcgaaatgagccaggatacctaaggagagcgtgagctgatgcatgtcagttctcgaccaggataggaagcatcagctgaaacacggacctgccatgcgagatgaaagctgatgtgtctttttcaagttctggtcaagctgttgaataaggaatccgatgggaacatcagttcctcggtcgcagggaaagggatatcgatcatagcagactaaccagctctatctgagcagctgattccgataggtcggccatgatggcttctagagcaccaggtgagatggagtatgggaacggaatggatcgatggagatgtgaaccaaaacacccgcgacgatttcatcagcttcgtttccaacctctcgcccgaccaccatcatcatcatcgtcgttgtcatcatcaagaagcttacacgtttgctcttgctcctgtcctaatcctattcttgtgttgtatgtgttaaactttcctatttattcactttggatgctcatgctcttataccttgcttgcaagtgaagtatttgaggaaggaaaaactttactgaaacgaatccacgcgttcttaaagaaagaaaagctttttctctcagttcatcacttccttcatcttcaatggacgacgaagacgaaaacctcgtcgactggggctacgatgatgacgaagaagtcaaaggaacaccgtcttctcatggtcacccggcttcggataatgcagacgggttcgatgcattggtcggggaggatactacttcgcagccttccaaagggcctagtctattgagcagaataagtggcaacatccagcctgtcttttccccaacctccaagaaaagtgttcagaatggtatgcttgcttctttgtctgtctgaataccacggcgtgggtttagttaacgtgatagctacttcatccgcctctacggggatttccttagaaacacaaaatgctagtaactctgttcgcagctcgcccaactctggtcgacccaccacccatcgacaatccaatgaccctactactggagattctgaaaaggcctctctcatcgaagcagctccctcccagtctgctccttccacttcttatcccgcttcatctgatcccttctcgaccaccgatcaacgctcttcgagcggacacgaagaattgccacctaagatatcttcaaaccggcaatcgaccgctgactctgttcgtttgaaaaactctagaccggtagacagtcacgtccctgatgccttttccacacagcgtcgaccaccaccaccacctctgccgaggtctcagcattcggctgatgaggcaaccgagacagagacgacccgtccatcgacggttaccaaagaaggacctctttccctagacgggttgtctgccgagtgggagattcgtacatcccgaacttcacagggcgcaaagtattattttaacaagcgaacaaaacagagcagctgggagcgtccagagggtaccacagcgactgggtcgaacgctgatctaaacgagagagatagacatggctcgaacaagtctgatcctaccagatcagaccgtgccgacactgggcctgacagaagacgctcaggcgattgggacagaaatgctgccagctcgcgtctaacgaactatggttcaagaagcgaggatgacaggcgcagaaatcgggcggaaggatgggatctagaaagaaatcgacacgcaggtagagagggccgatcggatattagcatgaacgagcgaagagatagacaggccgctatcgagacggcttacaaacgtccttcgggtctctcttcaagatcagcatccaactcgtttcaagaagcgcacgattggtcgacccctggttctcggaacggccagtctccatcaaatcatcggcgctcttcacctgcgccgggtgctgctgcttctggagaaagacctccatcggaaaggacatcccagccaacgggagatagatctttggatctttaccgggacaaatctcggggtacgttcctgacttggtgctctcctttatcgttctcttaagcgttcttttcctctccctcctcctccatgtgtgaacgagcgtccaccggtcaaccactgcatcaaccagactggacggcgtacgatccggggtttccttgcgatgcgacaagatctgctggctaggctttccgctaaatttcacagtagagacgtgggcaggcaaaagttggatgagactcgcatcgcaagaaccccttttgatcgcgtgggaagaagagaggggaaagtactggacggaagattcaagacctcaacccggacgcttgttcgactcccaatctcgagggagaggagagagaggaaaaaactgaagacaagagattcatgatcggatataaatttcgctcacacccactcttgttccttctcttctcttgtttggaccgtgcactgggggatggaaattgcgcatctacttcagataaacctccttttccttctactgccaccactgacgaacggtccaacacacttcctgcccgaggtgaacccattccgagccgtgacccggtgtccggttctgagaagagaccacagcctgtcgttccatcgggtccgagaaacataacattggacgggccggttggcggggaaccctatggtcgtcggagagcaccacctgttgctggtgtcaacgcggtttctgcccagggttcgacgatgagaaagtggggcccagctgccagcagtgttgatgagagaaaacagaccaccgagacggctgatgtttcggctagagagaatgatgacaagaggagggaggaggatgaagcggagagggaaaggacgagagagagagaaagacagaggcaaagggaaagtgacgaaaagaagaggctagaggaggagaggaagagagagaaaaacatagcgaggtcgagggacaagccacgagaagtggtaccggcgccctctccagcgtatgacccaacagccccttttgaactgtccgaggaggagaaagcgttgatcttggccaaacgtcagagggtcggttgtcttctcgtttctctccttcttaactcatgtctttgttctcatcctaacgatatgatctctcttgtttcgatctgtttctgtgttttgtcattccaactgataggcagcacaagaggaacatgctagagtgattcaaaaacgggatgaccaccttccggatggcgttcaaaagaccggtgaacaggccacgagggatgcttattctcgtcggcgtcaaccaccagagacgaccgtaagttccgctaccttacgttttgcatttacagaaagatttattcaatcaagggttttttttttggtcaacatcactaacatcctgatcaaacaatttaatgggatcgaacaggtgacatcttcatatggtcacgagcaaacctcgactccagtccgtcctacccgagacggagcagtcagggtgatcagttctgttgccaactcgactggagcacggccaaacatggggccgtcaatcgacctggtcgatctgacgtctccgtctcctccacgggctgttgatgtggaaagtgcggtgccttcaaaacgtggacacgacgctttggagccgccgcagtcgtccacgcagtcgagagagaagaatgggaacgaggacggagacggggataaggttaaggacagggtggaagagcctcggacaaatcgggcaagacatcaaggtatcggaccggatgacgtgaacgatggtcaatcaaggcctgtcgtcccaggttggggaccaggaagtaggagagttggaaggggaggtatacccgagcgtccgcctccgtacggattacccaggggcggtggccgtggtggtttcggtaggggaggaagaggagatgcctggtctggcgctcgttctagatgatggaggaaggcgagcaagaggagactccaaacaaaggataagaaggagggacaaggactcgcgtctttatcgtgctggcatgtctgtgtgtattgtttcaatgcgtatcgccatgtccgatgggtttaactttcacacgataaataagattgatcagggtttaaagccaaagctttttctctcctcgtgaaaacaagaaacgtggtagttattaagtttacacgtgtttttatcttggttcaatcttcctattccttcttgttggttctctttccagtcaacgtttagactgttccttctgtcgaatcgatgctttgcacgagtttattttgattcatgttctgacccgtatcgatggcatgtccttgtttagttcatttattaatgaacagcaaacaagaaagcggcaggcaggattgaggatcacagaatgatgaataagaaagatatcgtagaaatactgtaaacaaaagtttttaaaaggtctcccttcccttctcacttcatcctcttgatcgtctacgggcgagactggttatcaaagatagatagaacaaataagagtttactcaagcgtcgacgcttccgtcgctccattagttcactaattcaatcgatcggcagtggatctttgagtgaacaacgaacgtcaaacatctgaaaaaggccgggtgttgtactgcggatgcaatagccagttatattatcccgcggcatgacgtccgtggcgtccatatgcttgtgtttctaatctggatacaatccgcagcgaccagggctaaactataagcatcagggcaggcgatcaaccatcagttaacgttcagatcccatgtgcctggctcgttccagaacgtgactgacacggagaatttcccacgccagccgagcatctttcgagtcttcttgttctctcctctttttctttctcttcttcttctcctctcctttcgcttccatacagaactgatacacccttgttgatttcgctgaccatcgataatacaactgccgacctactgacaccccacatacactgacacacagactgactctatgcttacagagacattcattaaaagtttctccactgtttagccgggtttgacactgattcagtttgaggagcaagagtgtttttctttctcctctgtctttcgtcttgctccttccgttttctctcttcgtctccattcttcgttctcttttttctttgtctcactcactcactcaccctcttccatttccttcttctccccgtccgatcttccctaattacactcctcctggtgaggaagaagatcaaggaaaaaaaaagtttcgaactttactcagtccagcccctcttcccaacccttcgttcttcatctcaaacactacagttcacctggcgtggctgttgtaagcggtatctcacatccccagaatcgtcgtcgccttctcctactctctctctcttgtaccattggtttgactttctctctcggtcaaatcgaccacagccttttgtctatctgtacccacgagagcttcccacgagagcttcccactcagcttcttcacgctcgtttcccccttgttcattttaatattaattctattcctcccccttccttactcattccctcttcagattactctatatcgcctcccctacatcttctctcttatccacttctttcacaactgaccttgtctctcaccgaccaaaacaatttatccattcaatcaaggtttgtcctcgtttcacaacgctcgctcaaaagagagtgatatccctttctttcggaagcttgctcgtccacgttttagggaagcagaaaagtccgccccacatgtcaacggttgattgatgggcgtgtttattgaccgtagtttctcctctgtaaacactcttaggttcagccaatttatcgtcttacccatttagacaagaaagtttaaatcgatttcttccattgtcttccccttatattacccattctcctcctcctcctcctccttcttcttctgcgtcgtcgtcgctgtcgtcttccctttcgcattcgatcactctcgcttcttccgagtagctctattcaattcgttcccattctatttgccctcgggtttctcgtccccctatcctatttcactctctatcgttgttctaacttcttatccatcgttttctcttcatccatccatccatccatttacccatccgttccttcatacatctctacacttcactttcttgttcgcctttcttgactacttggcagcttgcctcttcgtctccaggaattctatctagcaatgtcatcgatattccccccaaactacacgctttccagatcatccacaacgaccactgacagtcacttccctggcggaacagacatgtcctcaccttcctcttccgtgttctcgaccccttgctccagctcctcctccctcagcactttggtcgatccagttccgaacgtcggtagaccaagcgtgtttgactactttgcaccgaaagtaaccttgatgaacgataagcaggacagtctcggccttcatgctaaatttctcagacgaaataaatccgatcgttcaaggagctcggaagagccggccatgctcacgcctactccaacgaccccgactgagcaggtcacactcggtgtaagaaaagaacggagctttacgtcccctcttgccggcaggaaatcaaaggtcgcccttcaagagtcccaccaccactcatcctcatccttaccacaagtgaccactccggaaaaagtcccttcacagctgacccagccggaaataccgacgccggtcccgagccagagcaggaggagatggtcgatttcaccttcctccccactatacaacaccgtctaccaacaagcaccgccctcatccgaaccgtccggccaagcaacatcgacgacaaagccctccaacccgtcggttagacgactctccctcgatcttagatcgtcctccgcccctgacatcaacaagcatacgcttgggtcaagtccgttgccgagtccgtcgttgagcatcaatgggaatcaggctggtcatttcaagatgtccaagtcttcagctggtggtgccagacgaagaattgcgcaggataccgatgagagtgcttacgcgagtttcgagagttgtatcaatggttcgtcttactcgttttgaatttctgaactgatacatatgaatcttcctttactcaacataacgtcttcctcctcactctaggtgcattggcccatgagaagaaggcaaagagttacggggatgctgtcgagtcgagcgcaaaggtatgtccatgccaagttcatcgttctgttctgtcctgtgctaaacattgtttcctcaaaactacgataaaaaggccttccatcactttacccgagcaaacgatctgttgactctagctctggatcagagaccagacgacttcgaggctctcatttacaagtgtgtccgctcttcattcatcctttctgaccagtttgtcctgcggaacgaagccactcaccatccactttctttggaaaaaaatcagggcgtccttgatccacatcatgtcttcgcgattctaccttgcgtccgaatctttaatggctcttcagtcgatccttgccaagctccgctcggcattgtctgatccaatcaccgagaaggtcgtgcccccgagtctctatattgccgcacagttccaaaaggcccggtgcgtgtacctcttggcgacgctgagtcaggagattcatctcagcttggtccctcgatcgacctggacgggcgaatgcggagaacttgccagagaggccgtcgtactctggcaaggagttatcgacaatcaactggccgtcatccgacagtcggcccagctgagcaatcaaccacagacccaaagcttacaacctgaatcagatccagtcgatcctctcgagccggatgccggggttagagaacgaagaagaggatcgattgcgaacaagcggttcgagttggaccaactgtttgaatcttatatagagctctaccaagctgccaagttctgcgccggactcaccaccgatgtgttcaactcggataggtttttcgatatcgccgaacgagcgctggaacttgctctcatcctgttgaacccgataaagacatccaacatcctctccgtcgtctctagattctcattctcgtccgcacatctcctgacgactcctccgtcaccgacgtcaccaatatcgagaggaacggacttctcgttctcggttcaaccggagctgctcacctcggccagagcgtccgtcctgctcaaactaggcccgcttaagatggacaggttcggacacacactcttagtctgcccgcaaatcccgttcaaccaaaaccaggtgacatgcattttgtccatcatggagggcctggccactcaattagccgatgtatacactaattcgagctcgtcctattcttgcactaccaatgactcctccgctaccctggagagtagatcctctccgttatattcatcgatcgcaaacaactctacccccacccgggcggaagcaaagcacttcaccactctcgcctacacaaacctggccgacgctcagttcctaacggctcatctgtcgaaacgagcttggaagaaaaaggcgttgacggccgcttcgaaagccggtagcaggagaggatcggctgcctcgttggccacctcgccctctcacatcccgggtgatctggcggcgagaagacgatcgtctgccaatatggttggatatgaagatcctgtcggggcctctaccgccgccgccgccgccgctgctgctgctgccgttgtcgttgagggcgacaagcaccggacgattgaagaggttgaggagattgaggaggatgctgggtcccgttcaaagttgactcctcaaagtcctctttcccaaaatcgaccaacctcatgcataagttctggtgaagatagatcgtctttctatcctaaccatcagctccacctccctcagcttgccacacagtcaccaaggaatacgttgtccatgtcgatgacccagtacaggagaacctccatggcttctatcgtctccgccagttcctcattctcgaccggttgggatggaggaatgtgtaccccgccgttactgggtctgtcgatatcgccttcggatcatccgatcgtccccctaaccgtacagacggccgagtgggtcaaactcctcgctttaccagagtcaacttcaccttcatacctatcggccaatgctttatccacatctcccacgtacagcatcgcctcggctttgtccgctacaccggcgcctgctggcccgagtttagctcagttggcgtgggatcacctcacgggttcgatccagaactacaagt

SEQ ID NO: 409 - DNA, 1272 bp, Xanthophyllomyces dendrorhous
gccggagcgacgcccacagcgctctctcttcatcgagccaggatatttctttcgatctcaaaaacggcttactttcaagcgacgttggcacccagagtggcagcagcgagagaaggcaaagtcgccctgctggtcaccgctgaagtttatgccacctgggcagcgaaagaggtcggctgggattggatcaccgaaggaaaatccagacctcatgggttcttgtccacaccaatccaaggaaacgtctttgtcagtcaacacgccgctatcggtcagaacgctatctttaccttgcttcggaccagtgagtcttttttccgtctttttttccttttcttctcttctctctccaagtctgctgttcttgtctccttttctaacgatctcatctctctttcactcatatagtttggcacaaagcggtcacaacagcttctgccgatctgtcaagagaggaaaaggctcacgcgaaagaacgagtcgagcggatcattctctgcctccgttcggaactcggtatcggttcgtacgacctcacccgattcaaagtcggggtcgagcggttcgaaggtgatttcgaacaggtcgaaagtctctactggtccggcgtctcgaggacgttgaaggagtccggatgctcttcgagttctagttcaaacccttcgtcgacgaggatgtcgaaggatagggacagagatcaaaccggaccgagcaggtccagtatggacttggtcggtagtcggtctagtctttctcatgctccctctcatgttgctcgtcttcgagtatagatagcgtaccatgtctcctctctcttctcatcttctcattcttttggctctttttgttcttcttcacccttttcacataccttgggcgtggggtttggtcatttcgtatgtaaactttttctttcattctatcacactatacatcataaattatgttttttttccctcgatttctttatatgtctcttcccttccttgttttaacatgtttagatatcctgaccaagtctcaagactctaattctccccccactttgttttgcaccctacactgttccttctttatgtatatcaaacttaggatctgatttttcagattgatcaaatgtcaacacaatcacttgtctatcctcgccgtcgtgttcacattgtgaccgtggtttcttcctctgagagacatctacaatatatcaattcgatcctatctgtctcctataggtgtcttttgagtctcttctggaataaaaaggggggggggggg

SEQ ID NO: 410 - DNA, 58959 bp, Xanthophyllomyces dendrorhous
  misc_feature (54344)..(54353): n is a, c, g, or t
ggggggggggggtggtggagacaagagacaactatcagacggttagagatagatacaacaggaggccactcaggatacgagatgagcgacagaaaggcagatcatcgagttccgaacacgttttcatcttagagagcggctagtcgagcttggacagatttcatttcaggaacggcctcttgcgctccgtggctctctacgcacattcctgctgcctataagaccgccagtcggaccgtaatcattgtgatgtcagatgtattcatgcttgaaaaaggaagagagagagagagagagagaaggtacgtgtaagagggaaagacgatagaaagacggtatagactaacctgggtggcgactctcatcacatctctcattccttgttgatcgctctcggactttccttcacccaacaatctcatcagcccaccgacgaggaacccagcaaaacaatcgcctgcgcctgtggtatctctggtctcgccttgtaacttcgaagctggcgtgtagatcaaaccgtatcgaccactaggtccagaaggagagagaagagcgaacgagccggcagagcccagagtgaggacgatagaaggtgaagtcgtcttgtgtgatccggcgggtggttgaagggacttatgtcgagccagttgaaggagtgtgggaaggaaggtctcgtatttctcgggcgcagcttccccaatcgtctcgattgattctttcagatgttttatatctgctgatggagaagaagaatccgaagaggaagagaggtctttgaggagatcctccatctcgccttcgttaacgatcagccatcctagtttccaccatgggaatgaagcaatctcttccgaggaaagcataggcgacgggttgaagatcgcggacgtcccttcggatgaagaggatgtaggaggacagagagagaggtaatggagggtttgagggagaggaatttcgttttgaagcaacaaatgacttggtcgaggagaaaactcggaaggaagtgggagctcggcatggttcgctccttggtagaggactgttgagtaagaagggaagcacccggatgcccagatgaacatagtcaactctagatgatcttgggagggaacgttcaccaatgatacgtactgatacaattctctccttctccatcaagctgaatcaccgcccttcctgtcacaccatccttttggacaacgacaccatctacatcgaccccgtaggattctaaaaggtcctttgcccagattccatctgcaccgacagctccgatcaaacgaacgggtcctccggcagatcgagcaacagcacatgcttggttcgctccttttccaccggcccgacgagagagagaggttgaagaaattgtctctccaggtcgaacaatatgagggagatgaaagaattcatcgacatctgtgtgagtgataagtcgtaggacatggcaggttaaaatagaaaatagaagactagttgagaattgagtcgagaggaggaaaaatacgcagagtggtcagtgcgaagaagggaatctgacgaactgatagatcctcgaacgagacaaagaggttcagcaggcatagttctaatacgtgtcgtttgcttttccttaagaagagagaagaatgaaaggttgggctgatgggtgatgggttcaaagatgaaagaagatagaaggctagaaaatgaaatcgtgttcttttcctctaccggcccgactccgccggataaagacaatgatcatctggcaagcgtacaagcatatcacagaaacaaatagaagcataacatatatccaaaatgacaaccaacatccgtcgggaggcagatgctctctcatagaggcagcgccaagggtttcattatttcggagcattcacatgtccacactttttgcacgttcttctttcctcatccgacatccatgcctttatattcgtcgtttcgttcatttgcaagttcgaagcattttagttagtggtgtttcgatactgccgaaaatgcggcagtggtgtccagtaagaattgacagagatatagactgacctcgataacaggttttaactggctacccaagttcgtcacgtggaaagactccttgtagacaatgaacggtccttcggggtgagcctccaagttctgacagtaccactgtagagaatctataagaggtggtagcaattaaagatccaaatgaatatgtctttagttagttatcttcttcctgcataagttggacacctcaaacacattgcaatacataacgatagggacttgccaatagattctttgggcctgacccgctcaacgacgagtccgatagtgtctgcaaatcgacaggggttgtgcggagtgtttcctacagggtcaattgaaatgaaagaaatcttggtcaacatctgacatgtccctctgaggaagatactgtgaagcggacaggggaatcaacgatcatcgaacaaacctggcaacatgaacatttctccctcgtcaattcgaatatccttaaactctccgtcgtcgacgactttaagaatcatgtggcctttgtattgatagaaccattcctgcggtgtaacgtatttgtgcaaaagtgaaaatgtagagagttcggtataagtatatgactcatcgtgtgtctccaatggaacatcgacgaacctctgtctcgttgaagtggtctggatgtatgtacggaacgatggggttgacgattctcagctaggttcctatgatttctctttctctccataagcaactcctatcctgctctctctcgataggagcactcgggcaaaggcgcctagatgaagcatactgacaatcctttctggtgttcggtccaccaacaaccatgacgatatgatcctggccgtcgtacaggcaaaagttacccaccggtggcttgagcttgtgcgagttttcttccagccacttggggaaattgatcggtttgctaagcgtcattactgagacctctgtagagagaaaagagagaagaatggcgagctaatggatgaaaggatggtggtgttgatgatgatgatgatgatgatgagtaacaaaatcgagtcaatccgatctttgggtttcggttactaaccggatccttccatcatctttgggagtcttctcggcccgagcagccatcctccatcatctgccgccatcatcatcatcatcgtcattgattgctgagacctttacggtcaataggaggatggacaagacattgaagacctatgtagagctcaccgaatccctccgtttgactctttcttcccttctttctccttcattgcctctttcgattctccccccgaagctagagaccagactctcagaagcactcgaatctccttcgtctctggacccagcggtagataagccgcaaggaattgagcatgggttaataagagagctgggatactggtgtgttcttaccgaggcaaatgatggaggccgtgaaaaagtagaactggctggtctaggtttgtcctctctttcgaccttcgggccgtcttcttctttcctcttttactgatcgaagcggaggtgcatcgttggattcttacgcagatccttcaagatatcatccacatactttgctctcattgactcagacactccttccaccaaacatcactcggccacccgctccatcgacatcgccctttagtctcccgtcaccctacctaccatccgccaccacgtcatcttcattgacatcaccaaccggagaaaacgtagagaagtcgttcgctcaagaagtaagatcaggggtaggaaaagaagtgacagcagtgttgaacgtgttgttctcctccggaggtgtagcaggtggagtttggtggttgggaacaggaagcgcaggttggagtctcaataaggtttgttctggcccccttttgatgtctgatgaccgtccatgcttacttcttctaccctccctcatcatcactctatgtcgaccagacagtcctcctcacttttctgtccttcatattcatagcggccgtcgaaacgaccctctacgttattcacttccagaaagcttccagtagaaagaagagggacgcagctgcgttggctagatgggagaagactggtctgacgatgggcgttcccatggttcgaaggactctagatggtgagaccgagaccgagaccgagaccgagaatggggaaggagtgcaattgatagaagacagtcggagggaagaagacgacgttcttcggaatagaaagcttagccgtaaaaaagcatcctgaatataaaagatacccttgatagagctttttttcttgcactcttcagtaaatcagattgtcggaatatcattcacaatgttagagatgaaacagttcgattacataagaagatccatacaacttgaagaaaaagaggagaaagatggttgaagagtaggtattgatggagaatgcaggaaagataacggaatgtatgtgcatgagatggtcaaggagacaagcagagaagaatatacaactaggactcgacgtcgcatcctggagttggatgttgagtacaatatagataacgggaagcggacaagaaggccaactaaacagatagactcgtggtcgtttgttagtcctccagagggtagaccgaacctgtcgctctagcctcactgtcgaatagggtattcaacaccgccgccaatcggactgatcgtataaggagaaaaaaaatctgtcagctcatatcgctttcttgcctaagcgtaccagtccggcaagcacgcagggaaagaggagacaagaacgtacgaccacctcgagccagctgcttctcgactacccaatctgctttcaatcggccatagtactcgggggtgtttagctcctccaaagtctgcaggttcatcggccagacatacttgcaattgatactagagtcgacaacaaaattttagaccatcataacacacacacttttgcgtctcaagaaagatgaagtaaagagttgaacgaacgggtgagactctttagcccactcccaagggcaaacaggaagcgagttgtcccgctcatatttatcaggataggcgcctatccctgggtcagacactgatagctgggtaaagaatgaagcaaccttggagggagtgaacatgaatagactcaggtttcggatgagcttctcagaaaaagacgtcgagacatcatagggcacggaggaggcatattgggtacattcagcccaagtgagggactcgtttcgccagattcctcgaatccctttgaaactcaatagattgattagaaacgttacaaactcgagacaagagagaaagagagaaagaagaagaaaaagagtaccttcagtgattatgaatcggatataagggtcgtagatctttccgcgcaatgctttctctattcgttttctgtaagaggaatattggcaacgctttggtcagtcccgataaagattcgataaggaagagtgaaatcatgaacgaacgaaggcaagggagtggtgtagttgccaagttctcggatggatttttgaatcagcagaccatcccacacactatggaggctgttatcagagacatgagaacatggccaagtcagtcctaaggttcagtaacaaaaatgggatttgaggagaaacttactttgatcgtcggccttcaaacttgacgatttctgtcgaggtttaaggatccaaagcggatagtaagaaagaccgttgcgtgtgtaaacagaaatatatatttttaaccagatcagaggatgcacgaacgttgattgccacctcgttgttttcctgccagatgaagaggctgatgaagatcacccagaaaatggacgaggaatctcaagggaatatctctgggtttatcccagacgttaagatgtcaataacatgactaggatcaatttgatgaaggctcctagctaggtatgttgaatagagatgaacgaacccttcgccttcctttaccctccaggtgtaatttcccaccccagccaacaaatttcgatccttatcgacccaaccatgttccccaaaggaacatccatcaggccctccaggatcatctccgattgcgttgacataatgtaagccagatgtcctttggtcgttacgggaatgattatatcaggtccacaatcttcaaattcagagtagaaaagacaccgtagacagaaactcactctcggtgagcccatcgaatcgaatctgcccaagcagcaatgggagctagatgtccgtctgagtagtctggaagaatctgggcgatagcgctcagggcctgaggagtaagatgagcctgtgcgatggtcgctgtgatttcgtgacctgtgtggagatggagagcaagatgtcagttctcgtttccctcggtctgaccaagataaatgaaaggctttaccgatagcagaccaagcagacactggttgagagagagcaatagctagaggaacgattgagatgagcgatggaagcatgttgagaagatagatgggtgtatggtgagatgggtcgttgtctcatcttgagatatcctggtagcggtcgagataacaacattctgcttagtcatcctgggattgcccacccagagatcatcaacatctggaacgtttgtctgtagatatcgagcagagaccatcgaaagagcaaacggtctctttgagaggctcatgtattcgttattgccttgcagctaggactgacaattcttgggggatggatacactaacacaaacagagcgcactctgagatggacgagtatgcgcgcgattgactatgctcacctcattttagcgttctatagcttcatggtatcattaatggtctcagatcgaggtggatgggtaatatctccttctcttttttatcctctcgcttatgatagagtgcgctgtcgagtcattcgttatcgattcattcgctttactgaactatcttgacaaacaagtcttgaatcaggtattgactagatcgatctcatcagaacttagtggcggtcttcggtagctctgagtcaccttacttctgactcttcgttcttgtatataaacaaacctagacttctttaccgatgctctcagctatcaaagatatgaacattggacttctgtacatgtttcgtgcgttcacctggtaggctgatggtctcgatgtctcgtgcatggtcttctcctgatacacgatgacttcgttctatctgaactgcactcacagtcttgtatttatgacgaacagccgacccttcggtcgaaagccatctggttttagccacagcggcttttgctggccttacccttaagcgagtcatcatacaatgcggcgaagaaaaagaggagaagtacctcaagaaggtccgtttccgtatcatggaagagtcatacagttctgatcagatcaacgcttgagacactagtctaagcaaataggatcgccggtttactgacatctaattcgatccggtcattatttctgccgttgtcgctatcgctgccattgttatcatactatttgttctttgctcagtttccctcgggcaaagttccagcgtttgaacaggatgggttcttccttacaggcggcacaactatcgcttactaccgtatgcctctcttgtctcaataatggcgataatgccatcgatcattcactaacactgtgggatatcattccttgcttttactcaccgtcaatcaaatcgatgatgactgactgataatgatagttgctcgtctggcgcctgaatgcggtctcattccttccgacatgcaagatgccgcactggtcgaccagtggatctcttttgccgagcatgaattagacatgaaaatagatgacttgggcaatgagcaagccgagatcccaatgttctatgttctggtgggtcaactggtatcacggtcatgcccttgtcggcttcctctccccataaatctcatcacagagagaagatgctaacttatggactgagtctcaatttatgccttctctattcgaccgacccgttgttcagcatttaatggagagaggccaaggtgccataagtcgcctttcggagcactttgttatgcgattttatgttcttggagagcagctcaccttagctgacatcgtcatcacttccgtgctcacctatggactccataaacccgaaaagtatggcataggccagtaccaccaaaggtatatctctctttgtagatttaccctcgtgcttcccttcccgcaaacaatatcgaaaagcaatttgacgctcttgatgtttgttcgttctatagaatggtagagcatcctaagcttgctcccgtcttttcagaaaattctcttcgacccaatctagctgcttatgatagagcaagagcgattgaataccctgaagacgacgatgagtgggaagacaagtcgcagtcagaatcggaatctctctaccaacacacatggcgttgggcgatatgaaggccttcagtttatttcttcattgattatccacgagcaatattggacgtgatctctatttgtctcgttcgctttacttctcttcttctctctctctcttttggctgtataccttggttcaagctcaagattcatgagatctgtttgaaccatgcacagagatttctctggcttcgaaaagtcttgataatgagatcttccatgtaaccccatgaaagacgcagtcaaaagctctaaccgaaaaaagaaaccgcgcgtttggtagaatcattctgttgtacgattcgtccatcatctcatatgtctatagcacctacacagttcagtcgacacagacggagcaagagttatccaccgaggaatcctccttcgtccggcattacctttactctgtccgatcattttacgtcgtgcctcacgctctgcttcacctgcttcccttccttctctcgacgcccatccgaagaatcatcatcggacgaacttggttttccgagagacaccctagatagtctacttcctgccttttcttcagaacatggcaaccatcgggacgacgctgatgacgatgccgctgcttggggttccgacgcgctctcacttcgtagtcaattcggaacctcaaaaaggagttcgagagaacgaaaccctaggggagcttggaggagctggttaggtcgtctgatcgctgggagaggtgaacgtctaagccttgaagtggaggagggagttgatgacgagagagatttcttggaggatcctgtgattgattggcaaatagaggatcagactagaatatttaacgacaacggggttgatcgggacagcaacgtcgatcgacgatcgagaacgatagacacgctacctgatcgtatattcatcgatccaactgaagtttatcaagcaaagcaaagaacggacgaagaagaaaggagagaggaaggagaaggagaaggagagggagaggcagagtggggtgcgtttttgagcgctccgctcacgagacgatctcccaacatgacaacatcaacatcaccatccccatcctcatcaaccttgccaacagctagagcttacccattcccaacatccacctccgcctcaacacacttggccgaacccaatatcccggagctcgaaccgtcatcgactccaggtccattagcttctatttcttcatcttcatcatcgtcatccgcatcttcatcagagtcgaaacatcggtcctccagatcatcgaagtcattcaataaaaagaaatctcctcctccctcgaacgaggttgaaccgacgcccgccgaggatgtaccgcccagcgtataacttgttgaatgaggtacatagacatgggaagcttaatcacttcctggacgagatagtaggagagtggtccttatcgaagtgttaatcaatcctcatgtggcttgcgccaattcttggttcatgggtactataatcacaacgtccagtcatgctctcatacactctgctccaaatgtatcatggaggagggtttgacaaagcgggatcatgcatctcaacatccctcacgctcctgctctttcctttttggctgtttgtttgttcatttattttgaatctcttctctttagatgtggcctttgttccggagatttcagctcttttggtgtattgtacattcattgcttgtctgattgcttagtaatttgatatatacatatgtttctaaacaaactcttcaatgactactcgttcgagttattattttgttgaagaagaggaagcaaaagtttcaagagggagctctactcgacctcttcaatctttttctccccagcaagatctaccccaagtaatatgttgtccaacagtcttgtctttcccaccttgatggctccggccatgacccaaccttctccatcttttccggttccgagtggttcgtcccctctaacgacctcaaacgagcccggtcggaagattccgatgtactccatctcgaccaaacctctgctcatcatctctgctcggtagatgacaccggccgcagctcgtcggacgtcctgagcggtcgccatcgggtcatttaaccagtgagcgtgcccggcggtcagagcttgttggagggcgggagcggcgaggagctcacgttcggacaggtaagcgtttcgggaggaaagcgcaagattggcgggaggaggagatcgggtggttgggtgaatgagaaggttcgaagacgacggagcactgaaatgtagatctttgagcactgcagacaaaggtaagataaatcaaaaagccgtcagatcaagttttcttgtccatacaaaagaaaagagagagaatagcaaacgaactcgttcgaaggagaagcgcctgttgaatatctttctggccgaaatgagcgtagtctggctggacaatattgaaaagcttggtcacaacggtcgccacgcccctgaagaaatttggtcgagcggctccctcccttcattgatgaaataccaagttatttgatgagcttatgttgtcgaacaaactgattgacacaaacaaaccagtacatggactgaaaactcacaaaatgtctccgtatcctttcacttcgacaaaagcgcccttttgttcgctcacttccgtagtgattccgttggggtacatttccttcacgtcaggtacaaagactaccagaggagagtctatgttgaccggtgcatcgactgaatcagacttgtgtgcgctggaaaaggcagaggaggcgtgggattcgagcagagtggtaagggaagagaggtccttcggaagatctcgggggtaggtagccaaatcttctgttggcgagaactgtgaagagccacatccagaatatttaggacacagagttttgaatcaggttgttatttttattatttgtagaaaaacgctatagtgactgtagctgaaaccttacctgtgaggggttgacaaagatactaaggatggtcaaaggcgacttttctaaggatcttgagactggtcgggatcaaaggaacacaaattctcgctcaatctctcagcattctcgtacggacagagccatatatccagacagattttgcttaccaagatccaaatgaccctgatggagactgcccatggtgggaacaaagccaacggacttgcctgcgtctctcgcggccttcctccactgtcggacttgcttgaccgaagtaagcaccgggacggatgagttggatgccaacgcccggagagagcttgcgcttaaactttggctcattatctcggtccctggttctcagatgagagtgttttgatagtgtgtgaggttgaaaggtcaagagatcaataaagtgatgtcgagtggaagaccaggatggaatgaccgttggggttaagcaggaaagaagaggaaaagaaagaaaaaaagaggtacacgtggcgaaagaggaaagacgcgtcgacgcgtcatcagcgtccggcccacaaccgacacctcgaatctttaatcttcatccatcctatatcggtcactctctcaagtctttcttcttttgacatcttctctctgtagcctcggagaggctgacgatgtcaagcggtaaccaatggaaagatgcagatcctattatattgtcttcagatgaagatgagctcaaaaggccctcccagtttaatgtgctctcgacaacttcaggaccttctacctctgactttcaaggtcctaaaagacgttcgatctatccacctgtctcgatgtctcatctgacggccgaggcaactccttccaaattgtcaaacaagaactcaagagccaaagagactcctgtttctcaaatcgacaagtttcaggacaggcgctcaaataatgtcaacctgtatgacgaggttgaggtattggagaagtcgaatagctcattcaaacccggcgagcaagtcgtccgggatgaaggagactactttcaagaccaaaccgctcggcaggaagcctttggaaagttatctcgaatagatgtagaagtcagttctgtatttggtttatttccggtcagatgtgtcttgttctgatgacatatagtcacacttcctcaaatgaaatcatatagattcgaggtgtacaagatcagatacggtctcttcaaacactagtcgaagatctcaagcgccagaggaaggaacttcagcgcctaactgaagatccctcccgcagggagggtatgggggtgcactctgctctaaatcccacgtcagtaggaaaggattacagtcacggtacattcaagtggaccggcgcgcttaaacaatcgatgaaggacgtattctcaatccaccagttcagactctgtcaggaaggagtttgcaacgccaacatggatggaagagacttgatatggtccgtttcatgattcgaactttcgctttgttcccaatgacatgtagcgcgtatataataagcatgtcttgattttgacactttgaccatctccttatgggaatgggatggggtatatgcgcatattgtacactattcatccagtataatgccaactggttcgtaaagtattcaacagaaatgatatttattctcacactgacgatatcttcatttttgaatcattcaaacgttctaggcggaggaaaatctctgacttaccagctgcctgctatcatatctcgaggaacgaccgtcgtgatttctcctctgctatccctcatggcggatcaaattatgcaccttaccgagcacaatatatctgctgtcatgctcactggatcgacttcaaaagccgctcagagagatatattcgatcggcttctttatgggggagacgaaacacctcataaaccgaaaggcaagggaaaaaagtctgctacgcacgcgagcgacggggaagaggatggacgtgagatcaaattgatttatgtcacggttcgttcggcctctctgtcttctgcaaagatatcttaacgaggcttattctctagctctgcatttgatagccggagaaagtagcaaaatcgaaaatgctcagctcaaccttccaaaagatgcatacagccggtagactgtgtaagcctttctgatcaagtcccttcggttctctatacttcccggcctaggtgccgactttctttccgcatattcttttacagcgcggttcgtactagatgaagcacattgtgtctcacagttaggtcacgactatcgtccagactacggtacgaccaccaaatttagcgtctttgcggatgaggaaacatctcctttactgatgcttcacctcctcatcaattgtcctgtctttctttggtttgaataggaaaactatccgttagtgaaacctctttttgccaatttgacctaatctgggttactaattcagttcgtgatcctttaaacgagaacagattatccgaacgctctttcctggtgtgcctatcatggtgtgtttctgattgaaattatctgatctcgatacacctcacttatgctgatttgactacttgatcaggctgtgaccgcaacttgctcacgtaaggtcttacctgacttgttgaagatactcaaaatgaaagatatcacccctgccaacagtatgtttatcattctctctctctccatatacctgacccaattcttgtcatgatctgatggacttctgatcaattacatcttttgaacgataggcgcaaactcaagcggaacagtgttctttgatgcaccactatacagtcagtcgcatctgtgccttatctatgttgctgtgagtaaatatgtcgattggacatcatttgaactgacaaatcgctcgatccaggaaaaaaccttcattacaaggtcctaccaaagccgtcaaacgcgaaagatgcgttggttgtcatggccgattatatcgtacagaatcatgcgtgagtggatttttgaagattgcaaacactttttgtactgtcagaagttgagaatagagctgtgtcgtttttgtagagatgagagtggtattgtgtattgtttgagcaaaaaagtaagcgcatttcgtatacagaatttcacacgatctaattatctaggtgtgtatctgaatacacggattcgttcatgtcgaataggacacagaggtcgttgctcaagcactcatggagtactctcaaggcgctatcaaagcaggggtaagcctttgaatgatatctcatttgcctctggtactaagtaagtctgaagctttgtctctttctgaatgtatttgccttttctcttttcttgcctcttgaaacaggtgtatcatgcagatgttcatgacaatcataaacaagtcagtaaatcccatctttgtcctgagtttctcaataatgagccacaaaagggtccaccattgaatctcatctatcgcctttcttcaaagatgctgcatgaacgatggagattgggagaggtgaatgttgtcgttgcaactattgcgtgagtagtcttggattctaatcggtctagataatcgtctgttttcctaacacgaaactaatcaatttcttggaaactatgacaggtttggactaggtgtaagttccaaacaacacaaaacttccagtcagaacacattgaatgctgacttgacgtgagatcttggaatgcataaatagatcgacaaaggcaatggttcgttccagctttgtctgtcttcagtagattcgagttcgtgcacatgatagcctttctcaaccgtataccacctatcttcagttcggtttgtcatacatcacaccatctctaaaagtctcgatggatactatcaggagacaggtcgagccggaagagacggtcaggattcgtcttgcgtattgtactatcgaggtcaagacgtcggtcggatgagcgctcttatatgtggggtaagcttgatcaagctctggtcttgtgtattggtgatatgaaactgacaagttactcgattctcttcaggaacgagaatctcaaggaaaactatatggttcgcacaatcttgtgaaacatctgcctctcctgtagagattagaagaaatgctcatgtatgatcgtcatcacttgacatcactttctagacatggttgcttttgctcaagaccttgaaacttgccgaaagatgtaagtttccagaaagatattcctgatgttgatactcgaggaagaagctaagagcccaacctgtttttgcttgatatagactgtttggtcgatacttttcaacatcggcatcactcccctcgagtgcgtggtctgaacgggaagaagcctgtggtcactgcggtaaaacaagattcaatcattcttgatctgtgtgactcgaccgctcacacaatcgttttcttttatgtaaattatcttcaagataattgcactcgagatccagagacgatcatccagcagatagtgaccgaagagtcttggaagatgtatgtcgcaaagttttgtgatttcacccaaagaacgtccagtttggaaatctttctaactatctattgcacaatttgttcaatttggaattctactagctgcagagtcgccacgtcggttcatcaagcagaaggtcgagtgaccgtctccaaactggccgacctcgtccgcggtctcggtggtggaaactttgcatcagcagttcaaggagatgcaaagaagcgccggaaagcgcctgaaatggagaatgttggtttaaatctggacgagatatgcggtggaaaagtgatgatgagtaaagacgtgagttttgtttttccctggtctatcttcccatttgatgtttccttttcagcgaaagttgacaacatgaaattgttcaattgatatttgctatcgcaaaaggaggtcgaacacctaataactaatttgcttctgaaaggatatcttgccgaatgtatgttttttgatgtcctcttgtcgttcttcttcagagcgctgatgaagaaaccatcgatcaacatatacagtattcaagcaaacggcttatacagtcaacgtgtgagtctttgtccatactcccactttcactcttccatgtctaactcaacctttcatcaccggacactatgatgatccgtcgtagatacattatgccgggtcctcagtccctccgattgactaggcagtcgacgatatccaatgatgatccgtccttctcatctcatatcacctgtactttccctcgaaaaagcaaggttactcgaaaatcaaccagtcgcgtttctctagacacactcggtgggtcgtccaatgggaacgcaccagcaggaggaaatggaagcggagttggaaaaggaaaaggaaaaggtaaaggtaaggaagctgtcaaagcgaaacagccttctgttcgagatcgaaccagaaacaaacatggacgaaatcaatacggggacgatgacgaggacgaagataacggcgacgagtacgaagatctggatggattcatagatgatggcgatgatgagatagagatagagatagacgatgatgatgacgagcgggagaaggagattgtggtcaagcgtcaacgaccgaagctgaaatcaaaattcggcagacaaattctttcctcatctgatcatgacgaagaggaatgggagcaagtcaggaacgcgaaaagtagtatctgggacaagtcttttggttgagacgatctaggagtgaaaaagtgtatcatatatatatgtgtgtgtatgttttcatcgttgaagtatgttgcacagaaagtcaaagtctatatggaggaagttatttcatggtagtaagtaattaaagagaagaaatgctatgtgtacgttcgatgtatgcaagcatgtatgtatgtatgtataagaaatatggtgatgcgctgtctagtctcactcggatgatcgcttagaacctgattcagagaagaacgccagaactgataagcatgtagaaaatagggtgaaaagtctgagtctgcgcaaaagaagattagaacatacgagctcggatggcaggtccatatttgtagaagaggaaaggaataggcatcatcatctatacgccccgattgaagatcaaacccgaagacgtgagttacattgttcttcaacttcaacgaatttacagagtcatcagagatttaggcgagaagagggtaagaactcacaatagagatgaaacccatgatggcactagcccatcgagggccggctgcagagttgtagaacctatcgacgaacattgggaatgctccacctttgtttccccaaatcaatttgtaagagcgcaaatagtcagaaactgagacgatgaagataatatcaaaaattgatgacgaggcaacataccaacgagacgagtaaagagagttttggaagccatgcatgatgatgcatacttcggatacgaatccaccaaatatgtgtttgctccaactgtcgttcgaacgtggaggtgatttcgaacggtgagagaagggttgaaagcggatgtcagatggttgtaaacgaagaaacgaagagggaggggatacgaagactgactgtagatggcgataatggagaagcccaggaaaccgcaaccgaaagccgctccgatccaatgaacatgttcgtaactggtaaacgcaaagatgaagaatccagcgggcaagatctacaacaggaaatggaaaaagacgatgagtttatcggtcaacatgtttagcacctaaataggaagataatgaggaagaaaggtctcacaatagaaccaaacatcattgaaggaagtcttgcctcaggaggggtaggaattcctttctcgacacattcgaccgtcctcctggcgtaatactttccttgaagtgggatgacagtggcgtagacgactcccattccgagcctattgattagagatttgaaaaggcgcttagatcatggtgtctcgtttgaaatcaacatacatgatgttaaaaggataaacttacaacacgggaatgaatgagagaccagtggatccgaccgagaagctgataagataagatgatagattataacaatcaaggatcagacattacgcgctatgacgaaacaaagatagacaggtatactgactggtgaatgttctggaagacaatagggatggcaaagaacaggtagtacaaaagcccgtctgaagagaaaagttcgaccgttgatcgattagtatgagcaaactggaaggggagagtacaggctaagaaagaatagaggtgcaaacttacagatcaaacagaggtacatggtaaagagaacgataatgggctcagtgagcatcagttgaaccggtcggaccaaactctcaaataaaatctcggtaatcggtctcttgtttctctcctgttcggtacagaaagtttcatcgccggtctctttgatgagtttgtgagctcgcttcttaagaatgactggcgcgtaggtctcttttaggaaaaacaagttgaggaggaaggaaactccggtgattataagcagaagatactagagtggacacaagtcagagggcaaaagaagttcagtacaggaggtaataaccagatgagacgaggggccaacacatgaatactcacataaggccatcgccaaccaacagagacgagataaccagcgacgactggtccgaccacaggtcctgcgaaaagagtcccagagaagatggccattggtaatcctcgatcgggagtgtgccagagatcagtgataacacctgcgacaacagtgaccggagcggaagcccccagaccggccagagctcgaccaacgaccatagtggccgcgttttgagcgaatgcagagggaaaggtgaagactaatagtgagaggcacatagattagcttcgtttatactacattcccatgaaaagatgaaaaatgtatggtagacttgccaaagtacaagaacatggacaacttgagaataggtgctcggccatagagttcggataggggggcaaggatgagaggaccgataccgaatccaaagacaaagaccgcgattgtctggaatgatcaccaaaagaatcgaagaaacaagactgaaattagataaaatgcatcggaaggagtactacgaagtaaactcacgaggtgcataacatccaagttagtatgaagatccctggcagcatcttcaaagtccatgacgacctgaccgagcgagaacgagaaacgagcacaggattaagcactctgaccagatattgtccaaaacaaacgatctcgatagaactttacatacaagtgaacttcccaaagcgacaatgaagcaatcgaatgagaccaacattgtcttgaaccatttgacggacagcgacatgtttttcgggtcttccgggctggtgaatacatgtggaagagaaggctgaaggtgaggaaaagttcgatttacactgagaaaacctaaaggactgactcattctcttcgaatgtcactatcttgtaatctttgatacctttttcttgatctgatggaccacacccgactagagtgggtgtagcagaaggctgaatttggtgttcctaaaggtgggcaattgaaaatagattgtgtcagcctctctgtaaccacaaaccttctatcagataaggatgggtcagtaagaaccccggtggaacttacttcttccgaggcgaggatgaacccgtcggccgtatgggtggtgtatctagagaacgatcaaagcataagttcatgacatttggatacaagcatgcgcgcgcgagtaggtgtatcacagcagcaaacaagaagacgcagacaaggagacgaactcatccgttgttggacccttttctgttaattgagggtaattcagagcgtccaaccctgtgggtggggtatggtcatgtgtaggagcggacatggcaagaaagagagatttgcagacgtatgcggcagagttacaaaaagggatgctctatgtacccagcggtcctgagtatgctttcgaacaaggaaaagaggtgtatgtgcgtcgcgctgtagaggaaggagaagaatagagagaagaagggaagagaacgttcaagggcaaccctttatatagatattcccatcggttcgaccatggagccaacgatccgaattctaccccgcaataaaaacacgatcgagtgaaaacatcaaggagagcgtaaacgactcgagagaaacagaaggagcgaacgagaatgaaatgatgagtaggagaaggaatcctcggacatccgctaaccaggcagcggcggaaaatctcggccggctgttatctatcggaagaaaccgggagcttaagcggcacaagaaaattctctttcgacgcgcgattgttccctgctgtaatcgtcttagattgtcgtcgtcatcaagaacagcttctcggaagttggagcaacttaaaaagcatgtgaatcatgagtgagaaaaaaacagtagaagggaaaaagaaaggcgaggttcagatacatgaagggacggatggatggatggatggatggatggtcggaaggatggttggttcgcacgaggaaacaaacttgtcgaggagagaatcttgagatattttcactccggacgcgcagtcgatcttttgcccgtccccgtccgccgctccggagccggatccactcggccgtcagacatcatggtagaaaaggagtcgatggtgcaaaggaaagaacttctcagatcaacaagatttaacagcattgttcgaaaatgactaaagagcaaagaaaacaccaaacggctggcgcgtgtacagatagggtaaaccacagaccgatcaatcagaccggccagagtgaaggagagggcgaaagagaagatatcaagtcgaaagagggctatagaccagcacagagcaagcaatggacaagacgagcgaaggattatacacgtaggtgtatttgatagtccttgaacaagcaataggaggaagtatcaagagaggaaaaaaaaataaaaaatgagatgaggaccaagatgatgaacaaaaatgaagaccgaaagcaacacatcacgaagactgaaattcaaaaagggaaaaagcgtccttggagcgcggtgagaacaaggaaacgacaggacctcaaccctgccaacctagaggtctttcaacatccatcggcttcattggcttagatccccatccgggtccaacttcagtcgaacttgcgcccacaggacgccccaatgaaagccctggcggggcatcatatgcgattccatcatacacatcctcgattccatcgtatgcagagtttctcaccatcgcgcccgccgcgatctcgtcaggcgataatgttggaaccggtttcctctttgagatcgaaaccgatcgctggactgggccagcagtgatggccgtcgaggagtcggctaccgacatcgtcggtgtcgtgtctgccacaggtgatccctgaggcgttttgaatgggttgccctggccatggttgggatccacctgttggtacccatacggttgcttctggtgctgatacagcccctgttgatgagaagaatctgaactagggggagagtttcccatagacgattcaaaagactgatacgcactcggaggagcagacggataaccggcaaagagatttcccccgttagtctcgtttgtcatactcatcgatggcggaactggtaacggcctaggggggattaccggcggcaaattctccatctggatcatcttctcatctgctcttcctacgtaaggctccttcgagtatccacttttatcctcgccctggttccgaacccatcctgctcctgcgcctacacctgctaatccgccgccaagatcttgcccgtttgattcagcgtggaatcctgtatccccatccgagggtcctctcgagtgagacaccccgtacgcaccgtccgatccttctcttgccttcttcttcttccaaaagaaaaagattccgatgatgatggctaatccggcgataactcccacgacggcaccggcgattgttcctccactaacagaatttcctttcgaaccagcagcagcagcagcagcagttccagacgcagaggcagaagcagcagatgcagaagtagaagcagaggcggccgacgttgacgaagctcggatggaagtcaccatggaaggagtggcagacgaactcgatccggaagcagcagcgattaaagcgctatttctgaacagactcatgtcttcgaggtttgtaacaaggaatccatttcatactcagaactcggcgcgtcgcgctttgcgactcgagaggacgattcactcacagtaaaaaccaccacatgccgtcgttacgtttccaccgcaagtgtactgacagtcagtttccccggaggttaaaaccgacgtagtccttaaatcattcccgcatgtacactgggtcgaatactactccaaaaatccacacgaagatttataaattggctcatcagaaaatatgctctttttcaaagcaaaagcagacaaagagaccgacctcaataccggcataaccccaaccaccggtctgacagtacgagacacacatcgtctgagtcatatttgtactttccatgtagccggtagacaacgcatgggtggtactgttgctacctgaggatggcaagggatcagagtagcatcccgcgtagacccaagaagtcgagagtgaagtaggcgtcgacggagcagctgtggtagttgtggtagctaagtacacatacgctcaaacgagcaaagctgtaagaattcctcaaacttcgacttgaaacagcaaaagattaaatgaataaataaaagatgcttactttgagcattaaccaacgaggcagcgataataaacgcaatcgaggttgcagtcattctggaagccatcgttgaagcttctttgacgtatcgtacgtatgtatgtaaggtgaacaaagtcttgtgtgtcgtagtgaaacttggtggtagatgtttccctagagggccggcctcggaaatggagcgtatatactcttcaagagtaggatgagtcgtgggcggaaaggcagagaagacagggatggggtcttgttgaggctgcatgcgaggatagtcggaaacgagcaagacaagcatgggttgcatctgcaatgtcagtgggtgcactagatggcgtattattatgccccagatagtaaatacatacagatgatgatatgaaagtagttgaccgctaaaaagcacggattaaaatgataaaccctgtgatcaagataataaaccctttgatcaagatagatgggaaagatacaacaagaggataggaagacaggtcaacgatatgtgatgtatgaggtaagagtatgaaggttagtcctcatcaaggatggctggaagaaagcaggtagatagaaaagaaaacattcaatagcttacgtaagatttttttcctcttagcttccttgcgtgattcgctctggatgactgctgctactcgttgtcaacaaacatcggttcattcgagagatcaccactatccttgctcaaagcttttaattcgtcctggtagttagagagtcgatgcatgagaaacctcagcccagtgttcaggctggcggtacaatgaagacatcaaacgatcataaattctatatatgtaggagagaaatgtggaaaacaagataccaagacaatacaggatcaaaacaggaagaagcagaagaacgatctagcgacttgcagttgtatatcaaggatctcaaaagacagagagaaaaaaaacattctagttgtgacctccacacgattcatgcccaaccaattgtctacgctgctgaccacctttaggaattttactggtggtattccagaaaaaccaatcgtcgacgtgctcgttcaactgcacagtaatcggatcaagcgaaagacctaagtgagaagcaattctcgccccgatctatgataattgattgatgatgaggagaatcagcttctgaagcgaccaatatatcgaagaggacaaagaagtttctctcaagaattacctcgtaattctctttcgatccatggaaatcggtcgagaagggttccatatataaattctgtgggatacggtcattagagcaaatcacacttttcggacaagaatcaagatacatcaagctgactcacaacgtctactccagagtgaccatgggtagcccatccaagttgagcgcgataagaagacatattcgccaaactaaaggttgattgaactcttcttagtaccttcaacaatcaccgaagactcttgtgtcaagagcaaacgacggtcagttgagacttacaatacatccacccaccactctccacctacaatccccatcgactcgcccaaaccagtgacttcatcgtgtgttgcatccatgattcctaagccctgcttgaagatctcctctttcaaccaatcttcttgaatttcaccctggtgaagtttcgaatgagcaagtatcaactggccaagcgccgccgttgagtgagtcacattcttcagtgcttgcgggtaccagttgtacactggataatgatatggtgaaagctgtcgagcgagagacagtccgccagtctcgtggtcagatacagagatcaactgggtgttacaggagggatggtctttaatccattttcctgtggtgaggaaatcgaaatagaatccatgcgaaaacagatcagttggacggcagacgtcataaaaactagaagaagggaacaaatcagacgcacgaacgacagccacagttctttgatactcaaaaatctgacaatttaatcaaagtggtgtgattagatgagcatctacaccatggtttgactaacgaaagaagaaccctacctcctcggcatgcgcccctggatcattggaatggcctgccatatcgatccgactgccctcaaccatcaagaagaatccaaggccccagccatcgggtctgttccagaacttcaatcgagaccagatcgaaggctgactattttttgctgcttcatcgagggttcgaagggcgatttccgtcatgttcatcaacgagggctcggatgaggcaggtgggagatgaacccgatcgagattgtagttgagatggtcgccttttgaatggaaaaaaatctacattcagatccgtccgtcacacaaataccggaagctgaaataaaattataagaccaacggttgaacagtcctaatacaggtaagggtaatgcttttgcgttccttctcgatgagtcgagcagttctttttccgaaagaatcacgttaattcccttctttctggccgactcgagcatgtccatgttgtctgttctacatgatgaagacgtttcgtttggttgaaagactgttgttgttcgtttgtttcatcagtaccagtgaaacacacagatcagtcattgacctatattggcaatgactagtcacgatcaaaaaataaaagaacaaacagcaaagacctcctcctaaggcgagatctacaacatgacccaagggaccatcgccgacgctgattcaaagaacgaaatgtgagattgtgtgagtatttgtgtaacattacccctcaagtataatgagaaagggagaccaacaggaactcggcgatctcggactgggcagaacggaaactttggttagtacacgactcaagaggaactgcaaagggcggggaacaaacctccatatctcgatcaaccacatgggcataaaaacaggcaggagctaggaggacacgtgccaagacggataaaatagtaagcattcgattgtttgtagatagcaaaaacatagagtggacgcactggcatgggtcaatctactggtctggtgtgtttgattccatcgaacaatgaggatgtcagctgagaaataaacagaaataattagaaggcatctgcttacaacgacaaggcctgtcttgtaacctctctgtttggccgcctcgagaacggttccgcatggcttgtgcctacctatgaatgttgaacaaaaccgcctcagaactcagcgcgcgcacactttaccgcttcaatcgagacgaaaacattcctttcgatactaaccttctggctcaactgaaatagctccgttgtaagacttcatcgcacaagaaaatgcggtcgcgcctgctgctgaatcggtaacaaacgaatttgaggaccttgttctcgagctcccgacgaggatctcatctagagggaatttgaaatcgtccttccaatccaagccatgagtgtgtttgtagaactcgcgagcgaatgtttcagatgctggaccaaatccatcggaaatcatgagaatgaagtttgttcgattgggttctgagaaaaggcattgatccaaacagttcagtcacgcatcagaagaagattacgaaaagaggtacgaacgatgtgtgctagcaagatagactccaacaaacatgatggatattggcagagccatcagccatgtcggaagggatcttaaccatgtctgtcaatcagaaaatcccgatgagaaataaaccacagagatcccacatggtattgaatgcgtttgttcctcagctagacatgagcgataaaaggcactttccaagcgtgtacaggaaacataccttaaatccggcgttgtttcttctagaccgatcggaattcaactctccaattgtgtcttcctcgtctccatcttcgcttcttgcgttcagtaaatgttgtgacgacatgaggtagacgtacacgaaagggttgaactagagctctggatgagaatcatctcggagggtatcgggatagatagggttgctgaaagctgtcctatatcacgtgacatgtcatcgccacactcggcaaagacaacgcttccctcaccaacgcttcgtctgcttcagagattcatccttctttccttccttccactcaatctctttctctcatcgccttcttcattcgaatcaatatgtctaaccctggtaagcctgatatatctgtttgttctacctatgagttgcatgctgataatcttctgttctttttgtcactcactttacggtgttactcatcaccgtgcgtgtgcgatcgatgatcgatcttctcgatcacgcggccgttgacgtggtggaactcgtcggccttgcatttacaatgtcgcatcacactttctcatcaaataggaagagtaatcctttcgcgcctggcgcgtcaacttcaacagtccgccaagtctggtggagggtccaatggaggatctcctcctccgggagcccttctcggtggaggtggtgttgctctcttgattgctggtggattgcttctccagaacagtttgttcaacggtcagtccttctcttatattgaaattcgctgagcatactatatggccgctcttgatctgctggactctgagtctacagtaactccataaggtttgtaatgcaagcaattatacatggtttctcaatgcatgttttgcattgtttgacaactctttacagtcgatggtggacaccgagcgatcttgtatacccggtaagctcttgacgctttgttcgccttaatttactatcacaacttagaatatactgactaatcagttcgttaatcatgtcgacatggaccgaattaatctagaaccggaggtatccagagcacgatttaccctgaaggaacccacttcgctgttcgtatccgcctccccctttttgccgtcctctatttttatacaggcagcggcctcgagtccttacaatcggcctcatatgttacaccaaacagatcccctggttccagactccgatagactttgacgtccgggccaagcctaggtgaggatccccagaaccgtcttttgtgtttaggtttatgagccagctagtctgtctaattctaaatagctcaccattggaccacgttgaccaataaccacagaaacatcgcttctttgaccggaacaaaggatttgcagatggtcaacatcacttgtcgagtgctttctcgacctgacgtgcagaaccttccgacgatttaccgagagttgggaacagattatgatgagcgtgtgttgccatcaatcgtgaatgaggtcttgaaggctgttgtcgcccagttcacggctgctcagatcatcactatgcgagagcaggtacagcacgatttatcatcctcagcatactcgtcttggcagtatataactgataaattgaaattcaatcttccataggtctctagattggtccgagataacttggtccgacgagccaaccagttcaaccttcagctggacgatgtgtccatcacccacgttgccttctcgcctgagtttactcacgccgttgaaggttcgttgtgacccttcaaaccgatactgttgttcatactgatctaaatggtatttgttcaatatacttcttttcgtcaaaatgaacagctaagcaaattgcccagcagaccgctcagcgagccgctttccttgtcgaccaggctattcaggagaagcaatcaatcattgttcgagctcagggagaggccaagtcagctgaattgatcggagaggctgttaaggccaacaaagggttcctcgagctcaggcgattggaggctgccgttcgttttatttgttttttcttaaaatcattatacgagtgccggaatggcaagttgttgaatcaactaccttcctcttttcacataacagagagatattgccaacattgttgccaacagtgggaacaagcttatgctggactctggatcccttcttctcgatggtgtgttcttcttcatggttctggaacatggatgaactcgcggctgatattctcatcgtgtggattcttgctttcttctatagtgacggaagagtctgccaaacgttaggagaaaaacagttggtgtgggagcaacggggtggatggatggttcgctgtaaagatacaatcaaacatgccttctttctaaacttgcactggagaatgaaataattaaagcacaacaccggatggcaagagcccagagagggaagtgcggcgaaaactgccgtttattcgctgacgattgttctccggtccgcaaacccggggcccggaaagcaaccccaacctttctcgtctcttttctcccgtccttttttttctcttctcacataaacaccttctaacactgactaccaactcccatctcttctctccttctttcatctttaatcaatcatacaccatcatgtctcttgcttcacgttagtcttgggactggaacctttctttttcctgttctttttgccatgccgcttctccagtctttccatctgctgatgttttttttcttctccttcatctcaaacggcatatatattcgtccggcatagtctacccttcctggaaacagctgcagtctctccacgactccaaagctggctcttcccttgttctcaaagatctcttcgcgtccgacccgaagcgattcgaacagttccaggctacatacaacgcttcgacagaaaagggctccgaagtcgagatctttttggattactcgaagaacttgattgatgaggacgtctggaaggctcttttgagcttggctaaggaggctggttcgtttaaagattcttctacgtcttgactgtgatataaacacaatggaatacccaagtctaactttatttgggacgctatccttacccttactcagatgtcgagaagaaccgagatgatatgttctctggaaagcacatcaacacttccgaggaccgagccgttcttcacatcgctctccgaaacctttccaagtggtcaatccctgaggagggtactgaggaggttttcgaggtcctcgagcacatcaaggttttcaccgagtccgtccgatctggcgagtggaagggtcacactggtaaggccatcactgatatcgttaacatcggtatcggaggatccgacttgggacccgtcatggtgaccgaggctttgaaggactactccaagcgagacttgaagtgccactttgtctccaacatcgatggaactcatctcgttgaggagctcaaggagtgcaaccctgagaccaccctgttcatcatcgcctccaagactttcaccactcaggagaccatcaccaacgctgagtctgcccgagattggttcatggccaccgctaaggacgttagtttgaacgttctacatcttccgctcaccaattgatcattacatgtccgttgagccttctcttcgtgcccttgacttcaaaacaaacagaaagcccatgtcgccaagcacttcgttgctctttccaccaacaccaaggccgtcactgagtttggaatctcctctgataacatgttcaagttctgggattgggttggtggtcgatactccctctggtccgccattggactttccatcgctctttccatcggttacgagaactttgagcagctccttgctggagctcacgagatggacaagcacttcaaggagactccccttgagaagaacttgcccgtcattcttgcgttgatcggtatctggtacaacgacttctacggttcgtgcggagtttctgaaaaaaaatctgcttgttcctttatgtgacagaaagagctaatctggctcactttggaatttcttggttattttcgtactctaaaggcgctcagactcaggctttgcttccttacgatcagtaccttcacaagttcgctgattacttccagcaggtttgtctgtcttaaaacttgtacatccgcctccttgttctcacacactcgtctgtttttttcaatcaacgttccttcaccatgaaaacagggagacatggagtctgacggaaagttcgtcactaaggacggaaaccgagttgactaccagaccggagtgagtttgacttatcatgtgggagggttttttatctttgccttatgacttacttgatcatgtaatccttttcctcgcctcagcctatcatctggggacaggccggaacgaacggacagcacgccttctatcagttgatccaccagggaaccaagctcatcccctgtgatttcttggcccctgtggagacccttgtgagtagtttcgtcatcagtgcggagtccccttggcccaaagatgatgactgacgtgtaccgctgtgtcatctatagaaccctatctctggtggaaagcaccacgagatcctcctttccaacttctttgcccagcccgaagctcttgctttcggtaagaccgaggaggctgtcaggaaggagctcggagctgccgcttccaacgaggctttggctaagagcaaggtgtttgagggaaacaagcccaccaattcgatcttcttccagaagttgactccggctactcttggttctttgatcgccatgtatgagcacaagatctttgtccagggtaccatttggggcatcaactctttcgatcagatgggagtcgagcttggaaaggtgttggccaagaacattctcgctcaactctccagtccagacaaggttcagggacacgatagctcgactaccggtcttattcactacttccagtctcaccgaaagtaatcaggaagacggagtctgcctgtctgaaaccttcgtattcacgtacttactgtagtattatatgcgtctttttatctctatcaatgtgttaatgtgaactcctaaatcagttgagcgtagataagaaagtcacgtgatcatcggaaaggtccgagcctcccacaaggttgcttctcatccttctcctaacaacgatcatctcatcgttcatctctatcacacatccatatcatggttccaatcttggcttctattcttgcactaagtgtacctgtccttgtgatatccatcccgatgagcagtcgggatgacaagctgcggcatactattgttaccaatccttctcccgctttcatctctgctcacgggtccaactattacggaacctacggctcggctgaatcctctaccccgatttacattgtctctcagtccgagtccggtcgattgaaagacaatttcggtggagtcagtgtctcttacgatgagggacaacggcttttctggatcggtcaggcaggattggctgaggattttgacgaggggaaatctcctatgaaattcgcggaaaacgtaaacgagatcctggatcttagtggatcagctttaagcgctttgtggtcctcaacatacctggccggtcaagatcatcagatccaggccgcttttgggaaccctactcctcgagatgaggctgtcggactaattcatctggatcccaaagagtttgctgtagtccaggtcggaaagaaggtaatcccgtacctcgatgtacttctgcctaggggactagtggcggtcgcgttacctgagaacccgttgccattgatggccaacaaggtcaatgacgagagaatagagttcttgagaaatgcgttagtcactgagctcttcgacttgcactctcggcatctgtcctcaattattgattgttccatccgtcttatctgaggatatacagcaccaaacatgtgaagcatgactccaagatcgacaagatagtctcatctctaactatctctgaattcaaatcggccgttcagtatctcactggcgaaaattcgtccagtcagtctgtctttgacttgatatccaaatggtttgtcgggtcttctaatcacgatgactgtttttcatctaacggtccgtttaggtcctatcacttcccgacactccttctcggatggggctaagcttgctgctaagtggattgccagcgaggttgaagagacaggggcaagctgctcaacacacgatttcttacctgggtttgctccaaacgttctttgtgagtatcccgttcacggggggaagaagccgaagaacggtcaaatcattctttctggacattacgatgtaagttttccagtctgcgtcaaaacattccttggctttgaatgcaacgtgaaaactgacgacaaccatatgtctgttcagtctcgaggtacttttggaagtcttcgaatgcctggggcagacgacgatgctagtggaacgagtcaacttataggcatcgctaaagccatcaaacgagctggtatcaagtcttttgaggagaaggtattgtccatctgtttttttcttcccatacgtcagctcaattttgccaactttgttcttgatgttctatctttctgtcaattcaggtcacatttgcattctttgctggagaggaacaaggtctcctgggaagcgccgctctcgcaagtacgtacagttggaatcatgcctcactttgataagtctgtacaaaaatgaccaagggcttatcactccccttcttgatattttgattcgctcacctgtagagcagctctatatgcagaacgctaccatccttctacaagtccaggccgatatgttagcctaccatgatcctgatgagccccttcaattgggcttccctgactcgttagttcttgatatctcgagctttgtacatgcgtcttcttctgactaaacctaaattctggaatggtatcgtctcctcttttgtaaaaatgttcttagaatcggacttcccgaggctgcggagcttcttacaaagatctctggaatttattctcccgagttggtcgttggcgtaaccaaagcttgctgttctgatcgtgggtgttaacgtccatgtttatggggatacttggagaaatgtgatgtattgaccatgtggatttcccttgaatgttctgaatatccagatcaaagctttgtcgagtacgggttccctgccactcaagtattcgaacgaaacggccgttagtatctctgtctcttcttcgactatgtcagtctcgagatcctgtctaatctcatcttcttcatcctttgatttgtctctttgttcacagcgatcattgatcctacgtaccacaacagtggtgatcttagtgagcgtgtcggctacgactttaatcagctcaggtctattgccaaagtcactgtgagttttggatgctcatcatctgaagatatttatgagaagctagttgctgggctttacaaattgaggtgcatatactgacggctttctcaaccgtagtttgcgacgttgcttgagattggaggatacgtcgtttgatttcttctgaagtctaccagatcgggctagccttttctgcactttctcgtgttttcttgcccattgtgtaataatctcttgttctccttctcggttatgtctatcttataagctccatcgctaagctgcagatggtccactcatagcataggtttattcacctacctttcttatgctctttgcccataacactctatggctatgttttgtttgatggactttgccctcactgctcgtactgtatctttgttcttcattctgaattagttgatgcgcttctgcgtctcttgctctatgtcgatcaagatgcttaaatatcttaaacccgaatccgcccttctatgagattcctctaaatcagatcaactgttgatgtcggagtgaaagagaccatatcatgattagaaaacaaaccgcagttggaagcagagccggtctgtcatatagcatgatgttgagttgttcaaatctcgcatttgtctccctatcagtgatcatgggtagaatatttctatcgtctcttattccatttctactgatcgtcgtacatctagtcatttatgtagtctgacgtctacatacaggtctgaacaacacttgggcttgcttcttgatatgtgaaagcgcgttttaccaattcggcttccgtcatgagctgaacaagacctgtaaggaacccgaacgtggctgatgggtgtgttcgttgttggccatggtagttgtacgggatgctttgaaacttcttcgatagctacctacggatttgaaggtcctttcgaacctgcatttccaaacccaagctcccatgccttcacatcgaccgccattgtctcttcccactcaactctacctaggccttgtctactgtttttactactgctgatgatactggaaggatgtggttcggcagaggttccctcccagaatccttctctctgccaagcttcgagtgccgattttgatgtttcgaatgaggcgctggaggactggagtatgagagatagtgacctgagtgttgataatgacagtgagagggatgtgaggagtggaggcagcgagttgactatgatttatcacgacggcatcaagaggaagtgttttagtctcaagaaacccctgcacgagtaagaaaaggaggttaggaaaagggacgaaccataatcttgaagagaccatgatacccatagaggggtgatagttgcaaattcgactcctttaagcttgagagcttccaagagaaggtcttctgctagttcgctgagcgctgcaaacttgaacaatcgtttttgctattgtacgtatgcatggatcgaggtcacggtcagtatgttagacaggataacaacgctgtatctaagaaaaggaggacaaaccagtttggtaagaacactgtcgagatcttgtttggatgaagaaagcttgatcaataaggacgaaggtgttgggttgaaaggatacggctcgttcggcttaacgcctagattactggttcccatttttgtcagacgtctctatcaatttccagctgagtagggaagttcaggtggagagggaagccaacttactcgagttctgttctcgaatctacacagccttttccagccttaattccatcggctaggacaacttgttcccagtccctcaatgccttctcgaattcgatcaagatgagccggattttgcggtggaagggagttgggtcatacgagggtccggtgctctttggagatattggcggccggatcggcgtcggtgaaggtgacgagggacctttgagtgaagccagcctagacatgagagaaagcgtatgtttgttcttgtatatacgtgaatgtttgtgtgctttacaaatgtgctggagacgatgacaacaacgacgatgatgatgatgctggatggttgggatggatgtttaacgtgaacgagttttccttctttaccaccatcacctctcacactctctccctcttcgctcatcactccttccaccaactcccttctatttcatcccatatcgtttcagtcactctatcaatcttcgaatcgttccagatacggccgagagatcaaggcgatcagcgagagtagagagaagattttttatttttttaatcgataatccgtcaaaaagggtgggaatacacatacacgcacgcctccatctctgacatcctacgttgaatcctgagtcttcttgctcatcgaatcttcgatacttcgtcttctctgttcgtcccatagtcaattccatcatgccttcaaatacaagtcaccaacagcagtctcaccctaaccatcaccatcagcagcagcagcatcatcagcaacaatcatccaagccacctctcccaccatcaactcaaacggctatgaatcaaccgagtggaaatggagctggtccagatggatacccaccatcggcagcggctgttccatggccaggactgttgccgtgtttacatttgtatcctgtgaacgattcgtttttgcccaagcttatacagcttccacccggaagtgttcacgtatgttgctctttcctctagtctttctctcctcaagttcaaacgtgtttaaggtcgcgcttcattgacgttaatccaaataaaatctcgtgtatgctaatactgatcacggtcgatatttccgaggacaggttaagatcgggcgacagacgagtgctaagacggtgcctgacgagcgaaatggatattttgataccaaggtactgagtcgaacgcacgccgaggtttgggaagaaggaggcaaggtaagcaaacatttccctctgagctctggatcgctttccgattgacggttacggatcaatgagttaaatcttcgcttaactttcgggctctggtgttgaacagatatatatcaaggatgtcaagtcctcaaacggaaccttcgtcaacggagaaaggctttcagcagaggcgacagaaagtgaggcgtacgagttgaagtccgaggactacgtggtaagtctctgacggaaattcttagactgttctactgcttatgtttgagcttgtctaaccaactgctccctatgctctctctctctcttcaaaacgcgcaccttatctcttttccttcttggatcctaggaattcggtatcgatatctgtggggacgacaacaagacgatcgttcatcacaaggtatcttccaaggtgtactgtgttttgggtccgcaagatgttgaggcttctgccaggtgcgtttgtcttttcggatttctgatcacgtaccttgctgaacactagttcggaaacacgtctgttaaaactcattttagggaacttcaagagtacaatcaagccatgtctcgacttgccaatatgcgccgaggaaattcgaaacctgttggaccaaacgtcaatgacctcacaaggcagctagcggtcaggacactgataattttttctctcaacagtttggcgactgatcaacatatgattgtttcttcgcgaacgtacagaatgagcttcaaaaaagtagggagacagcagttgatctgcataacctccataatgcgatgaatgacatccacgagacgttaggtggtggtaacgtatgtcttccctttcttatcaacttgaatcactgcaggttcgaagtacgtctattgaacatttcaaagttctctctgaaccagttgccacctcaaatacatgctatgcacccgagtggaccttcgcatgctggttcaaacgctccacagccgtcatcggaggttctacaatatcttcaagctcgaattgatgataaccagctccagctttactcaaatttaggtcgggtccagacccttgagggtcggctgagtgagcatgagctcatcaaaaaggaggtcgaggacctccgggataggctaggcagcttgcagggtcaactggagtttaagacaaggagggctctgattgccgacgaagaagccgacgatgatgtcaaggattaccatcacaccggagaagatgaggaagatgaagaaacggaggaggaagaggaagaggacgattcggatgatgatgcgagaagcgtgcagaccgtgaaagagggcgacgaaggtagagcgggagggagaggcattaagaggagacgaggaaatggctcttccgctgtgagagcttcatataactatggagaggtcgacaatgagcgggaaggagtgtacagaggttcctatcatggtcgacacggaagatccacctcggacagtaccggacgagcgactctgagagatcgaccttccactccggaacctggaggaatctctagttcatctcatctccgatcgggctctcccaacagtttgaaaaaaccagaggaggatgaagaggacgataaaaacgcgcggggttgcaaccggatagacgaggaattaaaacagcagcttcaagaacatgtccagcaaacgcagacggtgctcgctcaaaatattgcgctgaccactcgtttagatttgcttggatctgagttggatggagtgcttggactttcgaaactgcttcaggacgaacattccactgctctttccaccgtcagtcttcttgaaacccgtgtggccgagcttgagggacaggtgggcgaggtgcagggtaaatgggaagtttggaaggaaaagatggaggaaacatggaagaaagaaagagattcatgggatagcgaaagagaaagaatgaaatcggtcgtcaaagaatgggaggaggctaagagacgagccgaggaagaggaagaggaaaggaggctgaacggcgatgaggaagacgaagaaccagaggatgacctccgttggggcaatacagatcctacagataaaaccggacgaaaggcattcccgatcatgggctcgaacggaccttctccggacacaacgaatgatcccaacggcacgattggcgcactagcctctcgaacgcttggcaaacagctgtcaaaatctcaacatcaaaacactagttccgacaatggaactatccatgctcgatctactggatcatcctcttcgactgcatcatcgtcatcctcttctgtctctgccggagtaggcacttcatctgagagccgaataaagtattcttccctccgaacactccttaacccattgtacactctgcctcaatcttccattacggcggataaccagactcaacgaggccacgttccctcatcttttattcggggagcggccgcgccatcttctcaacttgattcgtcctcgtcttcgtctggatttagctccaatggcgagaagcagccgctcaagaagggcgcaagctcagggacgactcaaggctcgttgtcggaaagcggggcaggaaggaaaccaagtgcgtcactcagggctggttcgggtgaaggtgcacttggagacgtgtcggagggagaggtcgaagacgagaatgtaagcgtgacgaaacgagcgactgcagctttaggaggaggcaataagaaaaagggaggaccagaagattatacattcacgcctgtaagcttaaaactttctactttcctctggcaccactctttcgtatgaggcacaagactaattcttcgttcccaatttcaacccaaacagatgcaacttcaaggagtcgtcgtcgttggagtagccgttgttctggcatttaactatgataaactctcccagttcatcaaaggttgatcttctctctgcattcgttcctcattctctcctctgctgtgtatacggcttttttctttatataataaagtgtatatgctatcatcaacgtcttttcttattcataaaactcttcaaccctcggatctttcgatgttctcctcaacttttcgttattccaggcgttcaccttttcgatcaatttcgtgtcttctttgcccttcttcctcttcgctcaccccatcttctgctctcttcaactctattaatgatatccaacgtcactatggatatagagcacactaaatattgagctaaccaacaacggcatgatatacagatacgatttcaggattctagtggtgatgaacaaagtgctatctaaacaatgtaagaacgctatggaaaaaagatcctctcagtctcaacttcatgatacaaacaaggtgcgtcctgtgcagttcacgaatcttctggctcagcgactgttccatctaattcgcagatgctcacgaactgttagaatagaggtgcaagtcagaggagtgtgatggtttttttcatccagtgtcaacaattttactctaagtaacggacaaagcgaaaagaaaagacacgagaaaaatgactaacttctttcacctgagccgaaaacatctccatatcagtcaccggggttgtcgcgccaggaatgctactcaaactaagagcgactgcgacggttgtttgtcggatggcaggtttttcgcctatggcgctcttcttcgcgcccagaacaaacttcttgcatttgctgtagatacaagggggagtaaacgagaaagagtcagtcccgatctttacgccgaatacacttccttagaagaaaaaagttgcattgaaaaatgacttactcctcagataagttgtaaagcattttgaggtgtactctcagaacaaatgctagggagatgatcacagaaacattggccagtgtggaagctcgatagaatactagattcacataacgaacagcaaagagatcaaaaacacttcaacagtaaacctatggcagaacgaaacgacccaccatcactgtctgacctctctgtaacaagctgctcgtcttgaggcatctcgtcctctggatcgggtgtcaaactctgatacaagagctcgccagtaattttgacgtttcatcaggaatgttatgccgaggcgtatcaaaaaccagtttgatgagagcaaactcacacttcgctcctcttctgagtcttcaggtacctctgttccctcgttctcatcctcatcctcttcttcttcatcggattctttctcatctttcacactcttattttgctgtttgaagactttagagatacgcttacggcgttctaagactttggatactcgaatgaatctgtcgtcaaatgatgccgcttcttccaatggtgtcgaaggtcgcatgctagagattactccgaaaaggtgcatgccggtgactgaaatgaccgaagtcaggtaatggattacaatgagtacttcttcctgagttttgtactcgagggtagctaggttatccgccagaaaaaggcagaatccgacatcgttctagataacagagagaacatcatgacgagagcgttaacacagcttctgtgagatcgaaaatgattgacgaaatacataccttagaaaagatcagtttatttggagaggtactgagatcgacttcgaacggcctcaggagaaaacgaagaaagtccttcctcaaaagacgtttgtctcggagcagaccataccagtgccttaaaagagctaacggagtaggctctactgaggatgtctgaatagtcaatcggaagcctgtattatagaattccaatactgtcaatttctagctaaaaacgtcctacattcagtttcagccacttcatacgaacctcttacgactccatgggccgatttgacttgatagtcataacaaactcgagctgtttcgaagaagcgactgttgatgatagatccatgtttgtggtgtaggatcgcatgcaatgagaacgcgcgtgaggcgacatgaaggtcggcactagtttcgagagcaattatgatcggcgcagactatcgtccaaggcagatgtcaggcaaatgccacgtcactctgaatagaaaaaccgacaaacctggataggatgagccaatccttgtttgacagtgaaggtcaagatctccatggcgatgtattgagtttgtagatgtaaagcagcatcgagaatttttggaaggtatcgttgaacgatggtagaaccgacactaaaaattcattagagcaggatgagcacttagatcattgtatctgagaaggatcaaacgtaccctgattcagcgaaagtctccgtatctccgatgagctcggtcatatttacttcgaacgcgaatggagaaacgatacgttgagcgtcagtcatcaaattggctatatatgacatatcaaagcagatgtctaaccttctcgtgagcttccatcaggttgagcaggaagcctggcagcttgggaaatgagaaaatcctggatagaattgagcaaaactcctatagtctctagatcaccggaggcaaacatgtcgtccataagtctcaagcttattgcttccaccatgaatgtgggaaactctcggaataaaaatcctgatttacacatgcacgagaattcattttagtagcgattcactgaagatgaaactcaaatattctaacctagagattggatcatagcgcgtgaaaccgctgggataacaggaagagctcggaatgaatgaattaggcggaaaatatagtctgagatattattctaaagaggtaaaaccagcgaatagcagtcagcacgatgcgacgtaactggagaaggacatgaagtatctaccttggcaattttgaagatgtccgctgccaattctatgatgttgaaccaccaagttagcttttgacgagttagatgatgataggcaagacatacctggtcggcttttgcgaagctcatcaaaatcacagttttcccctagaagagcagtgatatagagtaatagacaaatgcttcgttggttttggggtaagcttcccgtcttctcatagctcgatcggacagcctcaagtttggctgtttgaattcatagaagaagattcttcaatacaacgcccaacaaacttcacaacaacgacaaaagagagaaacacagataataaagacataccagtgcaactccctaacaacttgaccagccgctcgaaattatgcgtaatattattgactacagcgcacagacaggcaataatctcttgcaagccctgttgaagaaagcaaaagagttagtagagataataagaaaacaaatactcaaaaacttacagcggaacctccgacggcaccattgaccataggtagcaatttaccctcgagcttcttggcaaaagtggtggcggttttaggcatcttcgtcacaatttgtcggaagatcttaagtaagtagctagatatagcttgttcatcggcctacatagttgaaggatcagctccccattcccgtgttagactcgatacaaagaaaacgaactcacatttgtaggtgaccttagatacgggagaagatgagaagcctttgagctgtatatacatcccggatatgcaacacagaggtgataaacagccttgatgcaattcgaaatactctgtgaaccaagtcattagtctcaactcaagatcaagtacatggaggaagtaaactcacgaaatctgattgatctgaggcatcgataaggagatcgatgagggcatcgcagagctcctgaaacttctctcgtgtagccgatgctgttctagaatcgactttcttcgcgttatcggaaaccatctggaatgacagcaacacgagtcagaatttttctagtaatgaagagttgattcgagaggccaacaccgtacttgtgtgaggaagctttctatggggttttggcgttccttgaaacatcccgcaacaccgatgaaaactaatgtcttgctctgcatactggaacgagtcgtaactcgggagactgagttctgggcgaggacctgatcatcctcttgaaaccagagttcttcaattgtatggacagccaaatcctacagttgcatataaccaagttgattggtcagtcggcgtgccttactggaatcacgtttgattctctatacacacttttacagtttcgtcttcatcgtctatgcgctcaatcagcttgacgcacatatcgatcttgagagggatgctggtagtaagagaataaagcgatcttaagagtttgatcgttcttttgcggacggcaagccctgcatcctaccaaagagaatgtataattagctttcatcaagcgatgcggacgattgcagtatcgagttcaatgctagacttacatcaacccgctcaccaatgagagacaaatacttttctatcaaagcaggatcctgtatcagatgtttccccagcaactcaacagccacatctcgtacggcgggtgagggatcattcaatcgcgtttctaacgttcgacggacgttggcctgttgatgatgaagtaaggatcgacaccttttcagccatcaaaatttgaaaacgaagcagggaagaggtcactcacttgtttgagaatggttggatctactgcaagtacagggccaagagctttcaatgctttggttctgaatgtaaccgacgtcgagcttaaggagaaaagaatggcgttgagaattgaatcaagagcattcgagatgtgtcgagtattgttgatctcctcagaaatgatgtccaaagtagcaatatcagcagagttgctagacacgaaagcacgagtaaacaatgatcaactagactactcagatggaatattccgcaagtcataaaactttcaggcttacccgacattgaacagatctgctccttctgtttccacccataagtcatctaagcactttcgaagcgccaaggtcatattcagaagtccttctgtatcgctctcatctgtcaagacggagttggcaagttttgatagctcaagactgatttcttggccccagatagctgtacaatactcataagagctctgcaattcaatgaaagtacgggtagatatcatgatttcagctttcttcgatccgggggggggggataaacaaagagaaccttatccaacttacagccaaggaaggatcggtcgtagcagcacggcatagatgctcgatcatctcagactccaaagaggacaactgatctaactgttcaaggttcaagttcgaaacaatctgtatatatgtaaatcaaagagcttatgaatcagtgcttttattgccaaaaccgaagttgatgatcgggtggaacatagattgctgacttcaggtaaagatacaacgccgccaatatcctcgagaccagccttcttcgcccgaatcgatgcttgtaagaaagatgtccggagtcgagcgccgatgagtccaagatgatcaagagcgatagatttggaagcgttgtcttctgcgctagtcttctcatcgttaagcgatgaaatctaaccaaacgaattctcgttagttctgaatgattcatctgattgaggcttcgaacgttcaaaaaacgacagaacactcaccatcagtttgcagaaccaggtcagaagttgagaggctccgggccattccggccagaacaaaacggtgactagatcatgtaggatcatgtccaacactgctcgatgctcggcttcacttgttttcgaggccttgctcgatgcggttctatcattgggggaaaaaattggaaaaggagtaagtgatatgaagatgcacgggatacaaagaatcagcgatgagaatgaccgccgaaacagatgctatagagaaaaagactttgcggaaagagaagaagagagcctcgtacgtattgaccaagaacaaggcaatagattttgcgcttttgacagcagcctcatttgcagcagcatatatttgtccaatctaggagaagaatgatgattatagtaatacattcagatatgtttgttagttaaaacctcacagaaatcagatgtaaatccgattgttgattcacctctttataggtttcctgctttgtttgtttgggagcctttccgccctttttatcgacaagcctacgcatgttcgagcgattgcgaatgcggagtatgtcttccttcacagtatgtgtgcatgtctggataagctgaagaataagcgctgagacaagatggatcgatcttccatctcggaggctgcgaatgaaagaacaaggattaatcgaaagcttatcggtatttcgttggtagagctgagatcccaaaagaagactgacttgaactgcttttggttcttcttgacgtcgggaagcttgatcaatgaagtcaaaatttcctgaatgatccaagtgcgctgtgactcgtgttttccaaatacctggtaatcattttcaatctcgaagagtgattcagtttctgatcttgagttggctctgagcaaacgaaacaaaaccagagagaaaagacccacagcccttaataatcctaatgcatccaatctcagtcccttcaagctcttcgctccagctgcctcagctatagcatcactagccttccccttcacagttctgtctcttccttttcccgtcaattgaggttcagcaacaaagaacggtccgatcgcgaggtagaccgcattgattacaatatcgtcagacatggtaacatctggagagttgataaggtctcggagatgctggaatgtcagtgataaggtttggagaatctggctgatgagattgatgtggggctgggaaactgtggatggaactttgaggaaatgcgatagaacctcaggacagtctgtagcgtagaagcaaaaggattaaagagaagtaagaacaaaacgcatttcgttataccagctaagatctgcaatgaaagaacgaacctgtagagcctgccaatccctccatgtaagggtatatgatctgaaccaagagttgtttaatcaagtctagacatagcttgatggtctcttccgaacatatctttagggaaagacacatgatcagagcgataaggggtcagttctgaatgtcgtcaaagtaaccaggacgacgtacctgctttggtattccctttccagtccaaatcatcaaacatgtatcggccgccagaactgcttccaaagcaatctccagcttggtttgacagacattctcccacgatgatgcccgatctatatcctcctcatattcttcattagagggaggggtagagatgcccaacgtgctggtttcctcgtccagcaaagatgactttgctcgcggcatttgatcaacgtcagctccgagattgtactgtccttcattcatttcccaggcccttccgttctcaatcccttcctccaaactccttctcagaagcgtgataagtttctctggcccaccttcccctagatccagaccccaccaggatcctgtggatttgtccaccatgctagtaaacttagttagcttccgaaaagaagacggattaagcagaggctgaatctcggtaccggaaattaaacgactgaaaaatggatgagtcgaggttcctcggttgacactctgaggataattggatgatgcgaattggagcaggtagttggagggaaccggatacgggattgcgtccatcgactcgaagatatcctctaccaactcgaccagcttcttacggggatctgatcattcgagcaggttgatatgagtatgaaatcaggatacaagtctgacagggtatcattacttacctcgaatgtctctcccaccagtgcttaggacggatcttcgtgagctcataaggccatccatatttttactaggcgagtctacattcgacaacttcgtcttcttgggcgtcggaacactttcttctccttccgagcgcatgtagtcgtcggtcccatcgtctggtactccggccgttcgggacggacgagggtgagacaatttgatcggagtgagagatgatgttcgagagcgcagacttgtctgcaaaatttcatcctcatcgcccataccgagaggatctgacgaagtgacaggatcggtctctggaggcgtaggggctctcttgatgacaggtttatcggtgtttgcaaacaaatcatgagaattcttctcagaggcgtcattcgttgtgccaggcttgcgcttcagaggaaccttcgaaggagtgtcagaagaagagaggatggcatcgtacggctttatcgaagggcttgactcggtcttgacaggattcatctccagagaagacctccgaaacgaactcgttcgggagagcttggtaggtgtcctggtgggtgtgctctcatcgtggtacgcagaaggtgacgacgtgttgagggcgggcgtcccggaactctgacgatggttgtaaccaagagcgctagaaggtgtgttctgagtgtatgcatccatcgagacgacggtctgatcaacaaaactgtcaaagaaagctgccgaggtggacggtgtgatgtcgggatctggcacagaactggcgtaaggatcggtatatgcgtagctttgaagaggatatgatctcaaaagtgaggaagcgatgttactcttaggaacttggtaagggtaaggattgggaataggattcgggggctggtatcgagggtttgctctgtttatataacaatttcgagacagaatgaatttcaacctgtcagatccagacaggaacgcatataagccatcggacctgcctttcgtttgcatggatcgctaccatcaccatcgttctctggttctccagccagtttttttcctggtcattactagggccattttctagaacagcaagctgttgagagtactccgatcgtaagtggtaaccagggaggaacccttgaagaccgggagcgctgatggtcaaagacgaaagatgatgagcgactgatcgtcgtgttcattcaagatcccagatagaatcaatataagagagttagcgctatcatatgaaaccctgatagaccaggccaaacaagaaaatggtgagcttacccgacgaagaaggtgtatggggagctccgagggcgtagaccgctaaaagacgcgctgggtctgcgatcatcccaggattatcggtcgaaagcgaatcctgccccagaggatgattcgattcgggtctaggagattcctgatgaacttgatacatggttttctgactcgtacgcctctccgcctgattatcgagcaggcaagacgtcggcctgaggtatcaactgggttggggggaaggtgtgtgtgttctcgtgtgagtgggtgtgattgatgtttggaggaaagtggacatgctcatttaaccgccacacacgtgattgtagacacgtcaagcaacgtctgcacagcctttcgagcttgctttctctctggccccgtactcgttcttgagatggacgatcaacaattgacaacgacaaccaaaaacgagcattagatgaccagatggaaaattacaggtgggttcattctcctgaggtttaccgaggcttacttgttaactctgacttacgatctgccacagcctctcaggcggcctatcgagcaggatctcagaggatacctatcgaaacccggtcgattcatagtcttagcgtaagcagacaatctctttctggtcatcttcctcaaaccatactaaacacttgctcgagtctccaggcatcttaccaacagtcaaatcagtcggcatcatacgcgccttcagataaaatactatcgaaagatagcgcgcgtaaggaacctaatttcgatgcctttctttcgttgagaaacgcgacgccgaggaagtcacggcagaagaaaccaacatcctggacgcctaatcatggtaatcgttcagagaagcgctctacttcttcgtctaaaccctacaactccgaagaaactgcgtctgctataccaacaacctggaatcgatcccaaccttggtctcgaccgcggcctccaatcaacgcctctaaacctacacctcctatccagctttcccagccagagacgatctcgtccgtaccaacgattgaatcgtatactccctcattctcattctcttcacctacggcccctgtctctactcctcgttcttctccttcgatctcgaagcatgatctcctggcgctcatgcagcatgcccggccatcgtcatcatcgtcacctgcacaaccaaagctccctctgacgttccatattccaacggatctcttagaagctgttgagaaccaaaaacagggagattcaaaaaacctcctggaatcactattggtttcagtaatgagcaggtcgcatcaagctcaacaggtgatgacgcctggttcgacttcacccagacagacggccgatggcttttctcggtcgtcaacagagcaagataatgcccatccgatcagaacggccgacatcgataggctcattcttcggattctgagtccggcttacgaaaatcctgcgaatatctcacttcttctgaaccttctgccaatgttactttcttttgccccggaacgtagtcggtatatgtctccaaagacgatagcttttcttttgttcaattcgtccgatccgatcaaaggtttcgagtatctcgatagccaatgtcaacctgaagaccaagctgagatgttcagtccgactgatctgggtctcatctggaaggcctgggtaggttctacacagccgtaccaagcgcttcagcatgcccagactcgactacgtgctatgggcctctctgcgaacgaggagacgtttgacgatcacattcttggaatcctcctgcggtatcctgctgttcaccacttggaaacggtcgtcaggaatttacctagtgactttcagaaagcttctcgaggtcaacctaccgagtttatcgtgacgatgcaggacgtgttggtccgtctatttgacctggcggagattgcggaggataaggaatttctatattggatctctcaacagatctgtcagttaagtcgagtcgagccgatcaaaaaacaggcccagagtgtctgtcaacagatccaagcagcggccgaggtggtcgtgttagactttgtggagagatgggatctaccaggaatgagaactcagatcagtaatctcactcggtatcttgacccgctggactcgatcatcatcccacctcgatggaccgagcagaacgcctcgaaagacgacacagtctctgggtgtagttcttgcacgccggtggacttggatatacttgatcggatatcgagaacctgggcggatgatcgaaaaggacgactctggaaagcactcgtcaaagggtctgcattggaagacggacaatcttggaagtcgatgtttcaaatctatctgttgggatccaaaggaatccatcatgagctccagagaccggacgagatgatatttccggtgatcgatacactgggtaagaatctcggtcgatacaccggagaccagaagaagaagtttgctcgtgaagttttggtcgacaaggcgttcatccataccttgatggcaactccagccttccggttgacaccctctgactctactgggatctcgatctcaactccggccattgttccagcggctctatctgatcaagccggcagaattatccgaactatccttgaaccgttcctcaggacgcctgtcctgccacgaaccgagaacaaactgtacgacgccctgctcgaatccctatcccatctgacgacctaccagcctgttctcgggctcggctactcaaaggatgcgctgaggcatctcttgacgctcgctccctctccagctctgatggtccgaacgattcgactcttccttcttttccgtcctcatcaaacggcgtcctccgccaccaccgccgccgccaacgatgagcacggctggtcacgatcgatcttgtcacccgaactagctgcagaaacagcaaactcgatactctcaagactttactcaacaccggacgtttcccaacctggcccgatcttggatctggttgatctctcgaacgagatcgtcggggtcgataccgatgtggagacaaaactgagctggttgagacggttgttgaggagatacatcgagattctcactcttctcgacctacctgccgcaaacccaacctcgaatgagggcccaagcctggacaggcgtgagaacaagaggccgggctcgaaaggaacagtcaacaaggcgtacagagcacaccaacttggagaaatccagaacgcgatcatcaaagtcgaacgttgggcggcggaccgtccaggtctgttcgctccgtcgtcgtcgacctcgacggtaaagtccagtggggacgtccgtggtttgatagcccagatcaaactcaaatcggatcgggcgagtcgcctagtttaatgaggtgaggcaagttggagaattctactccagttagccccgaatgttcgctcgagcgcaagttgagccactgatggatgtatgaacagaaatgtaattttgactatgtttgtttactgctgataataacactgatactgacgctcaagcgtttaccacacttttcaagaaagcgggaaaggaaaagaaggacgatcacattttagaaaagacaggaaggtaaaatgaagctgttaacgagataacgaggttcttgggaaaaagtaaagacaaagacgaaatcagagaagaaaatcgaagaaaacaaaagagccatcaaggccaaaagaacgaaagaaagaaggaaggcatcaacagagcagccggataaggaggggtataaatctcgtccgctacgcgagccaggttaaggggtatgtcgaacactttccaagaggataaagagccagcttatgaagatgatgaaaaagaaaggatccagcgaacggacagagacaaaaaaaaaatagatgagaacagagaaaggaaagaaaagatgataaggcaaaaggcagataaagtgttctctgacgttactggaacgcttgagaagggatatatacaagaactctccggagcgtcaagctcgatcaaccggcctctgagaagaggagaggaaaggaaaggggagagagagatctgggtggggatccgttatatttgaacaggtgatctactcgcaccagggaagatcttcgtacgcgttctgtgaaactcatcaataagccatcgcgtaagttcgaagaattctcataaccttcaagcttaacaacaagcaagagtaagaaccgagaaacgtacagcgttggcgaggtacgtagtagactcctcggtggtgacctcgacgatgttaggataagcaaacgcgtcgttcgccacacacaggacctcaccgatgtaaatatttgagcagtccacgttgatctattcaaacaaatcggtgcgcgatcggagctccgtcagtcatggcagacgagattgagatggttagattcaagcacgaagaagagcaagcttacctgggggttgttctgatacaacgcggtcgagttcaaggagtttgactcaatgatgccgtcacaagtgcttcgaattgataaacaaagagagaacgatcgtcagctcagagcaatctcggaactaagagagaaagaacatactcattatcaacgacggtgtaggtctctttgcagtcgtaagtatccgttccaaggcatagatcctggccgatctgtatagatttaacgggaagacagagcaatcagcttcagactgtttacgcgtcagaaggggagggaagggaagggagtagcgaagaaaaagaggagaggacgaacgtagaggttggaacacgcgtcgtcgacgtcattgttaagaagagcgagctggaaagtcgagacgctgttggctttggctgatgacatccaataggacaaagacagaagatcgtgatgagggaactgcgcttgtgaaatggatgtgttgttcggagagccaagggaaaagaagaagccaatagatttgaaaagaaaaaaaaacttacagatccaatcacaaatatctcctaataacattgtgtatgtccccgagaacagagaagatggcaatgcgtgaaaagaagtaaaccatcatcagtccaagcggacttgacgagagcaaaaaaaaaaaaaaaaaannnnnnnnnnggggggaggcggggcgaacgtacccgagactacggtataagatcgcgtgcatgtggcatcagtagcagccagagcgactacatgatcaaaagcacaaactagatgagcaccatgaataaatacctctgaggttggatcgagactcagtactgaccagaggcgagagagagaagagcagagagcttgagggcgaacatggctggtcgtgtgaaggttagagggatataaacaaagaagagaaagagtgggtgggcgtggttatgtgacaaaagagtgtttttttcttcgtggagagctgtaaggagcaaaggataaaaggagtgagggtgacctgggtagagaagaagaagaagaagagaaagaaagaaagagagcaagagagcaagagagcaagagtaaggatgagatgatgatggaggaaaggaagaagaaaagagaaatcaaaacaaaacaaaacaaaaaaaaaaaaaagcgcggctgtcttttcacaagtcttttctttccccggctgtgcacacatgggactctctctttctatgctgaccaagtatcatgagattactatataagatataccatctatagaaggatgtataatagattggggtctaaggagaacaataaggggcaagcaacgcaaaaagagaagaagaaaactatgcatctatatctataggtgagcctttccggactttgactcttcgttggcaaacgggtagtcagtgtatccagcggcatcctgggtgtagaaagtgtttcggtcatatgcgttctggaggaagaagagacacgactagttagttggatatcaatggcgatagagacatggttcatagacaagggacgaacaagctcaacatggttcttcaatcggtacggaagatcagggttggcaactgggaaagaatggacagaagagtcaggtaaagagccaaaagtataagggagttgttttctttcctgggaaataaacgaccaaaaaggggacatactgaacagtcggccgaaacagatgacatctccggtcctctcgacgtggttgtacacgttgtccggcttgaacccacctagagcaagagagcaaatgaaaggaaggtcagcgtgaaggtcgcaaggcaagaatcccactccgtatatcggagatccgtctagagccaagagaatgccggacgtactagcactgatgaccaaagtcggtcgctcgggtgtcggctctgggaagacggtcgagtggtcattcttgatagagctgggctcgattcctcgaacgatagcccgaagagggtcgtttccgggaatgacgccctctgcaaggttcttggtatcgaacgctcctgttgacgcaaagtatcggccatggaagaagtccagagaggacgttgagcaaagcgaaagtagaagaaagagaggaacggccgctcgatttaactgcagagaaacaacgtaccagggtgccactcaacaccttcggtcatgtggacgtaaccgaacttggggtaagtgtctacgatcttctggaccaagtatgagaatgtcttcaagggatctgcctcctgcattccttggaacgtgccccaaggtgagattcggaacccaaccttctcctgtccaacctcggccacgacagcctcgatgacttcgagtgcgaatctggttcggttctcgataggtcctccgtaggcatccgttcgcttgttgctgttgtactgagtgaatctgtagagtcgggatggtttgaagggaggcaaaggatgagatgacgtttcggacgcagcaaaatgcagataaagagagcatgtggataaagactgactggtcgatcaggtaaccgttcgcgccatggatctcaaccaagtcgaatccagcctccattgcgttcctagcggcctgtcggtagtgtccgatgtatcctattgatgagcggcaacagaccagcagaagggcaatgttaagcatcaacgaatagatccgataggcaaaagagaaagaacgtcaggactactaacgcttgatgtcatcgatggagagctcttcgggcaaaggctcgccctcgttgatgggtacaggggagggtgcaaccgtcttgacgtacttgcccgcaccgaacgggtcgtctgataagggattagaaggaacaaccgttttcagttgagcgatgtacgtttagtggatgttgacgtcgaaagatatgccaagcacttactgttagctcgtcccaaagcccagctagtgtatagacgatcggaacagatatgtataaagcgtttgtcagcaagtttttaacatcaagggcggaaggaacggaaaagtagggtgggccaggaagaggacgaggaagagacgaacagctgcaaagcaatggtagatcccttagcatggacggccgaggtgacctctttccaggcgtcgatctgctcctgcgagtaaattccaggggcgagtgggtatcctccggctgtgtagaaagaggtaacgaatgacgagtgcctggtcagcgttaagaaaggaagcgatttaaaagatccgaactggacaaaccctcgtgggcgatgaaggttgcctcgctagagaaggagcgagcgaacaagatatgaagcatcaaaatcgtcagccgatgtgatctctggtatgataattaaggcaaataatagtaattgatcgactaacgtgacgaggaaaccaccctcagaggctcgctgagtgtaatactcagccaccattgggtttcgggggacctaaagatggtttgcttgggtcagtgttggacacttccaaggaaaaaacatagaggatggatgattacctgagcaccagcagaagctctcatcctggtgagagctgggacacagatgaaatcaagcaaagtgggccgagtgtgagtccagaagaaagaaaaggcgataaggcatctgagaagaaacacatgttactcacgagcgaggcctactctatggatctgctttccggccagctgaacaggcttgaacaatcgagcggtctctgacaaggtcatctttgaatcggaggtgagagtgagtgtgagtgtaggagtatgtgattggtgacaaagaacgaatgaacgagaaagaacaaaccacaagagaaaggaagaacgaaacgatgatctttatacaacgctctctccgacggtaacgctgctgacgacattatcggcgaatttgtctgcccggggatccgggcatagcaaataccgtgggaatcgtatagactttagtaagaaaacgctattagtaattttgaaatcaactagaaaatttctccagtcgtccataatgagaacatgctcagtcggccggtgcgcagcagggcacagaaggtggagggcttctcggccgggcatgtccgcttcggttaactttttagccgggcttcacgctgtttgtgtcccacgccgtttagccttgtttcatctttggaccaacaggcttggacggagagcaagatagaagagagatatataagagaacgcctcggtacagaagagaggggagcaagaagtaagatggagaatttgaaataaaaatatcgaaaaagaaagaaaagaagaaaaaaccgaagggtcgttcagatagaaagaacgagaaggactagggattagattaaggaaacagttggaagaaaaaaggaaaaagaaagagatcaagagcaacgaaacgcgcaaaagtaaaagcccgcgtttgttcattctttgtcttcttcatgaaggaagagagggaaaagaaaaggatacaaagaaagaagaaaagaccactaggaagagaaaaggaagaacaaaaataacacagacagaccgagaaggagagagagagtaacaaagaaagaaggaacgaaaagcaagagacagattactccgaatcagagtccgattcggacgaaccggattcagattctgagtccgagccgacggcgtgtacgccgtgcatggctgcttttgacccaccgcaaagtagaaaaagagtcaatatccgacaaaccagagttacacctcgaagagaaacagaaagggcaagtaaactcacaagctggcctctcgaactgtttcagattttcttctaattgccggatcttttcagactctgcatcctcgttcgtcgtctttctgttcagaccaccagttccacccttgttacccttcccagttccctttcgtttcgccttcttgactaccaggttgtacaatctcagcacgatcgcaggtggtagactctcaatatcaagctcgatctcttccgaaccctgattggtgagaggaaagacatagaaaacaaaggctgtaaggatttgtaccaagaaagaaaatacgaaagaaagaaaatcagtcaaagctagagacttacctctcccatcggcatgctctcctggataatgttgatcgccttgctcagagtttcgccctcggtcgtagtgatcttctcggcaagttcctgtttctgtgcctgcgtcaacatcaccacgttctcctcttcgctctccgcctttgactttttcgtcgtcgactttttcggtttcgatccgctgtggccgtggccgccactgtgaccgccgccgccaccgccaccgcctccaccaccagcaccaccgatcg

SEQ ID NO: 411 - DNA, 33197 bp, Xanthophyllomyces dendrorhous
caccgatcgagttcttcttcgacggcttcgacccggacggccttggcgcctttgacgcctttggcttggacggcttggaagtcgtggccgcggcagcagccgcctttttctgcaatgacttttgcttctttgcctgcttcctcaccagcacatctcgctgggcctgaagcgcggcgatctgggtgtcaagttcggcgatcgcaccttcgtcatcagactctggctcgacgacttctggttcaacctccacctttggctctggctccggctcactactctcctctttgggtggtaatcggttccaaacgttttcctcccagtgttgcttgaaagccatcccggagttatggacaggcgacaacggcgggttaaacaggaaacagttgtgaatcatcaactggatgtctgcattcacaaccaacggttcgtcgtacactctctccagcaaatttgttcggattgtgttcagatccattggtcgtttcacgatctcgttgtactctggtatgttcaacgccaccgtatctatcggcaaggcgaggcaagaagaaagaaaagctatcggtataggatccaacaaatcagaagatgacactaggggagaaactgtacttaccgacaggataatggaaaggggaagcccaactggagtatgccttctttgacatcaactcgtccacgtgtttcaacaaaaactttaattgcggatcctgcggtccctttttcgagatcgccgccttcttcttggaatcactctcaaattctcttgtcggatggatctctcgtttcggacggccaccttcagttgagttccgtcggccggctgggtccccgttcagtgccccatgcggcgagccatgtgcttgaccaagaccagaagagaccacccccccaagctgactcgcccgaggagcaggcgaaggagttttgtttgcctaggaagggagatagaaaaacatgacgttcaatcatcacgttggcatcaacttcggccaatgcgacaaagaaagagaaagagaactaacagcttcgtccggcggtaactttttcaatgcactctcaaagtgggcttcgacagcccttccggcctgggtgaccgcgtggtcctcaccgttgaacctagcggagttctcccaaacgagtcggaagtctcggatgacctcgtccttcaccatgtactttcccttgtctgcctttcccttcggcttcgggccgctcgccaatagtttgtgctcgattgtcgacaggtccatcgggtgactcacgacgtggtaataagtcggcacgttcaatgcgatcggatccaccggtaacaaaaacgcgtacgcctccttgagcttcttcagcgatcgaacgatcgacaaaaagtgcttcttctgcccgctcgacagcggaagtgagtcgtacgtctgcggcggctggtgggatactggcgtctggaccggagggtacaacggtgtctgtgaataaggtgcatagtactgagccgcaggcgtaaatggcaaattggagaccggaggtggctatcgaggagggaagaaggtcacagttagatgacgcgtacgatctctgatgtacaaaggccacaagaaagtcagcactcaccgaatcgaccttggcacgcttggctacatgctcctgatagctgttatcgataccgttcccgcctgaaccattagggagatagccaccggtaaagtgttcatcccgagtgtctcgttttaacgaagatccagacgcgtcgacggcagcgtaggacgacggcccggatgggatcgatgaaggtgttgcgaacgtgatgtctgtaggagtaggaaaggtggaggaaaaatcgccggaaggtgcagcgggaggagcaggcgagacgtgatggaactggttgcttccgtctgtagggactgcaggagcggtaaagtctgaggagagcccagaggaaataaaaagaacgagattgagcacgggaagcggatcgatgtcgtacgacgcgtcgatacgaagaagacggacatacctctggatgctgaagaaggaatatgagtaggctgttcataaggctggcccagactgtgacttggtgacgcattcggctgaagtggagaaggtgtggggggtatgacaggttgagtgtggaacgatacagcttcagggatggattggacgggagaaagagtcggtggtgctggtgctggtgctgttaccgacgcgccattggagagtccttggacgtggtgtatcgatggaggggcctgttggatgtccatagcagaagtactgctagccggatggaacggttgggaagcagcagcaggtgtagggagttctgtaggagcgaacgacgcgtcggacatgtaaggacggctttgagaagggatggaaaaaaccggtaagagcaagagggatggatgtcagcgagagcaagaagaaagggcgatgtatgctgtggatggatggctagatggatggatgaaacgatctcgaacactttccaagaaggaagaagaagagaaaaccgacacgacacggtatgatataatcaagaaagacgaaaaaggaagagtgaacaaaaaggagactcaccggctggattaggaaggaggtctgtctgagcgcagcaggagaaaaagaaaaaaaaaagaaagaagggaaaaagaattctcgcgtccgtcccgtcgaaaaatgagctgtctgattttaaagaagaatccaacctgctgatggggccccgccttttttcactgtcccttctcggtctcgccacctggatgtaacgccaatgctgtgcgtgtcggcttatgtaagtagtaacgtaacaaggctctccatctccctttgcctatcccacgctctctcgtgtataggcgagagagtatatgcgtgtgtatgtgtgtgtgtgtgtgtgtgtgtgtgtgtgtgtgtgagcgtgtgcgtatgagtatgagtatgagtatgagtatgagagagagtgaaagagagacagtatgtatgtttgtatatatgtatatgcgtggattcagacaagatgaacggacgattcgtcgtctcgtccaatcggttagaaggtgaaagcacaaagaaaaggaggagagagaatgcaagaagaaagctgtcagtgaatcccggtagtcgatggtgattagacggaaccggatcggcatgagactatgcactctctccggtaagcgaccttcgaggctgtttggttctaggagggcgaaaggtttacatagagatgcaaccgattaggatagaacctctagaccctacttgtgataagagagtagagaaacaaaggaagaaatggaactaacagctgaagcatacagtaggagggctgactgcttggacagatccacacccacacgccctcccactcacactcaagcccacactcagaccgacactcgaatcaaatgacccatcagcgagagtgttaggacagaatatgaggcagtgttcatatcctatcagtactatctcaataaaacgagacacgctggcttcctcaaggaagaaaagtgaacagagtatgagtggggttgaaattatcgtacccacttgctctgtccggtcttggggtccaacagtgtgtgcagttgtgtgtaagtgtgttccgtgagccaggaacacaccggttagtgaccgtaaccatggacgttagatagtaccttgttaaaaaataaccctaacatcacccatgtgctcacttctgaacccgccagcgtttcttaaattcaacctgattatgattgctcactaacatcattgaacaacctacacagatctctcccatctacccctcactttcttttattccacctcacttttggctccccttcactcgaatctgattccttcttgtcttagatgagttctccaggtaaggctagaccgggttccttccagtcgtcacatctctatcgcccgtcttcttccgggcccaactcgtggaccaatccgcctcttcggattcctcaggtgcctcctcgattgaactctccagctggaccttccccatcaggctcggcgaaccagtcagcaatctctgtcggcgagcgggtcgccgtatcgtcctctcctgtcgagcaaagcaacttgggtgcctcgctcaacgccggcctacagtcggccacccgtcgattctcgcttgcatccggatctggttctggatccggagttactacgccaacaaccaacgccgctttgtttgcccagtcggcaaacactggcacattcgctccctcacctacaaaggaacttcctgagctctctcttgatgccatccctcacgaggataaagtcaaggtgctcggcaaacaccttgtttccactcaggacagaagacagagtcaatcggtcacacccgaccacggctccgcgttctcaatcacgccgggtgcagccggacggggtagcctgtacggagctcaaccgggagaaagtatggtaggtagtctggcaggtacagaggctggaagcagcattcacggaggggacgagaatgatttctctattccttatgcctcccagggtggtgatgtgacgtaagttttcctcttgtcccacgtttgttatccttccgtcttccttgttcgctgaaaatttctgcgcatccgcacatagcctggttggccaatattgcacatcactgaaccaaattcatacgatttttttactcgttcattccttcttccgttgacacagccacgacttgtacaagtgggcccagacccatcagcagtcgcattcacttcgaaaagcccgttccgcctcgttctctcacccggtccgagacagcgatgggtttaggggggtcgcccaaatcaaggagcccggagggttcagacgagactttattcatgcccgggctagggaacgaggtgaggagaatcctcgagtgctgaggaacgtcatcgactttctattcctgtacggtcacttcgtatgtgcttttcttccttttctatgatacgtcactgtttcctggctcctcccacgcgacagctcttgatccttgtcgagaagtagaaccgacgaaccggtgacatcatgtgacttacaacccctctgtcataacttctgataggccggagaagatctcaacgaagatgatgaggatgacgaggacgacgaagactcgctgcccactacgttgccccgaactcaggcgactgaagaaacccctcttcttagcaactcaaccaactctttgtccaaacgaggcaagcttgccagatcgctttccagacctaggaagccacctggaaacggaatccaagggactgcgagcgcaaccgaggcagtgttcatgcttctgaaaggtttcgtcggaacaggaggttagtcaaattattctatcatcaaacacttgaggtttcaccaagaaaagaagagagacttatcatgtcctctacttgtctctaccgaaatggtttactctcagtcttgttcatgggtaaagcattcctcaacggaggaattctcttctcgaccgttgttatgcttctgcttgggataatatcgctctggtcgttcttgcttcttgtcaagacgaggctcatagtcccgggctcgttcggagatatcggtgggatcctttatggaaagtggatgagaatagtcatcctgagtagtatcgctcttagtcaaatcgggtttgtcgctgcctgtgagttcatcaacactctttctctgttcttgaacctgtccgatatccacagcaatgcggcagtttgttaaccgatacctgattcttgtacttctgttcttcggcaatgctccatcagacaccatctttgtcgctcaaaacttggaggccttcatcctctcggtcagtggtagcaaaccagttgacatcaaatggcttatctttgcccaaatgattgtgttcctcccgttgagcttagtccgaaacttggccaaattgagtggaaccgctttgattgccgatgcgtttattttgatcggactcatctacatcggctcaaacgagatatcgacgatcgccaaacacggaatctctgatgtcgagctcttcaacccggcttcgtactctcttctcatcggaacgtctgtgtttgcgttcgaaggaatcggacttgtcattcccatcacggagtctatgaaggaacccgaaaagttccccagagtattgactggtgtcatgattggaatctctatcttgtttgccggctttggagttctcagctatggcgcgtacggctctcacactgagacggtcgtgctctccaacttgccccaagatcacaagtttgtccaggtcgttcagttcctctactcggtggccatcctactctcgactccgctccagttattcccggccacccgaatcatggagaacgggctgtttgagaagagcggaaagaagaaccccaaggtttgcttctgttccttttggtctactctatgtgctgtctttgaactctttatttatcgtcttctccctccctccgtcatctaggtcaagtggcagaagaacctgtttagagcggcctcagttatgggttgcatgctcatcgcctggctcggctcggctgatttggacaaattcgtatcgttcatcgggtcgttcgcttgcattccgctatgctacatctatccccccttgcttcaccttcgagctgggtcgccgagtcgggtggctcgtattctagattacgctctgattgtgttcggtgcgatcgccatggtgtacacgactttacaaacagttcttatgcttctcgcataagtcaatctctctctctctctctttctctacggggagccctctaccctttcgctcgttcgtataggttgtctaccagagtccctcatttgttttcccacaaaagtatctctttactctttactctctctctctctcatatcaaactcgttcaattcttaagggagacctgtccattatcctcattatctcctaaacaaatccacagtctaaacctagcatatctatatcttgcttctctatcatgaagatactctctttctgtcctctcaagccgacgagtcacacgagacggttacgctgacgtaaccatgacggagacccagctaattgccgagtaggtcggaaagctacgacatcgttgtacttttacccccacctctcgactctcaaccacgatcactctctctctttggcctctttctgtgttctgctatcgtaaagaagaacgttgtttcctcgagaattaagagaagcactatagatcgtccagctctctttttgatcttaccggtttcgtccctctaagccgtgagtactcattagacattgccttttcaaaactcacccgaagaggaaactcttactgagggtacatttgctgatggataccttttttccttgatcgatcgtcggggtcttttctacttggtcatcgttcggacggggaaacacgggtgtcatcttggttaaatgtcgtctcgactccggaatagacagatgcttccctcgcttccggccttgcctcggctattcgcaacttcaaagctatcgttacatcgctccctctctactttcgccgaggttcgtctctcgatgtttatctctttatatcatggtttatggcagcaaggaaggatggacaagaagtagaactaactttcactttctctactgttgcttctgtcttgcttcgtcttcgtgcccttgggaactttccaaccatccaagcctccgactcgaataacaacccttccgaacaagatcaaagtcgcgaccaatgatgtggctgcccatatccaagcggtcggtgttaccgtagctgctggatcgagatatgaaaccgacgagaccagagggttctcttacatgctctctaagctcgctttcaaggtgagcgatctcattgtttccaatttcatacacgtccgagagacgaaatgtcttgtccctttccctcgtttttatcggaggattctcatcccacgttggttatgctgcaagaaacttcttagtcatctagcaatcgatcagtaacggactatgcgcttgacatggaaagatacgtctcgacgttggcatgccacgtcggtcgagagacactactctaccaagcccactttccgtcccaaaatctttcacctgtactctcccttgtatcggacacaatgcttcacccacttatcacccctggcgaagtggaagagtctctactcggcgcatcgtacgagctcatgctctacgacgaaaaggcagacgctttcctcatggaagtccttcagaatgtggctttcggaaagaaggcgctcggccgaccgaacctgcctgacccggttgatgtcgactttacagaacaaggcattccaccgatcggaacgacgatcactcctgaaagacttcaggcctttagaaagctgtggttccgaccggaacgaatcgtcgtctctggaaccgggatggagcatgacgagctcgtcaagctgacggaggctcaattcggccacttgccatatgtagctccaatccagacaggggaggactcggcacgcgcgctgtcgaccggttggttcaaaagtctcgcttcttcgctaacgcccatctcttcgccggaggaatcagtgggaggactgagtgctgctggctcgatggatctaatcgaggtcccgccgataggtcagcccgctgctgtatacaccggaggagtcgatatcgatgtgagaccggggatggagatgtgccatgtgtttgttggattcgaaggtctggatgctaacgatgaggatgttgtaagtcgaacttttttctttctttgggttcttaaatgagatagacgtgtttctaaatgaagcgtgcgctgacttgcttgtgagcaatcgatcttagtacgcgcttgctgtcattcaaatgctacttggagatggtgcttccttctcttcaggtaaagaccaaagctctccttctcctagtatcagctgagccttgcgtaaattatgagactcatcgcttgattttcctttgtaggtggacctggaaagggacttttgtcccggttctacacaggagtgatgattggtagtcatggattggaaaacgtcaactcgatgaacttgccttactctgatggaggtaagatcctttgtttgtcttgcgtactggattctagttctgttgcgaaattaactttctacatgttctttcaatccactgtcgccgatgtatctgtaggcctctttgcggtttccctaacgtgtatgcctggggtgcttcagaaatatttgaatcgactggctgtcgagctagcctcgatcatgaagccccataatctgacataccctgttcagccaatcgaactttcccgagcaaagaaccgattaaagtccgcgatgctttacgctcaagaggatccccgagtcgaggctgaagacctaggggcgcaggtgatgatcaacggaaaacgaatgcctatcaaggagatgttggccaagatcgacgcagtctcgatgggtgatctggcaagggtggccaacagggtgtttgccagagggaacagcgggaagggaaagctgacggtagtggcaagaggtccggaaaccgtctcccaggtagagagcatggtcaacagggcttggagctcaaagggactttacgttgggccgggtacaaaatgggtgtagaataaaaatgaaggcgaatcccaggacatacaacacagaactgtttctttcagacccgaattaagagctaggcagagccagttcgctgatcctttgaagcagcagagacacactgagccgacggttcgtccaacataggtgtatgctcctagcaagatcaatgtgtccatacgatccagatcatctgcttctgacgattcatcccattcagtttatgaaagtaatctatacagtaggtcttgtccttcttctttctctccgtatccccttcatcaaggccctgtcaacaggatgatgtcaacatcatcatgaactccttgtaaaagcatctccgagtcgtatgctacgaccttcttccttttggctgctcgtaacgttccaaccagagcttcgactgcagatgtttgaatacggtagccaagaacgagagacacatgctcagtgacaagacagaaccaggcaagctgttcgataagagaccaaacatacagatattctctacccgttcatctcgaacaagctttccaaacttcacagatgtctttccctcagcgttcggagctccaagccgggtaatctcgacctgagtgcgcggatatggatatgttagtatgagcataagcacacgcgagctatacagctgtcagatgttgagaggcatgactataccttgagatgttcgatctctccttcggtgttcatgatggttgataggatgaagagagttggttatcaacaatgtgatggagagatttccatccggccttttctttcactctccatcagccatcatcagccccgcattcgatttcttctgctcaaccttctgacatggcatccctgatcgataccgacgacgcgatagagactgttctgtttatctgtcggaatgtgaaaggtgcgatgttttgctttctctttgctctttctcctcttgctcatcgttcgactttctgccttgcccatctcgaatctacgactcctcttacccagtgtataagattccgccccgaccaaacttgagcggctggaaagcccaggactggggagaggattccttcatgtgggagggcagacttcggatcttgcagaaaggtggccatgcagtgatcaagctggaggtcagtccgagaccatctgggcgactcctatcatcctatcatccctctttgctgatatatcgatcgcttcccgtttctctctggtatcctcttgaatgcgactcaatcactactcaaggactctaacacaggcgaaatgtttgcaaactgtccctatgatcctccgggaagctcggttgaacctgtcttggatagctctcgatactttgttttgaggattgtagatgagtctggtcggaaagcaagtatcgggatggggtcagtcgtctgttctacttccttcttcatgagctgaacaatgaatttttgctaatatgtacccattctctttgtgattcctggatttgatgttctgtcatgtgtttcggctcacttctaccttcgattgtctcggaacaaacagctttgaggaaagaggcgatgcattcgatttcaacggttcgtagatctcttcaagttttactcgtgaggaactcatgtgcgctatcctgactggctcttccttgcttcgttaccattgaacagtcgctttgcaggaccacttgaagcatctctctagcgcctcgtcgccggcctcttcttcctcttctaccgcctcttcgaccgctaagaccgagcccaagagagacttcagcttgaaggaaggccaaacattttctatcagtatccctggagcttccggaaagcccagaccgaagaaaccggagggaggtggcggtggggggttgttcatgttgcctcctccgccctctggtggcagtcagagataggataaaggcgcgctcgatcaaatcttgactataataccatctttgtagaactgtgaatgtgttcgttcagaacaaacatgaaaggagtttaaatcgagaacttgatggatgagaggattgagacaactccttcttgaacgaatgaaagccaaaagaaagatttccattcggtcttgtgcggacgaagatggattgaactttctcaccttcttccatcaccatcgccatcatcccattgtcgtcctgccgctctcaagtcatgtctcttcttaatccttcaaacaagctacgttctcttcctcgttctaatcgcctggtaagtacctttagacggcaaacccggtcgaaatcagtgtatcttccagatcaatcagacatctatgccgtccctttcgctacgccaaccaagctcgcgctcgaccgactcaaactgttctccatcgcgcccgttctatcgttcacaaacctggtccacgggctgggtgaagcgttcgtcggaccagagtactttaaatcaaaagtggaactcatcgaatggaaggcagtctatgtaccaggttggagtgtgaagacagactgctcgttcagagcactccatgcaatggaggaagctctcagagcatctgatccagactcgttcttcgccaaggtggacgaagaaaagatgcagacggtcgtcaacgtcaagatcggaaacatgttcttcccgggtgagctttcttcttgttcatcttgtccttctacattgtaattccttcctcgaaatcccatccaccggcagagagacgagaagaaatgagagaagagccaaactcattctgaatgttgcttttgccgttctcctataggaacatctttcgatccgctctccaagatatgtctccgaccgtcactcgaacgactaccagactatctcaagcgatataacccagatgaacatttacatcagatgggcatggacgtctcccctctgccgttcgaactttcaccactctcacttccagaactggccaaacacttcgatggctcgcgcagagatagagtttgggactatgtcgacaaggagtctatcaagtttcacaaggtcagtcaacggaatttacacttgcattctccgtctgttgcgtcaaagagtcaaactaaattggtcctggttgaccgaacttgtatgatgaaaaccaatcatgattcatagcttgatgcaactccgatctactttcctttctatgtcgccagtacgtccatttgtgattcaatgcttcttccatgtgctcaaatctgattgggaacggcctatatagactttaagttcgaagagcgaatctttacgttagcgatagaagcttacgagaaagatatcggattaaccgagggtatgtattcttctttatatgatttctctctctccatgtactcgtcaacaggccgccgagatcactgaatgactgatcttatttgacatatatagtatacttcccacctcgtcaagagggcatcgagtgcgtatcttctctagcctatcgtttcatccccttctgctcttttggttcaaggaaaagaaactaattgttcgtcttgaattgctgtatgccttcgtctcaagacgaccttacccatacaaaccactcggtcgagctctgtactctgatcggaacatcaactccaaatacattcaaccaccgtcattcgaacatctcaagcttcaaatcgcccaactccctctaagttcatcctggtccgttccaggaggtcatgtatacactgatcattcgtttcatgataccatcgtctccggaggtggcttgatcgaggttttcgagcgatggatcgataggcaggatgtgagggatagattattggggatctgtcagagggaagaggatgctgtggagcggaagattgagggtaggtttggaaggatcgcagagtggacgccggtagaaaagccggacgaggagcatgacgattagatcaaaacaacaagagggattagggttccttaggagttcttaacatgtataaaacttacaaacacaaagacagacggttctttcggcaagagttgttgtacatgagacatagagatcgtcttgtggaggacattcggcatttctctctttgttcaagctgaatgcgcgcatatctctctctttccaacatgttcataatctttactttattgagcccaagattgacagaacacaaccgagaggacaagtccccatctctctggagaagtattgtatcctccccccttttttaacgcccaactatccttcttttcctcacttcaagttccaaagccactgcttcaactcttgcaatccatcctccccgtcaggttttgtctttttcttctcctccttatcctgctcctcatcttccacgtccacgatgcttgccttttctttctcttttcccactccgacggcgggccgtccgagaccaacgccgacaggctttcctgtccatccccctgcccaactgattcctttccagtcctcccatctccactttgagccgggggcgcccatcctcaacacctcctccactgattccctctgttcgataccaccgtcaccaccggaaccgccggcagaagcagatcccgaggcgtcttggtcggtctcgagcaggtcgatcttgcctgatgtcgagccgagggctgatttcctagcgttgagctcccgggtgagagaggtgtgaagtctgggaacagctaacgatcgggtcgtcgagttgggaacgagatcgagtttcgtagagagaagtaggacgggtgtaggagaaggagggagtgtgtgaggaaggatggggagtaatgcgcttgatttgatgtgcgaatgggtgagaaagtgaaacgaaaagaaggataagtagagcaaggagaagaggaagtgaaggcagtacggaagagagagagagaaaaaaaaaggagaggacgtactcgacaaccgaaccaatctctttctctctgccactctgagcaccatcgacgacaaaaacgacggcgactctcttctttcctctgatctctctggacaacaaatcctgtagaccttgtgcgagtctcggatgacctgggtaatcgattatcttgaatttccgagcttgggccttgttctttgttcccgtagtggacgatgaggaagatgatgtcttgggaggagcgagaataaagtgggacgttgaaggcttgagactagaatgggtagccggtcgagacccatgagcgagctcagcaaagactgatgtcttgccagaaccgggaggaccgacgaggatgatggtccgttctagggcatcgttcgtgctactccagacaaagtagatagctatccgtcacgtaagaaagtccccagcccgatcgtcaatgaaggttatcatggtgcacgagaaaagatgagcatcacgagagagagagagatagaggctaaattgtacgagaaagcaagaaagcagacgaaccggtgatgagaacgaggacgatggtccccaagaaagcaagcaaggtctcttcatcgttcagtgcgtttacgaacgctggtgagctaggaaactggatcaacgttttgcccattgtctctactatatctccttctgtactctatccgtaataccaggcgagtatcctgtcgttgtttgcgtgtatgtatatgctgtcgtcgagcgatagacgcgaggagattgagatggtggacggagagtgatcgagagttgattctccatgttctcttttcttcatccgtcgcgtttcgtttgcgttcagtcccatagaagaagcatcatccacgtctctccatcttcagtgcgcacttccctttccatcttggacaacacaaagacagaacacgtcatgctaaactgaaaggagaataaaatgggagaagatgatgcataaaagagcttatccaccgagacaaagggcagtatgaaatcaagagcaaggtcggaaagaaagaacctagatggtgtatccgattggtgcgaggaccgagaatggaatggtatgagacagaaaaaccaacagacgtcggatgcacttggtttgaatggtgatgataaaagggcaagattgagggaaggcagatagaagaaaagaagaatgtacatggtccgaacgacatacaaatcgagatcaagtaggacaagaatagaaaccgaaaaaaaaggaagaaagaaagagaaagaaaactcgatgctttggatgcctcaaaggaagtagtaaaagttgacgacaagataaacagcaaagctcggccagaatactccgaagcactcccctgtccatctggcaaccaggccctcctctcctccgatcgagttccagaaccgtcttcctaatccgaacgatctgctaaaatctctagcgacctccctccaactcgagagcacaccatcctcactagcggacgcggcggacgcgagctttcttgaatccatccgagtcggccgtcgaggaatacctggcctggcagaaggcgaaggcaacggcgctccaaagatccctagtccgacgttctgcccactaccgccgcccccactactgccggtactgacgagaccaggcaggtactcctcagagttatggtatgaatccgggaaatcataagacaaccggttcggttccgaagggtaccctccgatctccgcgtcgtccagttcgctggagagctgtttcggactgcccaacggcgaaggaggaaccgaccgggacggtcgacggatcgctcctggaggttgcaagccgctagatgaagtaggtaatcgaggggacttcaacgctccaccggcaatacctgcactggacgatactctgctcatcgacggggtcggaggggcagagaagttggatgtctgaagattgattgattttgggtacgctctcatccggatcgatcgacgaatgttgacgaagaggaggaagagtacggtgagaagggcgagaggaaggtagatatgattgtaaattcctagttggtcaggcagattgcaagccatgtcggcgtgcgtcggtaacgagggttcggctggatcggaaggaacgagactgaggatctggaagccaggctgggatacctcgagagccatggtgaacgccttgacggtgacctctcggacaccgttcggatggctatattcacaaatgtcatggtcatctccgctaaagataagagtaggcgctatccgctccattaggaactctgaggtctcccgaccactaagtgaatggtaggcaaagcgattgaagagtgagtgaaaagaaaagagagcagtgatctgaaaccaaatcgataaatgaacaaatagacagatagatagatacaaagacgtacagtaatttttggtagcccagtccggcgccattgacaatatgacctttttctctcaatggtccacaatccacacgctccctcctgtggagaggcacgtgggtgagtaagatccgaggaaagttagttttatctgtggaaagatgaaggatgatcaatatcaggatgatcttggtgtgtctgataggagcacaaagaaggacatactctcagacagcttgaccacaaagtcgatggaaccgccctcagaatcgcctgcatcgccgaatctaatctgatctgcgtaacgtctatagtcttcctcaatgatccctggcgcgctgttgagagaaacgcgaaagacagtttgtcagatcagagcttttaataaaaaataaagataaactcgaccgggacttgctcgaggaggacaaatgtatggtttccgatgtcaacagtatggttgatttctccaaacgcttgcttatatcgttctctcgctcgagtggagaatgctctggacgggccgagtccctagaagtgaaatgaacaagaggaaagggaacaggaaaaggagatgagaagggcatggaacggatggagggctatgtatgtactgactacatcgtgatttcctgggatgtagtaaaccggtacgttcatagttggtttgaagatctgtttaaaccggctggcgtacgaccagtatctggttgttgattgagttcagagagtacggctggtcagtcgagattgaatacaaaaaagaaagggtgatagaatgaaacaagctaggggaagtatgcgttgtgtatacgcatacaagttcatccccatgaatgtagtggggtgactcactctccttccaatgtggccgctcggccggaatgcatcatgtctcccaggaagaagacggcgtctggcttgaagcgctgggcgatagaccaactcttcttaaggaatgtgtcgatgatgaaccggtcgatgagtgaccggaaaggtctttgacgagccgaagaggactcgaagtttatcacttgagggtcagcgataatgagaacgcgtgtggagcgagaggggagattggaactctgagattgtcccgaaaatgaagccaagcaaccgtcagcttcgggaagagagctagtatcaaaggatacaagcggaagaaaagcaaaacgagagactaagaccggacgaactctctgaagtcgtttctctaaactggaccatcgacaagcagacgctgaccagaagaactagaaaagggatacaaggtcagtggaagaaatggaaacgaggacacgaaagagtcaagcagagaattacctctccgatctgttgggagtatatgaatgaaaagaggcaagaacaaacgatacagtggtcactattctataggccacgatagaagtagaggatacactggggctaatcaaaggtaaagaacaaagttacacggagggacgtgtcggaaactaacctcgcaccagatcacgaccactatccacccaaaccgaagaccgatgcttgccgactgggacacggctgaccttctccttctaagtacgtttgaggacatgggagaacgagaacaagaggactgaacgaacgctggatgtagtagttgggggatctaaaggttgctacctgaacggccgaaacttaaaagacacgaaggttaaacaaagcggggaaccgactgcaagtcacgtgaatatgcacagcaaattagtcacgtgacacacatctctcagcttcgcccacttgtaccttgcccactcccactcttgttttaatagggggcagatcggctcggatgagtatgtatgtgtacgcgtgcgtgcgggtgtgtgttggtgtatgagcatgtgcgtgtgtgtatccagagcagatatgtatgtatgtgtctgtgtgtctgtgtgtctgtgtgtctgtgtgtctgtgtgtctgtgtgtctgtgtgtctgtgtgtctgtgtgtctgtgtgtctgtgtgtcggtaagcgagcacgtacagagcaagtgtgcgctccggttaatgtctgtttacatccagaccgaccggactcttcaatggcatgctggtttctctctcggaccaatccttgctgctccttattcgatagacatccattcgcatcatacccacctgcatgtctgttctgagcttgatgttggtacggaagacccagccgagtgatcttcgggcgccggcacgggagaaggcgcagtgggagccggtgtggccccggtatgaccccggtgatatgttccgagttgagttcgttacctccaaaccttgttcgtctggtcgtctggccaaggacaagtgagggtgaacatcaagtgagacaagatgagagtgttgccatcattccttcaccattatcctccatcatggaggaacacttgctcacccctctcaatcgagaacatgcgtctacagattccttcttggattcagccgacgaccacctgtccctccgaacacgtaggaaacccgttctgactcgccgtcgtcttctcatcttgattgccatcctagttgttctcggaatctccggtggagctgtctaccttgtcttctcagtggccaggtatttctggcgtctggtctttgatcctcatcggggaaccacggtctcctacccttggaatgccgtgactagctactatggcggagatattccccagtttgatgttgtagccagtgtgtttgtcaggcttggaaaagagttgccgggtataagagacggtagatcttttggagggcctgatccagaaacatcgcgctttggagattggcaaccgctttacagccaggttgtcttctctcgaatcagcctcaactctgccgacccggtcttcaagaaaacgatcaatttatctatccctctggatgtcctgtcagtttgatgttctccatctcgtgtcttccttgtcatcccgagttcaactctttgaccgctcctcctctgtatttttgcataaatagatcccagttttatgaacccaacaccttctttcctgagatcgtcaataccttcgtcatcgttccatctgatcccgatcccatcttgaactccctcgaacaatcccaggtgaagatggtggagtatgtggagatgatggagttcgaacagtcctctccatttttctctggcatgaattctacctcacggactaaaagtagtcttcaacagctcgctcgtcctatagatcctctcgccgacgaccccaatggtagttcacatatggagaacgtttcgcgatcgcttaacgcattttatgattctggggctgtcagagagttcgccctgcggcctgtaatcgatgaacgggccacctgggaccagtcggactgggctgaaatatacagtcagccaccttcccgatccaaagagagcgaaaatcttcgaaatcaaagacagttccttccctaccagcggaatgcaagcctcaagattaaatctagaagctggctctctatggctaaggagacaccaatgtatgattatgacagatatactagaaagcgacgtgatgtgaattccgaaggggttcgtctcctttaatatggttcgcgttatggaatctaaagtgtagaatctgtgagcgctaactacctctaaattttattatcctcttgtcggtttggcttgtgatttcatcatgtagtggaagatgatttatcaacaagatcctctcaattgggcggctcatctcacccactttcctttcagtgttgtaggtcactaccgatctttgatcactcagcactttaacgtgaaggatcgtcatgaattcagcggaggaccatggtctcacaggcctgaaaagatttctttttatggcccctatatgactctgcgtatgtattcttttcgacgtgttcttctcatacaaggcgtcgatttggtcgacctcataatgacccttctccgtccgaaacactttctcttccccttctgtgatgtgatcctttttcgtaggtggtcatgcagctgggtctgaggactggatccccttgcctcgtatcgatcagtcctccaacaaccaatctggtaagcagtgggcaaaactggaaaaaggatggctctactttcttggcttctgcgcgctcatcaccctctcttttgttctaccctccaacatttttgtagatccgttcaccgttccctggcatatcacctttgatctcttgtcaaaatcgaagataattggtatcgataaaattaacaaggacgacttcagatggtttgatcgttatagatcatactatccatctttcgacaatggttatatggaggctagtacactgcagacgatggatttcataagttcgatcttcttccttcctctgatgtttgaaagtactattctcagctgtctagtctcgagaattctctgaccaactgtttgtctacctgttatacgttcacattcaccacttcagatgctatctttgggaacagccacacgtacactaaacgacccatccttcgctccgtcttcttcgtcatcggcggcttgatccgataccccctcgggatcatccttcagacgtattatctcttttccagatctttgagcacgggcctaagtcttccatcgaccatcctctacttgtgtttcggtagtctgtatgaagcaatctcttatcacaatgatcgttatgattatgaaaggtctgcatggatgttcgccgcagtactagtgatcaacatcgtttccatctggaggtggacctgtctttggtgtggcatcggcatcacatggcatggctgcggtggctcatttcctataggattcaaaagattcgggcgaacacactcggagaggatgagcaggagatcagatcaaaagtttacgtgggctcagaaaggcgtggtatgttcctttcttctttctgcacggtcgttagcttagcaccaggaaccttattcgagaggaaattcactaatcttgaccttcgctttagttcgtagctatcttgacgatcatcctaacatacctacctgaactccctcatctcatcggcccaacttaccttccggtctctgtcaataaccatcgttattgggggcctcccggtttccgtcagacgctctcaaactggtcagaaacgcttcggctgccaaaatatggaacttctctaaagacgtcattatccatgctggcggtattatcgcaggtgttgttgaattggaggctgggaacgttcgcaggatcgattcctgcttttgcatggactcaagtagtgggcaccattagtacgttgctttcttcttcctttgcttcgctatttctgtctccgattctcattgattctcacaacgctcttgatatgatctatagtctcatggacgccaacagttttccacactatattcggtaaattccacgcaacagatcctctcgagataagcgttgtcgtgaggttctgtatcgatctagtcatactctggcaggctgtcaatttgccgaccgtcaatcaggaggaagaagaggatgagtaaggtctgggttttctgtacatgacagcaaagcgctatgctatctgcatatacaatggcatctatctgtatgatgaagaacaacgtgtttaaagagagatatgtaacttgatagatccagctacagaaggtagcgcacggcgcaagtcacgtggttaccgtgaaggctgtgcttgccccgatactttcttcccctccttcctccttctatctctcaccttcacccaaacatcctccatttctctcgtccatctttcctctccttccacacaaacagactcagaggctagccaggtgcactctaactactcaaatccagctcatgaatcggcaccggtccaacatggatcctgggtttcgtcaaaggatgcacgtcgtgcccgcagcctacaaggaaggttctaaccggttgaaccggagggatagcgttgactgtccgacctcggctcctttgtgcagttgctcagccggatacagctgtgttgctactgccaggtaaggaatgcttctccttaggatttatcctcctccagcttctgttgtctcttccttttccttattccaaagtccttagcgattgtgctatcgactatcattaccggcaccgcctgctttccttggaatgtttttcttattcttctcacattcttgatcagacaagaattgcaaagacattcagttctctcatctcacgcaaattcggaacaaacaccatctcaccgtgcttctaatttcgaacatgtttacttatactcatgctctctacacgaacacaccgttacagaacaaaaactacctgtgcaacagtctcttgtgttaagaactcgaccgacgatgacaacggagggtcaatcaacccagggctaatcgccggtccgatcatcgcgtttcttttgctgtgcagtttaacggtatggtggtatcttcgcaagaagaaggtccgtcagtttcattcgttctggctacacagagagaaccgatgtgctgaccggtactttgatttcttcatcacctcttcaggcccgcgatctggctcggctggccgagctagaagagcgtgcgaaccggctggaggcagcccaacacgaagttctctctctcaacacacgaacgcctgggattactcctaccaacgttcatttcggacggtcttccggcccagatgcaccagaatcctctggtctcttgtcctccttcacaaacgctgacaacagagggatcttatcgaggcctaacaacggtcggctcctcactgtgtattctacagatggcattgacctcgatcccgcgaccaaaaattcttccgaccaccctgggattcctctcgcgctggccaatcaggacccgttcgcggatggagcgtcctttgtctctggtgacgggttctccttgctctcccaagcaacgaacgtgattccgatcgcttacgttcctacctcgggctcctctccagctcaatcagctggacgaaatttcagacccgatcataacctgggtttcgatttggatagagaggacttgatgtctcccgcaaaactcactacagtggtatcgcatccgggagcattgatcagaccatcagctctcccgactccatctgccccgtcagaaagtgacgacagactgtccctcatgagcggagcgggctcatttatgtcgttcaactcaaacatgtttgtgctcgacaccccaaagattgcgacagctcagaggttaaacctgagtcagatggcttcaaagattgtcccctccccgtcgttcccccactcgatcgaccagagtccggtttcacaaaagacaaacaagcctacgcctgtcagaccaacgacggttcccaagatcaacatcggccgatcgcctctttcccaagcccctgttcaaaactacgacccgaattctgcgtcatccgcttctttcccaactcttccttcattaccaccatcaccggcacctcttacccaatccaatcgatctgaaaccgacatggaccctttcactgatgatagcgccgatacgatatcacttccgtcgatccaccaccgatatgatccacggactttgtcgaccagtttcccccaacagcccagattcccctccgacacggaagattttagattctcaatggactccctggcggccacaacgtcctacggaggttccaacttcggtagaccggagagcacagcaagctcccagggaagcgtcatgatcaagagtgcgacgatcgttcaagtcggccaagaattacaagcgggtagcctctttagatcaggtagcttgatacgaggcactcagcttcaagctcatcagcaaccgtcggatcctaattcgatcagcagacaagacttcttagcagagcagccgtcgtcacctacatcaattcttccaccacctgacagaggagaattgtttgcctctacttcaacttcgaatttcaactcaggctcaagccagagggatacacagtattcgcagtattccctaggtgcttttgatttcataccacctgctccagcgacgacccctcctttccctccttactcttgatcaaacatgtagatagagttgaatgtgttgtagttttctttcatacaaataaataaatttggtcattggttcagtatagtatccctcttctctttgtaggtatttcttaaccattcgtttctttttcaaagggatacctaaacttcctgggtaaaatgcggctggttccgccttctcctttctctctttcctgctctgtttgtccaccccatctttcttgtctgtcctttccgttacctcttcttcgttccttgcgcgcgcgcgtgcgtgtaaacataagttatacccacactctcccctctttgtctgctcatctcaattgtctttcttcttcctattagatagctcatcccaggacaagtctctatatcatcatctctctctttcctcttggtcatgatgtcatttacaaataacgatacatcgatcaatcctttgccctcagaatacccactcacacaaacaggccgagacagcgaagtgaatggtttggaaaggaaatcaagagcaagacatgagtgtttgatgatggggtgttacgttttggaactatgtctgggcaacaaaagtagtttacaagttgcaaggagatgaaggaaggtagaggtagaaaatgcgttccagatatgtaggaaaacagcaagggtgaagtgattgcaagagagcaggaaaaggataacaggtgcattaagagtatcgcgctcaacaacattaggagaataaagaagaattgaatcgtccaaacagggacccatggaacatgctctcggatacagccttagatttgatagcgaggcgggccttcctcctcactgaccatactcattgaccgacctgatccatctgacagaattcgcgtcccatcaaccggtctgtaagatcctgtttcttcagctctaggaccggtcgatggtctacttggctgtctgtgtagttgtccgtgtgcctgtggatgcgcatgagcatgtgcctggagcttaggatgagggtgacgagaggatgattgagaagggcctcgatcaagtcgaggagagtcgccaggaagaggtgcatatcggagtgatcgggatctagacatattcgatacctattttccgaatcaatagaaaatcgaaaaccatcaacacccaagtgtttttttaggtttatcacatgtaagaacgattaaaccactatgcgttccatgaacaaagaattgggtggacttgcattgagttgctgagctgtattcgagaggttttcttgatgcctcctattcaaagtgacttgcctatcgcaaccgcagatgacccaaaaccaacctaactgttcgatccaacgagcgtaacaaataagaatgaaaagtaaaataaaacccaccgttggacagccccaccgatcgataaggtatcaatcttctcagatggatcatctaatacactatcgtctgttgaccactcattctgtttgctcttcctcagcacggcccaaaatactaagccaactgcgaaaacgaagactcttgaaaagataaatgacgaatcgactgattagcgcaaacgttcatgagcaagaacaaaaacttgaacaagagaaactcacatgccagcaacaatccctgctgcgagtcctctgcgcgcaagcaaggggcaagtacagatcgaccgttatccttatgatcagtaaaggtatttgtatctaggagcatcaaagcttggcttacccaggagagtttactgaactgtcagaactggagtttgaactcgacgatgccgaggtactagcagcgacgatggtgttactactagcgacccctgcgctaacaaaagatgtatacacatagaccgtcgagaactcctgaaaagactaagtgatgaaaaaacaaccgaagcaaacatccgataggaatggttcttcagttaaaactgaaatttgtaaatatcaaccaatttcaagtggaaatcttaccgtagatacactagcttcaccatcagcacctgtgacgaccacttgaactgtctttgtatccattcctacggacgtcgccacagccattactgttgaacctaccgaactgggaccttgtacggacggagtcgcgctactctgtccggtcgatgtgccggatacggcaaggttgctgaccgaagcgtcttgtttatttccaatagtcgaagacccggtacttccggatggacatgaggtaataacagtggttgatacaggataggtggagacagcaccagctccagtttgctcagcaggaacgattacagtcgaagtcatcaccgttggagtctatcaagatgcagaagatacccagatttaattcatctgctttgcgaggtatagtgtacagagaaacacagagggaaaggttaccgacccccgttccgacaaaagtctcagttcgatacccctgacatcctccaggaacccccaggattccctgtccagtgctctcgcatatctatgttccatcgagtcatggtagaaagaaacagtgaagctgcatcagggccctgtgaagttcgagtgagatagaaggaattgcaagggtaatacgacaaaacacgcacagatgaataagaagttgtttcgactccgggaaccgtgtataccgcttgctatagatgaatacaaatgacccattcatcagaaatacgaaagtttgacaggtcaccttcctcattagacatgcactttcgaatatgaaagaatgaacaggcaaacaaactaaatagagaacccacagacgtgacagaaggacctgagactgaattgacggtcgtcgtcccgtataaagtcagggtcgaagtagtacactgagccatgtttaccttgtattaccctcttgagattgggtttgactgatgaggctagtagattgagaagtgtttgttgttcaggaagtcggtagagtcctgagagaagggcgcgcaaaagaggaaatgagtgggtcttgaaggagagtgagtgagtaaacgaaggatgtgggttttagtgaagatccgtgtcgaactcttctttgtgagttaagcaagctcggtaaggaagcaggatggtatgggtgagtcaagaaaacaaaagcagagtggccggtcaacgaacaaggagagccagggctgaagaatgatgaaacgaggaaccgtccgtccgaggttcgatcctgatttctcaattcatgatgttgagtgagttacacaaagataattcatgacaagaggcaagattgacaagcaggttgaagaattggtgagcaaccacatatagtgtcagtagagtcaatatagatatcaattctcaatcaaccaagcagagatgatctaattttccgcagaagaccaagcttagtcgcgggcgcattcgacctaaaacgggacattgaagaggagtcgacagcatgaagagacatacaaagtatttggaacaagaaaagtatacaaacaaaagtgaaattgtaggaaaaggataggattcacaacatgaaaggaggtaagaaaaaaaaagaataaccctgatcaacagttcagacaatgtgaaaggaaaaatgcatgtttgtcagttctggggattaccgtctgtaccattgtacagtggcacgggatcgtcggatcttcctctgcaactggagcatgcctgaagagataaacggagcaaaagaaagaagttaatcatttgaacatgatgaaacgatgaaacaataaactaagagaaagagattaaccaaagagcaatgcttcagctgtgggtgggcacccaggaacgtctgcgaaattcataaggaacataagttcatgtcagttggccggtttgatgagaaaatcgagaaacctggatcggcctacgcacaaatatcgacaggaacaattcgatcacaacctcgaacgacagaatacgactgaggaaaaaaacaacaagcagtttaagcaacagcttcgatgaacagccaacatgaaacgttatgatgacctacgtaatggtagtatcctcccccgttcgcgcaacttcccatcgagatgacccatcctaagagagataaagtatcagtgggtggatctatagcatgagcggtggctgttgagaataaaaagattgactgacgaggctcaggcatttgatcgtaaactgtagttgcacaggccaacaaggaaggctggggtgagcagccaatcaggacatataattgataagccgcccaaatacttaccttttcgcaaagcaggggccattttgttggtcaacgttccggcaacgatcatgacatccgactgacgtggcgacgctcggaacactacacccaatcgatcttgatcgtatcgagcggcagccatgtgcctttagaggcaagatcataagtataaagatgaacgggtgagcttttggaaactctagagaacaaatggagagaaagaacgaacatcatctcgacggcacagcaggccaatccgactgtagacattgatagaacgggatagatcattagatcagatctgacaagtaccaagaaaatagttgaacaagatttcaaaagactcacatgtcatcggccacatactaccttgtcgagcccagttagcgactttgtcggctgtggataagacatactctatagttgcagagaaataaaagaaatttgttcaagattacaatcagatcgaagagatagaaagactagaagtgagcaacacattcatctcgttacaaacggagctaatcggggctatagagtatattgtgcaaaagtgaatgaaacaaaaagactgaaagactaaccgacagagtttttaggagtctgcaggctcaattgattcgtgccctccaaagcggacaccgtagggggaacgatggccgactcttctgcagtcaatccagtgtagccagtcggaatggagatgctggagccagagccagcagtgttagaagagatctggccaggagcggacgaagatgaagacgacgacacggatcgaagggcaaagttgatgtgaggtgttcggagcagtaccgaggaaggcgaagctgagtggatagagaacattccgagtttgatcaagagacaagagcgaaaggcggaagcgaagagaaaggaagaagatcgagatgagtttctttggacgcgttctcccaaggtcatctcggataagaactgccactacagttaaaaaaacaggcatacagttctttaagacagttcgaagcatcgtgtgggtaagcaagtgaatgagtggacgagaaggcgaaagtgtacaaccgatcggaataaaggatgtgtggtgttgcaagtcaaaggatggaggtgtgtggggaagctgagaactagaaatggtccgattggcggttcgtgatcgtaactaccgtgtaaacatgggtaacatccattcgtgtcaggcacggggatcgaagagtaaccaaattacccaaatcacctaacttacatttatggaggtttggaatgttcatggtgcattagcgagttcaaaaggcgtcgctaaggattcgaaatgaccatacttagtcgaaaagacggatatttagacatcatcatcattgatttgggttagattataagctcttctcagatcaattgaagtgaacatatgagcccgactcaatcgatttagaggttcgtcgatcaagggtcagggcgcgcggtttctagtggtgatctcattttgtcgttgaaagtcgacgcacattcgaagactttgattcttcttctcaacgataaaatcagggcgcctgctggcgatttgtattttcgaatgaatcccttctgaagattcttgttgagctactcacgtggtctttcgatctcaggatcggacatagtacagagtgacccaaaaggaggctgggtatcagactaaattgatacaggagggtcatgactaggatgacaaaacgtgaacgtatcattggagtagttcacatcagaatcttgtctacgatgcttagggacgtccaagatgatgtcggcagatgcagatgcagtcgagcgaaggagcacatcctctgcaagacggcccatatcgagttgacacatcatcatagaatcaatctaattagttttcaagaggtatatcatccatgtgcattaccgcgcgcgaacaagagatctgatatgtattagctgatacccggttcgctaggttctggtagacaaatcaaatctgagtaccagaatcgaggaaagcttgaacaaaaatactgtgcaaactggagtgtgaggtagacaagatgaaacgggttgctcaaacacagagtcatgaaagacagaacttgaaatatattcagagatggagacatcaacaagggctgaatgtgggaagctcgctaggtaaggcctcgatcgaggttaagggaatcacataagaaggcagagcatggggatttggtatcagacgagcagaagacaaggcggggccaggtatatcaatgggaggattcttgggagagaagggcataagaatgacactagtggagatagtaggagatgcataatgattgggccgcctgatatcatatatgggatgcgggctcaatagaggtcttcccactgagccgtgtcattttcgaaacttctgtttcattttccgtagcgttgacctcggccattttgaattaacggagatcgcgcgatcgtagaggacaatcaactaggatgtgatctggccggccgcaatgatggcataagttcagttgttgtcggcgctctcgctctcgggaggagattgggtgtcgagacgttcggatcgcttcaacgtccgttgaagtagggttctccatagagactggctgtagggggagacgaggaacagaccgaagtatcgggttgactggtgcagaatgcttcgcacgagtagcgtcttcccgctcgaattgcgagagttggttgtcgatccgaagaaccaaattcttcaattcttcaaacgaatgagtgggtgggtaatgaaggagctccttttggagatgtctcttcaaaccggcatagaactgttccttcaggctgtaatcattcaaggaacaatcgatgataatgatatgaatcgaccataatattcggctgccgttccggtttgcatcagcgcccgaagttcccgggaagcggtctggatttcgtcggggactccaaaagtgtcgttgaggaacttggcgaaaccttcaaaggaacgaattctctcaggcttatcgtcgtcgtcccatctttccagactaggcgttatggtattgagaggtggacctcgaaggtgactgatagcgaaataaagtttcttcttctccgatgaaaaatgctcaagatacatgtcaaaattcatccgacaacatgtcagaaaagtccggcatgctctaggatcctttccatcaaataaggtaggcgccggaatcttaggctccggcgccgcgcaggtagtctggagtgtctggagataccgagcttcagactgctgcaacctaagccggaggctggtcacctccgactgtagtttagcgttttcggcattcatctcaatgagtgccttctgatccccagaagctgtcatgttgtcagacgaagagttgtacctgagtgaaaaaccctaagcagcaagctgaggtcattatgagacccggagattagagagtaattgagttagtaggcttgaaacaagggcggatacttcaacccacgacgaggatcaccagattgtagacagagattggagccgaccaaccttttaacaagatactttagataagaggtttctgcaagaatctcagcttgaagaaaactcttatccaagaaggcgcgagagtgtcctcgttttatatcaggaccccttgcgcatttggtctgccactaacgatatacgtatgacgagcctagagaggatcaagatcacgagaactaaagagaatgaggcatgaaccatgcaaactagagcatgatggaaaatgggtgaagcggcagaagcaggagaaggttaccgagtgtaacactcaggtcatgtcagggatacgtgtcagggatgtgacctgagtgttacaccccggcaaccttctcctgcttctgccgcttctcctacctcggtattccttatgctctctcattacatgaacatgcaggtatatgaccttccagcgcaggggcttctagcaccttctgtgatctatcttcttatgcataaccgttggagtctgaggatgttatataagacgggaattattccgccaaccatagcttagtctcccaagtttggatcttttgttaatcctgatccctgccttgttcccttgtccttgtccttgtccttgtccttgtccttgtcctt

SEQ ID NO: 412 - DNA, 114265 bp, Xanthophyllomyces dendrorhous
tccttgtccttgtccttgtccttgtccttcgtgattctatctatcctatttcccagtcctgagagcctgaatttctcccttgaaatctaagagtcttgtgtggttacaacttccgtagcctcatcgttaccctccaaacctgaactataacactaatcatgatcttatcgggcaactaactacgagaatcttggatcatcgctcttccatcttaatcgccagattcgcatttatatacaggagctattcaacacggtgtatcattatatgctgaatttgaaaaatctttgaaacaagagggaagtccattgaatggcgtcgccgagaccacgaacctgtcgtcgtcgtcttcttctgatgagtttgccagcctcagtcgagctatgtcaacgtacagatttatttgagtgttcagcttggcaaacactggaccatcaaccgaatccgaatgacaactgctatcgacgagcacttggccataaaatgagagggagatgtaaatcaagaacttacatggaagtcaatggcaacgtctttccacgttaaatcgctccaaagcaccatttcatgaagtctggcaaagttgatgatgtcttgagcatggaatctttctaagtttgccttagatatgtcggccagggaatccgacttgagatgtggagtgtccaatgacggaagtgctctagaacaaccattaatgcacctcgaaggacctttgcaatgagctgtggaacattcagcctcggtccttactgctctgcaactttcacactcttttgtatgccaacagaaatctgaaccacttctaaagtgaaagagtgcctggcgagctaattcagcgtcccggtagacaacggccagcccgaaaacgttgatatggtccatttctgtgaacacccgaaggtacgtcaagatgaagtctcgtataattggcgtgtcgtacttgtccgccatgtctatgatcctgatcgtcgcagttcatgcccacatagatgaaaaggccagctgaggtaagtgcgacgaaggagatggaggcaaagacgacgaggtggcagagtggccaacctgttgcagtcttctatggctaaatatctcgctcgtcgcatcgaggggacgataaagctcaggaagagcttcaagtcggatcccatatcgctcagtttgacaacaggcttccctcctatcagattgccagacaaggcaagttggagcatgtcgacaaagacggctgagttcgcttgtagctgtaccttgcggacgacgagggcgagtccatctgagctttcaaggatgatgtctccctcaggatctagcaggactaagtcctcgttagagttgggagtgttgtcggacatgatggatcttgaaagctattgtctaaaagaaatgagaagggaatgtcgacaaggtaggaaagaaattgacaatagatgaagacttgtaagctcttaaatgagccggaagaccatactattgttcaacgttttgtgtgatcagttcattacggcgcttgacgcacacgcaaagcccaaagtcgttttgtttgtcctccctttcatgataatttttctactttgctcgaaagtctcgtcgcgttttgtgaatgtcgtttctaagtctaaatatgatgcgcaacatagatagagtacagtccagcccttcgaacaaacggattaagtcatggctgtgacaaagggagaatcaagtcatacaaaaattgatacaaaatgcacacatgagccgaagtacctctcttgagcatacattggtccagttgatatatgatacgtactgtacttgggccctccacctccttccggtacagtccaggtaatatcttgtgtgggagtctaaaaattcacaaaaaagagaggcggcagtactcaatgattagtctgacgatacacacagatggggaagagtgtttgtcaagccgagtgtaccttgatggagcaagtcttgcaatgaactgaaacatagatagacacctcaacatcagcgttgtacttggtcaaagtttgagatccaacaaatataggcggacgtactgcagttttgtgagttgatgataaatttcttgccttctgcagcgtcagcatctccaggctcggcatccacatactcatacacagccgctgggcaagctcgtcccaagagtccagcgtaatctaagaaagcatccgaatcacttgctcagctattcaattctgaccaaaatgttgctccagacaatagaggcaaattcacctcgaacgttggtttcggtatgccgaactttcgctccttcttcgttaggcagctgaagatgcaccggctggttttcggcgtgattcgtagccgttaaactgacagatgtcaggatgtcgaacgagagctttccatccggtgccgggtagtcgatcggcttgcattcactacgatcgggtcagcccagtgagagtaagagcatcagcaaccgacaaaccagagaagcgattctgattgaatgaattgtacctggctttgttggtggcgacgtgatcctcaacattgttgtgtaacgtaaatcctccccttcctttgagaataaaagtgtccaatccagaaaagatcatgcctcctaggttaccgagggggttgtggaaactcggtcggacgttcctaacctcccaaagctctttatagatccaagagttcttcaaagcggtctcgtacgactccaggtttacaggaatagactcatcggcagattccgaagtagaagtaagctgttcgtaagctgcttcggccgcgagcattccagacttcatagcattatgagttcctttgattttcgggacctgatgtagcaaaattcgaccaaggaaagaacagatcagcgtgagttgagtcattacctaacttgtgttatttgtaaggtaatcttacattcacaaaacctataagagtagagaagtagatacaaagacagcaaatcattaccacatgatcgttacacaaaataagacggcagaagaaatcactcaccagctgagcacccaatgagcgcaccaccagggaaaaacaacttgggtatcgattgaacaccaccttcattgaggactcgcgctattgaaagaagcttgcagtcagacgattgcgcgaaggatcaactttaggcaacatctacaaggacagcagacacacctccataagctagacgctctccaccctccaaaagttttttgtagtatgggtgatgtttcattctctgcaccgatagggcaaaaacgaagaaaagtatccatcaccgatacgtcagttgcgagttcctcgttcatggcaattaccaacaacagaggaaaataaaacgtacctgaaactctttgtacggattcaaatacggatttgtgtagtcaagtccaatgaccaaaccaagactaaccattccaccctcagtatggtactcccatccaccaccatacgtcttccaatctaagggccaccccatagtatgaataacctttccgggctcatacacttcatcccgaactttccaaacctccttcaagccaattccgtatgtctgaggatcgcagtccgctcgaaggttgaactttttcatggcgatcttcgataaacttccatgagcaccctctccgagtaaagtcaccttggaaatgaaattcattccgggctcgtacgactccttcattcgaccggacttgtctagtccaacgtcatttgtgccgactcctcggacagactttccatcctcggagaacagcagtcgagcgcctgcaaaaccggggtaaatctcaacaccgagttcttcggcttgagcggccaaccaggctgtcacctgagaaagggatacaatgtagtttcccttatttgacatctgaggaggatgggggatcgggtatgagctgttgggaaaaaggaagcgcatagcaccattgctggccggttggttgagctgaaaaaggagaacgttatccagttaaagactcggtcgctgtaagagaaatcaataagtcgtaaagggcgcttaccggtgcccctagttctttccaattcggtaaaagctcgtcaagagccttggtctcgatcaccgcacccgaaaggatatgcgaccctattaaacaaagtatttcagagaaaagaaacagaattacgtcaaattgaggcactaaacacacctgcaagaagaaaggaagagagtacacaggagaaaaagaagtatgaaaagaagaaaacataccagcttcagctcctttctcgagcacaacgattcgcttctcctctcctccgtgttcctgctcgagctgtttaagcctaatggcagcgcatagaccagccggaccagcaccaacaatacacacatctacctcttcctcgacccgctcaacatcatgcggtggaaactcagagaaccgaaggagggagcttgaaaaattttgtctacgaatgtggatcgggttacgggagacggctagtgctcgagggcggaaggcagccttggcggcgaaagctgctggcgttgaagctgaaagtattctggaagagagaaagggcatgatgaatgatgctcaccaggatcagataacacttaatccgtgtatgcaccgatccgtgtttgttcttttcagagtttgtgtgaaggtggatagaatgatcgggcaagcgggtgagaaagaaatagaggaagataaagaaaaacgaaacactgaaaatgaccaaaacttgatggaggcgccccggcggttggatcaaaaccggtgttctgattggtcaatcgaccgtcgacctcatgttagccacagcaccaaaaaaagatgactcggatatgatcatttatagaaaggattgaatggacaaatacagctcgacatctacatagctagtctatagaagaaggatttgtttagagcaagatgaggtgaaaagaaaagagaaaaaatgtatatgtctattacgccctggctggaacattcgacgccgaagacccaaggccgatactctcgataactatcaaattgaacacagaagagagacagtcgtgatcaatttctgaattgttttggaccagggaaaaccccgtttaacaccagaacttactattaattgcactatcgaattacaccaaaaagcgaaagggcaacctgtcagcttcttcatgtgccaacctatctatcctgaagacaaagacttacgaagcaacgtcatcttgaaattgagctggccccaagatgttaacaagccctgctttgacaaacaattctttctgtgtaggtcggagatgggtaaagaatatcggcactcctctcgctcgatacgaaatcgcaatctcttcaaagatcgcaagcgctctacaaattgagaagagaacagaccaacgaaagcgtcagtcggaagatcggaggtgaactcaataagttggaggaaaattactcaacgaagcatcgatgtactctacatccgacatgtgaatcacaatcacattcgcctccgtccgccgaggtgcttctgaagggtgggccttactcggcccgtacagttccagtcgtcgaaggcgctctttcagttgtccagtgttggctaggaaattcaaactcaaggttagttgccataagtcctcatccggaatgaaaattttgtggcaaaaagtgactggacgaaccaaagttcaaagattctctgatccgaatgaccagcacaccgggaatgtcctcctcagcctctgggttctcatcaattgccgcccatttgtcgcccgcgcctcggacgtgaccaaggatcttgatccgggtctgggtagagttctgcacgacgaggatcaatgagaatgcaacagatgcgacaagtccaggcttttgtttggagagatggtgaatggaagttagaaaggacgtggataactatcaccagagaaagaaactatgtacctctacgccgacgaaaagagtcagcaggaaagtacctgtgaattgagtgagatcctgccatgctgacaccttgagataaaaccgaatttcatgaggagcctcaattataattccgataatcaccataaacacgaccgccgcctacagacatagataattcgggagagataacggtcagacggacatcgttttgcatgatcaaacaagagttgtcacttacaagcacgcatttggggaggtaaaacaaactaggaagtaggaagctgatagcgacgaagatacagaatgccgaaacaagcccggccatctgcgtccgagctccagtctctccattaagtcgggatcgagtgacggacccttttgaaagcaacaaacccacgcacgtgttagtcattgttgtgtcgttgatgagcctgacttaaacaccaatgaatatgatcaaagttggacgtaccaaaagcaggaactaatccagggaagaaggacgaagcgatattggaagcacctgaacacggacaacaaacactcgtatcagtgtttgcgagagacaacttggagagcaaaatctatgacaggggaaaatcatctcacccaaggcaaccaactctctgttgggagagatagaataaccaaacttgccagactgttctttggcagagacaatgctatctacgaagccgatcacactaatgacagcagatgtgctgaactagaggtacaatgaaatggccaccaaaaagtgtgtgcagtttaggctaggctatttggcatcgaatatcgactagtcaccacatttttgaagaaacagacgtaccgttcggatgaagaatttcagtgtatctctattaacagggaaagcaaccgatcctcctccgacaacggctaaactttcaatcttgcccaacacctggagcccattgagatcccaccggtacattctggcgagtactattgaccgagttacaaatgttgtgcagaactgattaagctgcacccctaaaacgccccaaattgttgcatgaataaaaaaaaataaaaaagaaggccaagagcttacgggtagtgatgacaactcctacaaaaatttctgggacaaacttgagccacctaaatcctcgtcgatccttcatcaacttcttggtcgctttggtaacaaagaggaaagcgaatgtgctgaaagaaatctatttcatagcgtttgcaccacggtggacgatggaacgaggcgttcaggacaggccgagttctaagctcactacgaagcaaagtctgactacgaaactcacaattgcggtcaaacagtgggtttccgaaacatgggtggccaaaaatgcaactttcgacacggtagtgtgaggaagaggcaaagccgcaatcttttgtgacagtcccagcatacctcccagttgctcgatactaatgattacggcaacagcagtaactgttgagacaaataacgaacgtgcgcagatatcaggatatgtatccaactagaaaagaagacgcttcagaacatgacttactgaatccctttagcagggctctggataagactacgtctaggaaccctaatcggaaaatcccgaggccaaatgtgatcaagccaacctgaacgacgatgatacgttaagaagaattatttgtttaagttaacaacaatgaaacgaatcttccaggaggcacgtacctgccatccgatagctgttgcgacatcaacaccaattgcttgtttcgctgcatcggaaagcggattgtgaacgtcacggtccatgtgaccctagaagacatcatgttgataaacaagaggtgtcagcgacgaaaacagcaatttaagacgcagaaacgggccttacgatgatctcctgaatggtatttccgatcaacaagcaaagcgccgcttctggtccgatagatagttgtctgcatgtgcccagaagggcataaataatcgctggcacagccgagcaatagagtccagagattggagagagctttgccaactgggatgcataagagatgccttgtggaattagtagacacgttagggtaatgcctgccacaacatctccagtaaaccttgagataaagtataaaaatgaaaggaacaaatttcagccacggcaatgagacccatgtggccgagcatggcggcaaaaatgcttacagctcgaggttatacgtcggcagccatgataagactggaatgctacattaataagggctcaagctatgagcgttccgactcgtcagattcaggctaggaggaggaatcagaaactggcttactagtactttgatcttgttctgaacgtcatgagacgtctactcttcgagccctcctgtagatcttcttcaaggtcaccggaacctttcgtttggatcccttggaaaaaaggtgtatcctccgccaacatgcctggtgtgaggacctgctgactgaaagattcgtcatcatcaaggccagagattctagatagaccgctcatgctctgttgctttctgggtggaacatatggttgctgacgtgctgaagataaggtcgaggataacaaaggagtggtagaattcggagcggccgttgtaggtgtgagatctgtatcagtggggaaagccggtgtcggagctcgggaagtataagttgattggtagcccatcgagctgctcgagaagctcgacatgattcagctttcgcctgtacagatctgaacgaggggtttgtgaaagatgggaaggtcgagagagaaagggagaagaacaagataggaagaaagaacaagagagttgaagcacaacaaagccaatgggaccttgagtatttccagagttctcgctcatccccgacatttcatggtaacaggttacatcgtcataaattgaaagttcttcgagtacacaagaagcatatagcatagaggaaatctcgagtagcagtgatagtacatcaggacacgatttgccgtcgtcataaactctttcttatcacatgaaccaagctctgcagttcagaattggtgagataaccataaagaaaggaaaacatggtgcttagttaatcaccaagttaccgtcacttccaactagaaacgaagaacgagacgatcaactcacgaattttggaatcctacagtctcattgatcctgtcttgcacctaaagtaagaagacaggcgagtcgagaaagatatataaaggaagattaatcatttaatcattcaagatgaccatacacggaaggcatctgacgtacatccataggcttgaagccctgtatagttggctctcggccttgggagcggtagacctgtgccacagaagaggatgggaagagtaaatgtgtgccgtttatggaagaagtagatatataagctatgggactataccagaggcctagcagcggccgccaaaatatcggcgtagtagcatggagtcacaagacccacgcttaattaaaacccacagatgtcagtgactccatcaagcataaccgccaaaagaaaaaaattgatttacgatcgagtggcccgtccataggtatagcacaaattgtaagtgagcctttggaactctaatccaaccggccatccgaaaacgaatagatcagatcgccacaatttgccggttactatggataatccttcatactgatagaataagattggtgaacagaaagacataccatcggctgtaaacttgttttcgtcgaccaagacgatataatgggttggctacgtagtcaagcgagacacctgtcttgtcagattcgaatccaaagttagaaacatatttgcttgttgcatacccttgcagttcccttcaatcctgtttgagctgttcatgattttccattgtgcagatacgaaacggaagagaaaccttagatcgagtaagttcataatgtcagggaactgataagctacaaaacacttacactgcagatagaaatcattcaagtagggatgcgtaatccctttatcacaaaccgttccagctggcaggttaccggttctatcaatatgggctctgagttgataacccacaaagtgccattagtttgacaggtctagaagatgagaggacagcatgatacttcaaagaaccaatactgactgctgtccaaagagtcggatattgtgccgtttcgctgcgatacagtatgtctatgagggaaaagatgatgttgtgcacgtcgtcgacacaaatcgtagaggataacaaagaaacagattgctgtagcatacttacaatagttggttgatacctatcgcgtaggaaagcagatgcgcaactcagattggcggtacagaattgatgtctgaaagtaacgaattgaagtcacatactttggattgatagttctacaagcatctcggattgctttgacctcagcaaggacgacctcttcgtatgatccctatgaaggtgaacccggctgaatatgttaggatccaaatattcagataaactgatgtggctcgctgacctcatcgactctacacgcatacagacaaataatgagaaaagcattcagctgcgagcgatcagagagatggacgaaaaggcgcacccatctcggtagaagacgatccttgtcgctggctggtttctgttggctttggcgtactctcgaagcatcttttcggttatgctagccatatcttgaatgatttccctttaaagatgacgcagacaaatatcagtattcttcggagatcatagccttgttcatgatgaagaagattccttactgtcggcctaaggaagataattgaagattcagagatatcagcatacatcatttatgccaaagaaggatgcgaagattggaagagagggtgaaaaacttgcctgcttggagtctgacaaataaaacaaagtaacagatgagcattcactagtttgggctgaaggacagagacccttgtttccatgtttctaccaggggctaaccttatctcagaccggtacttcgcattcgtaccatctgtagtggccacgaccgaagcggtagtaggtacatcgtgtgtatcactcccgcgcaaagttgcaggatgagtgcacttgataagtaaagcacaaaaaggtcaactcagccaacatcattacatcaaaatcaaaatcccatgtaacggagggtctcaagtacttacatccgctccaaaaataatggtactattcgtaacacccggctatgaaaatggaagaggaataaaaaaaatgtcctgtatgtgacatgatatggagctcaagactcgatctctggacttacgagatcgttcggagctacagcgtgggtcactcctgaaagcttcatgttgactttcatggcaacctgttgaatccaaggattgtttacatcggtttactggtcactaaaccgtttgtagtgagatcgtattgctcgacttacattagcacaatactgttgaaggcctcgttcattcgggttggtcaacttattggctattaagcattgagtcaccacaggcatcttcatgctccagctacaaagaatcgatgtcggatcgatccaaatgagcgggaagagagaacatctgagcacgaatccagaagtaggacgaaacctttggtgatgagacatacaaggcagcgcttttgatctgatctttgaggatcgtgtccttcttcggcaagataacgacgaccaactgtggctctcgggtgccctgtttcgttccaaaggtaatgagaatagaaacaacccatggttagacttagtttgcaggaaacgtatgtgaagaaatcagtcatgacttgcgttcacgctagcctggtcataaccccatttcagaccatcagagatggactcggggtttcgtgcatgaaaattcaaagtcagaggcggcctcttttggatgacattgatgccttgagatagacgagggtcccaatagagattatatcactaacacaatccttatgatgaagagaaatattgaagtacgtaccaacatcgctcatgatgttgacgaaaaacatgataaacttttgtaagtcaggaagtcgcatgtaagagtccaagcagacaaccgaccacgcaaacagatcagtccctttttggaagaacgtctgatcaagagcggaagtatatgtatcaagttatacgataagtcacgatgaagatctaaatgtatattaaatagtatatgactaaccttgccgttcaagttccatcctccatgagccggatcaattggtcttgggtttctgccaccatagtgaactgcaagctagcatagtcagctactttgtataggcgtaagatgtttgaggaagtcaaagacacatactcctgggtcctctcaagatacgcgcatcaacctccatcataactttagagacttccagcccccaggctttgaattttggctggctatcgtacgccaaaatctctctccatttgatgatgttgcttctcctagctggcggctcaactgccgtatgtttgatcatctctgccgtctgttcgctgttcagattgatcgggggcctgcacgcatagtgacgcttagtttcgatcacttcggatgtttgtgtgaaggccgcacttacaggcagtgattggcgctgatgatcacaagttccataggaacaaagttctttttgtctaaagtagatcaaaacgggtcgataagcttggctctggtatcatagaatctatacgggctcacatgtcacacatggccatcctgggtgtgaaagactgatattataaatattcttgaagtaatcggcaacttgagaaggtggaatatgttggaagaagtatcagtgtatgtgcttcgacagaagaactcggcgacgaatttggtggcttgcctgaagtcttcttgtcattcttggcgaagaacaactggtttgaacccaagggagtgaatccagagatggtggactctttagtgttcctacgatcgaaattgattcggcgaaaaaagaaatgttagaatagtggtacttaaacatgtgacaaagacgcggacctacctatggctgacagtgaaccttgagaatatgaatgtccagaggcaagcggcaacatctcagtggctgattgatgacaaaacaagtagagcagatcacaaagactcacttcgcgcgcctcaagatccgtcgtaatatatcgatctggtccgaggaaagagtagggggcaaggcttctccggagccaccgccgaaccctcctcttccaccaccccttccgcctcttccgcctcgaccacctctacccccagatcctccactacccaaacccagaattcgtgcagcaacttgaggcaagggaccttcttgaacaaaagcactgtacgccgtgtctgagatgtcacataccaaaatgtcaatcaaaacttttcgccgacatatgtgtgaaatttgatatgatcaactcaccaaggttgatagctggatatttagaattggtcggccgaaccgacctgttgtaaagacagaacagatcaaagaacatatacttgggtcaacttgtcggatgcataggcatatagagaattagagataggatggaaccaggaagtctcagtcgtgaactcaactggaaaaaccctttcccaataacagctccatcagcaaggggcactcggtcttccatgccaaagaatttgtttcctcgaccaccgatcggttcaaatcgcttcgagggctcatctcggatcaggatgttaagagctgtcagagccgtcatgaaaacctcaggcatatgcgctgctgcaatatcaccactgcagtatttgaaaagaacggaagtatctgtcatacaaacacatgatgcagatgcatatatgtgtcagtgcggaatatctgatcagcatcagtggtcaatgtgttcgaataccaaagtgcttagggttgaagcgaaccaattttggcagccagcttgaatgtcactttgaatttttggccctcttcgcggggatgagatttgtcagtctccggaaggtcgacttcgaatcgttcgatctcattttgaaaggtaacggctgtaagggcacaatcaaggagttggcacctctcatcagaacgtcgaaacaagaaaagtgagataaataattgtaacaaactggtgaatgcattttgacgctcgtcaaaggctctatcattccaaacaaaacacggtactgagtgcgaagttcgcggtttgaagattctcagtagaagtaagagggaaaagtgcatacaaagtattgaacacctgagcatatgcgccggtagcctgctttgagcagagttcttgaaagacagccctcagtaagccagaaggatacttctgatttgctgttttctcaacctactcaaaagtatcatgagggagagcaccgagacaagacaacgtctgaatatttgagcgacagtccaaacataaaagagatgggagatttgacgaaccactgtgatgacgacatcatagtggtagatgtccctatttgatcaagccgtacgcatgattctatcagcatgaggcttgcatgcatcttcaatatgtcatctcttactttggatttccttcgaaccgaattgggtacaagttcgcctggacctcaataggttgtccagtcgtcccaaagcctatcaccagttatcagagattagaaaagatcagatcagaatagaattgagatagcagtgtagtcaattgcatgtaccgggacgaggcgagaacactgagatatagacgataaggaaggtcgaattagtatacggcgtcctcacaaaggaccagacagaaattactcgactaaattcacgagatgtaggcttcgacaccggatctcctatagagatggaagtctttggtgtgcgcatatacatcgaaaggaagaggttgatcaaggagtcttcttacaaagaaacggtaattatgaccgcaatgacagacggacccttgcttgtttggcaatgttgggaatgttgatcttggtgtcagccatgttgtttcctgtttgaggacttgatggtctaaatcagacttgaaaggatggattttgagaagaacgatgagtatccgaagtttgaggataggtcttcataaaatattgatggctgcttctttcggtctaaagcgaggtaaagacaaaaagtatcataaacacacagcaactggtgtagaggagagtttgatcaatcataagttagggttgttagcatttctccgctctagaaacatgaaacacaacttccgttcatgtggccactttgctctttcaagacccacctgtttcttatcttatggacaaagcactctctcttcctacagctcaagactttcaaccaactccttcacctaggcctcctccgcctctgtattccatcgctctttctctgtcttcggagggatcttcaactgctgatcatcatcatcctccaccgtcaatcgttgcatctcctcgggagctagctcttgcattcaagcataacgagactccgccggctggcttgaccgtcgatgagaatagagaaggcgtggctcagcgatctactgggagagtagctggaccgattacacttgaatgggtagattttccgtccagctctgtagaaggttccattgatgcgtatgtatttctactctttttggtaccataaagagttgccattgtttaatgatcgtgcctgcttacttttggcaagaaagatagttcgtccgctcagcccatcgcttcccagtctggaaccttaaacttgcctctcggagtcgtccatttataccggcattcatcctcaactaagcccggtgatggtcagtctgctgagcgaccaaacttgcccctggcctgctcttcgtccgctcatgtgacggccgaggtgaagtctgcgtcgaaggagcagatagctcagacggcgcacgatacaacacttgtggctatcttagccataccatcctacatgactccctccgactttttggcatacgtaggacaggtcgaagaggagatggagtgtctacggatgatcagggatgtctcaccggcaagaagtttggggctcatcaagtttagaagccagcaagcatcagaagagttcatcgaggaggttagcatagtgttcgagacacagacgttacgattgttacaataagcttacttgaccgttcactttcatctggacagtacaacggaaagcctttcaactctctcgaagtgagtttgcgatctcattagatcgtgtctgtcaagccagctaacttttggcctgtgtctgttatgaattcacaagccggaaacgtgtcatgttgttcctattcttaatgtgctcacacattacgtgcagccgacttcagctgttcaaaccaacagcgcttcgtcagatgcaaactctgcctccgatgacctaaaagccgtgcctacagcggcatttccaatcatgctcgagtctgaacggccgagtatttcattaacagacccgttgctgaaggatacgtatgagctgccaacttgtgcggtttgtctggagcggatggacagcgcagtgacagggttgatcactgttccttgttcacattcatttcattgtgcttgtgtgagtcaagttttgggaaaactcaaccttacaagtctttttgctatcgagaacatctgacttactctctccaaaaatccgctgatggcagctttccaaatgggcagactctcgatgtccggtatgtcgatactctcagacgccgctttacgtaaacgcgtcaaacgcgaatgtgtcttactcgaggacaagatcaagtccccaagcgtcggccatagaaaacggcggatcacctccgtcatcttgctcgtcatgcgagacgagggaaagtctgtggatttgtctgatttgtggttcggttggctgtgggagatattcggatgggaagcatgcccagaagcattacgatcgtacaggacatatgtattctctggagttggagacccagcgggtatggaattatgctgccgttcgttccttcatcctgctgttcctcgcgagaggaagggtttcataatcttttcattcgcttccacaagcttgctgacaagattgaaaagggaacggaaacaggacgaatacgttcatcgattgatccaaaacaagtcaaccggaggcttggtcgagctgccggcatcatcatcatcttcgaatgcccagccgacgacatatcatccatcgagctcgcttccaatagaaaagctggaggcgatctctctcgagtactcccatttgttatcctctcagctgactgcacagagggaatatttccattctcatcaagaatctcttgaagatcgaatttcgcagctcgaggttctcctttcccagtctgaacgtgggaaggaaaaagaaaagatcaaacggctcgaacgggatctccaagcagagaaagaaatgagccgggcgcttcaggagaatctgtatgtcgcaaaaggcaaggcagaattactaaagggagagattgagctttggaaggaaaaagttcaggagggtgaggagcaagtgcgggacttgatgtttttcctcgaggccagggacaagattgctgctgccgagggagaatctgtcggacaatcggcaaccacactgacgacgacaacggaaacagctcagtcggatccacctagccagtcgacgccgtctctgttgggggagatgcgtggaggtacggttgtccttccaccgagtcagccaagctcgagcccgagcccggggaagccgagtggaaaaaagaagagcaagaaatctaaaagatgagggatcggtgacaagagcgcgatgaagatggatttggccgaggcagagagaaagttgatcaccgagtctatgccggaatgaacggaaagcaaagggttcttctcttgtgttctctatccttctgcagagtagtgtaactagttccgaacatagttgattagcctcggttttctacatgcttcttttctttttcgccttcccgggccgggccagattaataaccgatatcgccggaatgtattcccccatcgattcatccggcacgttcacgagtgtgcatgacttgtatctctctgctcttacattttctttccccaacgaacattacggcttggatgatggtttatcacgaggatatagttatctaggcagaccatcatttcctattggttgaatgtcaagctgagaggtgttttaatcgaaagaactatgcaaaaatatcatgatggagcggtcgtgtgagcagtagatgctatgtcaatccggctttagtggagatcggacaatacgcatcagagggctgaggagtgagagatggaactggctgcttatgacgttcatccttcttgaaagtttcgttccccagcgtgtattggctggctgtttcgatcgatcgatcgctccaacgaatagatagtttgatgattaaaaaaagaaccggatgacagagaagaactatggaaaaatgaagaaagtgattaggaagggtagtagaaaaacgatataggaaacgcaactacggaatcgaacagaaagactacaaaggaagactatgaagtttataatatcaaaaaaattacatccacctgcgccaagggtgattccggggagggggcagacgccggaagattgaccctgctgcgcatccccaagggaatttcgttccccagttcggtatataagtcctaggataggaaacattcaactttctctctcgccctgtccaccacccactccgactcatctatccttcatccttcctcccttttcactggtgtatcctttgcttttcccctcgttttcttttcctttgttggtcaaagaaaaaccgagaaacgagatcaccttttcccgactctctctccttatcactccctccgacaaactttccttttccccagccagccctattctcttgtaaagatgtctaacgtctcgagcgaaatgaaacagcgacctcggtcgatgtctccccctctctcacctccgctttcgcctcagtcgaaagcttctaatttgctaggaggtttgtcctcttcttaccgcccatcttccgctccacacttttttatgcgccgaacatggccgagatgtggcgagaacgtgactgacaagcaccgccttgatccccaatttagatatcaaactccctactttggctgagccaaagactccttcggagcctacggatttgtacatccaggacaactatgtccaggctatgttggataagcagaaggtgcgtgaccatcctatactggctttgtccttcatgctgtctgtgtactctcgcttgtttctgaacagacttggtatccttttcttttctttgtagactctttctccgattacctggagaaatctgatccacaacatccagtggatctctttcctggcgatcactgtcaccccatccatcgctatctttggattctttactactgcatggaacaccaagaccgctatctggagtgtaatctactacttcatgactggaatgagtatcactgccggtgagttttgtcatcctggtcacatcagttgaatatcgcttcactgtttcctgtattaacccagactcttcattgtcttgcaggctaccaccgactctatgcacaccgatcgtacaacgctgcacgacctttggaatacgctttcgctgtctttggagccggtgctgtcgaaggatctatcaagtggtggtcacgaggccaccgagcccaccacaggtacactgataccgatctcgatccttacaacgcccacaagggtttcttttattcccatatcggatggatgttgatcaagcctcgaggtcaaatcggaactgccgatatttctgatctttcccgaaaccccgtggtcaagttccagcagaaggttcgtctttagctgtcttatttctcactgccctttcgaatctttatctaacttctggtcgtgtacatattataaactgcagtggtacgtatacctgatcatcggcatgggattcttattccctaccgctgtcgctggtcttctttggggtgattgggctggaggattctactttgccggagctgcccgattgtgtttcgttcatcactcgaccttctgcgtcaactcgttggcccactggctcggagactctcctttcgatgacaagcacactcctaaggatcacttcattactgctcttgtcactaacggagagggataccacaacttccaccaccagttcccgatggattaccgaaacgctatcaagtggttccagtacgaccccaccaagtggttcatctacggaatgtctttgatcggtcaggcttctcacttgaagactttccctgccaacgagatttctaaaggacagtacactatgaagctcaagaagttggaagaggagacccagaacctgaagtggcctgtggagaccaagaagcttcctgttgtttcctgggaggacttcactgaggaatccaaacaccgacctttgatggccatccacggctacattcacgattgctccgccttcgccgacgagcaccccggaggtgctcacctcatcaagcgtgccattggaaccgatgctaccgccgctttcttcggaggagtatacgatcactccaatgctgcgcacaacttgctcgctatgatgcgagtgggtattctcgaggctggtatggaggtcgagcacctgaagaaggactttgcaaactcagagatcaaccctgatcgacacctatacactaccgatggacaacaactccccaacgcagaagagcgactccagcagactcagctcaactctcagggtcctcgacccaaggccccgatgggtcagccccaggctaccatggccgaccgattcactcttaacgtccctccgtcagagcgactccgaatcatccacactgttccctccctccgacctggaagggagagccgtgctggtcagcttcagggttcaatgaaggcggagatgaacggagagatcgacccgctgatcggaaagaactaaatgcagtccaatcgaatattgcatttcctctttcttccgctagcctttcctctgctttttgttgtccttttctgtgtccgggttttctttcatctttgattctctgcattttcatatatgttccttctctgtttgtaattcagccgatgtcgttcgtttgcatctttgacctcttatcaagtcctagcctgttctcatctttcttgccttcctaccgctatgttgtcgtcactccatctcctttacgcatagatgtcgcttggtgctcctatctcccttctcttatgggccgaccaagtctggaaagccttctatcaagtgttcgtaacacaatgagattttctaaagagaaacagaaagacaaaatataacatatccgaagtactgtggcttccttagataccagactgttcattctagaacaaactaatggaagattggtgttgattgagaagaaaaagaaccaaacagaaggatttcaaagttttgcctttgacaagacatcctgcgcattgtccggtccgagataatcaagctcggtaataagatcttgctcgtgcagaaccggacggttcgtgtcaggtctttcgtcttgaccaagtgacacacctcggttggcgaaggaccatctggagctgagtgtaggggacagggtgttgtgatatcgttggagaacgagtttgccaatgacagggaagaacttttttggttcacgatcgcgcattatgcaagacggaaatcaggtcagccctcgttctccaagttcactgtcggaaaagaaaagaaaaacctttgtcgagaactcaccttgaaaccgtgcccacttccaccggtggcaaacatcagaccatcatactttggatgatgatcgactagaaaatctccattttccgtatcagagtaccaacaaagccgggttctttggcgagaacagagagagcgaaggagtaaggattgacactcgagaacgtatggcccggctgtgaattagaaacagctatagaagacgagggaaacagacatacccgataaagtcctttctagagagtttggggtaaaagctttcgaccgcttctcgaagagcggccaccatcttacgggagatgtacccagcctcagctccaggagtgttctgtttcgagaatgcgcgaaagaatgagtacggttagagtatgttcatatttatgataagaggattggcaggtgcatgggagcaaactaacaaccgtcctgggctcggatacgccacctttgtcttctctcgggttgatgtaaccagctgtccaaaatcgagggacagcttcaataccagaaactgtatgacacattccaacttcaaacacctcgacctaccatggtgaatggcgcatttgatgattccttccggatttggcgggaaaacgtatcctccagaggaaaagtcccaaatgacggggaactgattgtgaatttcgacctctgcgggtgtcagctgaaacttagctaccgattggccggtagcggtcaagaggctcgatacgccaaagtcagcggaagggaagattgaaggcgtcctgtttgagtagaagagaaagatgaagaaacctatatgagcatcaaaagccgaaaacgactccgtcgagaaaaggaagaacaatcggatagaaaatcaacttaccacgcgccagtagcgacgatcacttggtccgccagaatctcctccccaccgaccaatctaacacccttacatgttttaccttccaagatcagttccttcaattcttttcctccatcgattcttcctcccagattcttgaccatcttatgaccaacttcaaccgctcgggcggcctcggcccaccctccgcaagggttatggtatccggttcgatcctcgaacgagcttagataagggtgcagatgggatgggaaatggttgacaatcgccgacgagtccttcaggtccttggcaggaatagaaagttcaagaaggttcttgtagctctgttcgataaagtgatccttattgtgggacggacatagaacgaccactcctgaggtatatgagcgaaggcgcatattgcgcacgcgcgtgtatatgacaatcaatgataacagcggttaatatcttgactcggagagaaagcatggaccagaagaaatctgagcgaaccagtctcatggtagcaaccctcccactccggtttcttccactcgtcgatggcctcgacagagagacgagagaattccatgtctgcataatctccagcgcgaatgatctatgtccgataaatgaaaaccaaccaaacgtatgaggtgatgttcgatttacccgcggcacggtgggaagattattaccttgttcaaatcggttgaggctgcatcagttgcaggcaggactttgctctgtgaaacaagggttgaagaaagaggataccgatagtatgatgagtactggctctctttatcgactgtagaccgaatagaaaacacaggggtagaaagaaaaggtaggaatgatcgtgtggggaagaacggccgattatcggacttaccctatcgatgatttggacgtcatatccaccctctttcaagaaggcaagagcggtggagacaccgaagatgcctgagccgacaatgaggattttcttctttgcgtccgacatcacttttcaatagatcgaaagagattgagagtgaacgaatgagatgtccaactggattttgtctacgagtttcgacttttttagaatgagttgcgcgcggctgattattttaggatatgggtaaatgttcaagtaactttcaaaaaaaccttacgtagaggtaagcgctgtaaccatcctccggtcagtccaggaagatcaacaacgaaaacaaagagaatgtgaaagctcgtcttggtcaagtcttgactctttatatccatcatcaggagctctggtcgtatacccacacgtgtttagtaggacagaaaactaagaacatcttttaggttccaaagttcattgtaaagccggtcagaaaatcgacaatcacgagtcgatcagatggacggagcacccccacccgaggaggatttcacaacgatcgcgctccctgaacggagcgttcacaaggtttgtgtctttctcatcagttcttgttgtaattcaagcaagacacacatcagtggtgcttgtaccaaataggagattgaaattccgagcttcatgatcctagaggcccatgtttgtgatgctatccttgatgtattgtcagggatcaccaattgatatcatcataggatccagtctcactgacacaagcattgccttacctgaatggggaactatatagaactggaaagctcgtctgtctgcatataccgatctgacctccaaatttggtctcactacttcggacgaagacccattttttcgaatatacctttcgtgagtattggttcttgagaccttgagggatcctaagcatctcctactaaaaaccatatggtttctttcctttgtccgtgctatctatcagagatcctgatctattgaagaaatgggccacagactccaatgtcgttgctcaggagaaaggtgtcgaagctctgtcaacgttggttcgagagagtggagagaacagcgcaaggttagcatgatgttcgactcataattcacctctatcaattgatcaggttaaataacgcgttgaacaaatgtcgcctagattgagagcagacatatttccatcggtcatagacaaatgcttcgggtcagccagagcaagtatgaagatgaaagctatcgaattggcactcgtttggattgaagttgaaaatacgggagagggtgtggttgtgagtacaagactgacatatagacgacaatctttcatgcgcatgtactcatctcggcgcctcgtcatgctcggtggtcgcccacagatggatgtgttgaaaggtctagaagctaagcaacccaaaatcgttcaaacgagtgtgaattgtctgaaagagattgtgacgtgagtcgccttcattcgttcacgatcttcacatgtttctctttctcagctgacagatcatttttctctagtgcgtacggcatcaaaacgctggggaaccctaaaccacttttgaaatctctgacaaaaatctttggtcatactgataaaattgtcagatcggaggtaggcgccagcttgctccaggttctgctctgtggaatctagctgacagggctattgtttctttctttttctttcatcgcaacttctagggtactctgcttacccagcagctctatctcttccttggcgcaacgctaactcctttcttacaagagcttaaaccaatccaaattcaagaattgaccgactcttttaattctctcgcgcctggtggatctggaataccttcacgtcttactcgaagacagcaacgcgaacagcagaccaaagagatggattctgccaatggcgctggtggagacgacggggaggaggatggcggagatgatctaggccttgtacccgataaacctcctccggttgatgcactcgccaaactaccttcagacttccacgaagcaatagcctcaaccaaatggaaggatcgattggaaacctgtcagacatttctccatgtactcaaaacaaattccacgatcgaggatgggaactttgaatcggtggtggccgcgcttggaaaaagaatggcggacgcaaacatcaatgtagtcatcgccgctgcaaacgtgatcgaggcattggctacaggactggagaaaaactttgcaaagtataaggctgcagtgatgacacctattatggaaaggctcaaagagaggaaagccacggttgcggatgctctaggaaacgctttgtatgccatctctaccactgtatgtttttttttgtttttttcaaatttaactttcttctgatttctttctaccagttctttgatttcatatcgaaggtctgtccttgaacacgaaaagactaaatgaatgatctgcttctgttgtgcaaaactaggtatcccttccggatattaccgaagatgttgtcactgcgttgaaatcaaagaaccctcaggtgaaagaagggacccttaaatttttctgtcgagtgctcaaggaaactcgagaatcaccttcgaaaaatgatatcaaaccactgtgcgattctatcgttccctgtacgggagactcattggagcccgtccgagcggcagcagcggaggcattgggactaatgatgaagatcttaggagagcgagcatttggtccagtgttggaaactctggacgactcgagaaaaacaaaagtcaaagaagcgttcgagaaggcgcagatcaagtttaaagttggtggaatgccggctaaaggcagtggcacaaaaagtggtgggtcaactggtcctgcggctgcaccagcgccgataaaaaaggtacggcacacttatcctgagatgcagcagcgtgcgcaagtccaaacttacatgcggccttgtcaatcaattttagcccgtagcagccagaccaaaacctgcagttgcttcaaaagcgacagccaatccagcagaagatgaatctcggccacctccagctccagtcgatagaagctctggatttggtggtgagttcccggaatcgaatcctaatggatttggatctgaagatccaccaccaccacctcggactgctcccattcggaagccacccgctaggttattggcagttcgttcaatccgtcgtattcctgttcttcatcgcgagagagtagaagaactctgaaatttcgaatgagactacttacgtctctctgtttggtctttttcacccactacaggcaaagaaacctgctgtgggagctgcctcgacatcagcaccttccgccgtcagaaagctacctgcctcaagttcttcaagtacaaaaccaaaaccgggtccagcctccgcgtccgcctcggaaccgcttagatacaagtattcttcagaggaagcagaagcgaagtgggaggtcatgatacctggcgagatgagggaccaattagcagatgccaattggaaagccagactggaaggaacagaaaaaatgacggcatggctagaaaatggcgaagcagaagttgtggaaagtgagattatgtttagattcttctcaaagatacccggttggaacgagaagaatttccaggtgagctctcttggttttcacggcatttctgatcaacttacaagtggtgggtttagcgtttatgagctgatcgaattgaaatcgatatcgatcgcaggtgtcctccaagatatacggaatgatggctttattggccagcaaatcttcttctttctcaaaggcgtgtgttgctatatgtgtgggccacttgaccgacaagcttggagatatcaaactaaaaaaaccagccggagaggctttagtggcttttgcggaaaaactttcattgggattcgttttggaacaaggtcagtgacaacttctgtctagttatacacgttatatttcattctcctttcactgatgagatggatcttgtagcattcgaaccaatgaccaaagccaaatctcccaagacacaggccgatgctatcgcctgggtaaattcgacgctcaccgacttcggaattgccggaatcgctcttcgggacctgattgagtttctcaagaacggtctcaaatcatctaatgctgctgtccgagctgctgctaccaaggccatcgtcactgtcaaaatctttgtcggttccagttagtagcagccttaccagaattgtttacacgaccgtagtcaattcatgggctgaaatccatcacttgtccgatctttctctcctcagctgtctcaactttccttgatgacctgaaccctcagctactaaccacgatcaacaatgaattcgccaaggttgagggtcaaacggctccagaaccgacccgattcagcgctggtcttgtcgaagcttcttccagtcaagggaagggtggaggaggtggaggaggagatccgttggatcagttggttcccagggcggatttggacaagttaatatccggaaccagcatcatcgcggatctcaagaacgccaactggaaatcgcgaaaggaaggggcagagactttattaggcatcttacaggcaaacactagattgaagcctggaatgggtttgtctccacatctatcttttccgaagaccgcaggtcaaatataatatttatcactaatatgcatcattcttcgacgcttcatttcttcaggtgagattgggtctatgctcaaaggtcgtctcaccgacacaaacatcatggtcaagcttctttctctcgactgcatcggacggattgctaaagggatgggaaagccattcgagaagtttgccaagatgtttgtcgtccctgtgtgcgccatcctagccgatcaaaaggtctccacccgaggcgccgctgctaacacactcactgatataagtactgcatccggaggtctcgacggcctcatgtctagtttcgctacctccatggagaaccccaaccctctgctccgaagtaccctgctggcttggcttaccacctggttccaagaacatggtacagcatcctctgatatcactccgttaacttctcctctcattgcctgcttggaagaccgaagtccagacgtccgaaaaacggccgccgcactattaccaattgttatcggcgcggttggatacgaatacgcaatggagcaggtatcttccttaaaacctgctatgcggcagactgtgattcctcttattcaagctgctcgaggatcggcctcggccccggccccaaccacgacgaccgcatcagcaccatcgaaagttgcgactactgccgccaaaccagcatcttctactgcttctgtcgcctcgtctctacctccgtcgcggccgacttcttccacttctacttctaccgctaaacctgctgttgcaacaggcccgagttctcgtccaaaaagtttgatgggagcgatgcccaagacctctaccatccctacaagttctcgtcccgcctcgagagcagtatctgtctcttccaatgatgattatggcacatcaaagataaagcccgggctaggtctaaagagaccaggagtctctagttcaagaactgtttcttcaagcacttcagcttctctgtcatctggaacttcggcttctcctccgttccggacttctgatccaggagcaaaggctaatcgggctaaaaaagatgctgctcgatgggtgtttcatgaaaaagctgaggtgtaccatactgaccttcttgctactcagatggagcctcatgcgtctccaagtctgtacaccctgctgttcagtagagaccataacgcctcggtcgacttcttgagcgggatggcaatcattattgcttgtttccaaagcatggctggtgaggccgagcggatgggaatcgacgaagagtctcttcgaaactcgctcatctgcaatctggatctcatcctcaaatacgccgcgattcgaatgcatgactcaaacactcagtccatcactcgtgcgatcgatttagtcgaacagatgattgacgacttttccagtggcccagacacgtcggtccggcatagcttcgatgagtatgagttgcagcttgtgttgcctactatgatctctaaggtatgcctcttattagtgcggtttcccaaccttttttccctcatgattgacgcaaaaaacttctttgtgtagctgggtgactcgaagttccagtctaagattcaagatctattcaagggcaagatgcgttatgttgttccagcttctagactctaccagattctggtcgctcaaggtcttcctctcaaaaatgcgaaagcgcgagtggaggtactaaaggcgatgacgaacatcatcaagcagatcggtacaggcgacactctcaataaggagtctattgccgctgtggtcaaatgcctatccgattcggatggtaaaattcggaatggcgctctggatgttcttgggtatgtacatatgctctattgtctaccggatctgtgctcatagaagtttcgttatgcttcatcttattgaatatatcaacttctgtagagagacttacaagaccgctggagaagggatctacgatttggtgaaagtcaatcctaaagaacgagacctcatggatgccagattcaagcatgtacaagggcctgtaccagtcgcaagcaaagcactttcagcccgattagctcaggaatcgacagcgcgatcctcgtctcctgctataaatcggatctctcgtttgccacttgcacaagctgaatcaccccgtacagatcttccttctgtactctctcctccgcgaattagtagtccaagacctttagctagccttgccgccactccaggtaaaggaatacccggtccctctcgatttggcgcacgtcctgcctcggcaattcatcccccaccctcccctttgcctgctcttcgccctccttcccgaactactcaacctgcagcccaaatcgacgacgagttctcaccctccagttccagtagctatgctcctccccctcaacctagcttcccgactacttctgtccgtgctccgactcgaatgaagctcaacggactgacctccggccagtctttgcgaccttctgcaccagagacagttcaatcgccatacagtgaagatactagtgatgtcattcgttcgattcttgcaaatgacccccgaaaatctgttgagggtcttaaaaaggtccaaaaattattcgaaagcccttctgaggcattcgtaggttcggttgacgagttgttatctgccatcattaaacagtccaaagtcgtgtttgataccccagatcgacttttggacccggcttggttccgagtgtctaagcatcttatccaagccatcaattttttctgtgatagacctgcgttgcttaaggaattggacaatgacttggctgaggaccttctacatgaactgacggcgcggctgcttcagaccgatgattcaacgggcggtgagtcaatcgaggcatatccttcatgtgtctctgcttaggatactaatcatctatgggttctacagatgttcgggaattatctcgacatcttaacatgatcatcctgcgtattttcaatggtgctagacgggaggtcgttttccagtgagttgacttttactttgatctaattataagcctgtcaaccaatttttcaacctttgtaatctttcgtatttagtgctttgtttgtgttgcttcgcaaagtaaccattcgatttccagaggatcatatctcagctacgtctcgcacggccaaacacgccgagcttatcctaaagtgtatctggaagcgagctcggagtgtggaagaggatctagagaacggcttggtggaccctgtaatcctgcttcgaatcatcgaagagtttttgcagcagatgccaccagcagagtggagaaggcgagcccaggggaacattccgatgggagatatgccacttcgtaccgtgaaggttgtgcttcagcatgtcgtttgtgagtctgggtcgtttgagttagctcaatcatgactcaaagttgaaaatttccggttttcgtattcatcctttctgttagccaaatatggaggcgagcgcgtttatgatcaactaagtgcagcatttgatgaacccgaagagactcacgttagccgcacttcttttctctggttttccgctcttgaaactgatttgatatatatctttccttgagtagtcttacacgtatatctttcgactaggttcgtgatttcttacctcatcgtgcttagaagcgagcttttcaaaactgactatgtatcgcctgctgctagtgaaccaaactactcaacctcctccttcatcatcatctggatccatgtcccagtcagatccaaagtcccggacagagagtcctcgcttatctgtctcggatggtcggcctgaatcggtagcttctacgaacagtagtaccattgatcggtctatagctcctcccacaaaggagcaggtcaagccacctagttcaccagtgaaggattcagatgttgagattagagatgaaattgagcaagagatgaaagatatcgttcaggctgtcgttcgaggtgactctctccagcgagtaagtgtctcgccgtgttgtttgttgatagtttttttttttcgacttggagcatttaccttgagtttggcaatcatttactgctcagcgtatggaagagttgtctcagattctaattcggaagcccgaaaagaagggcaagttcgaagaactgatttcacatattgatgtggcacttcaaatgtttctcaaacgagctgtgagttgttgtctccctccccgacataccgtacttgattcggtatgttacctgaactgatctaacgtacggtcgaggtttataggtcgcgaatcgtatgcgaagtgaatccgaatctccgaccggtgagcgattgtctaactatgactccagacttctataagagactatgcttattgcctatgtacactttatcaaaccgatcagcaatcaaaacctcggatcctaaccctgcaggctcccctactcaagctcgatcgccgccgccgcccacttcacctgtttccggtcaaccacagttcagctcacgacccagtaacactggaatgagccgtccaatctcaactctaggcctgaatggatacccgaggtctgccactattctgagcacagaggaggaccctcagttggctaggtataagcaggtacgtttgctgtcgttttcctttttttattttccaacgttggaagctgacgactctatacatgtggtgtgttcttatcagatgtttgggtactctgttccttcctcctcctctctctcttcggctacgtcttctggtaatcttcctgatgagccttaattcttcaagactttcatcgttattctcgccgaccacccataccccaattgttctatactctgatttctaaccctaattttgtggttttcattcgagattcttgctcgtttttcctctgctataaattctatgatatctttgcttttgcataaaacacgtcagattgcgtcgatttcgattttcattaacaatatggataatcgacattgttcacccagtaaacacctatcgtgttctttccacgctgatgccaacaccgggaggtagatgacatcatgtcgatatgagaaagcaagccatcatctttgatataaaaacagttatccttatctcaatgtcggggaatctagccgccctgagaattatcatctgtttgttcacgtcattcagaatatggcatgaaatgcctgaggatcacgaattgtttcatcaacatcatctgagcagtacccgttgcctggttaggcgttcaagaaatttccaaaccaggttgatcaacaaattgtccttcttctaggcttgtcaagaagttttcaactaacatcccttgggtttgttcatcacattcgtatcaaacaaaacgggttttgagtcgatgaaggattggacctgggccgtatgtggtcagtctgattgattaccaaagcgctttgacattctggacggctactgttacgaagtattgcctaaaacgttccaggagtcaagaagcgcaagagtctcgaaggaagggttgattagatcagattattgatccgtgttgctttcatccaggccgtaaccaagtttctgttcacgttcagtcttcttggtcaacaaggagatgtcaaaatcagctctttgaccaggaatcaattgtcgaatacttgattctttgtgtgcttcgtaagagagatcgtcgactttgccatctgggctgatatattgattgtgatatacccagacagctaattcagaggtctcgtgatgatcaaattgattgaacactgatctctactcaatatgtaagagaacgaaaactctataggtaaaaccagagctttggatgttctttgtgcatacagcgccggtgtatgggcgatcaatgccatcccatggttgctacttgaaacttaccaacctggctgttaactctactggaacagactgcctcactgtcaaactcaatcgagtctaatacaacttcagactcgccaggaggttgacacagacgttcatctatctagtcacttttttcttgctgggcgattgtctgaaaacatgtgggacggtgatagcgacgctattgaatatgaacatgccgtatcagacgcagaccctgaattacttctgagtcaaagtgcatgtgtgcgagtttctgtaatgcagatgtaaggaccgataaagtcaaccacaagcatgaaatgaaagcaaaatcaaacaaattgtcgattttttcttaaggggcaacatattattcgagattgactacgagattgaagaaatataataacgacagctaggaagagaatgaatcagaattcaaagcaatacctgatcccgatctggagtcacagaccgatctagacccatttttctttgggaccatacccgctgatgagaccagctttgaaagcaccagagaatcttatctctcttggtgtgagctctctctcctcttctggcggaacgggaacagcggttccattgagaacttgttgagcgcgctcggctgccttttgacgaacggctgcccgttgagcttttaagcgggataactcggattccattccttccttggtattgggaatgttctgtagttgagagcaggtatcccgagtcggtaagacaaatcagaggaacagatcggaagacgagaacgttattctcacagaaagatgggccggatcgggccagaacgcttgtcgatactgtgtaattgggaagatcatgaagaagagttaaggaaacagtcagaattcttgtttttgctcgcttgtctttgcgcaaagcttgtgtatttgaggactcaccggagcgacgtgctcttcataccattgcgggtcacctaaactcatgcgaaaaaaaagctaagcctttggaggtgtcaagaaaattaccacatatgaacaaaacgtaccgaaatgggtcctaaagacgagacggaacggaacgggcaagaaggagttggaaggatgagaaggaggaaagaagaaacggtgcacacaagcaggctcactcacatgaccgcgattggactaggaacatgtagacagatacaatgatgagaaaacaaaactatccgaatgagaatgatgagaataaagagcaaggatatacgtacaagaataggtagaacccaaacttgaatacctcgactgcaataggaccagggatggagttcttgtgagtgatcaatcgatcgacgcggaccaatcacaaacatgaaaagaaagaagcgtacgatttgctcctcccattattgaactatatgtgactgcttatgtcttggcttctggtctccacaccttctatgatgtggttgatgggtgcagagtgtgagtatggatgtgtgggtgagggagaaaggtagttgccacagcttctgacttgccacaatcacgtgtgtcttccttcatactcagctgtttaccccgaagtatcaaacactctttctcaccttctcaccttcaacccttgatcctccaaccatcgaccctcgagctcacatacgctctctttcttcggctttctctcatcatgagactcacactcgttgccataggcagacagccaggcctgtttgccttgcttgttcttttactcgcactctcttcctctacagcagacgcacacgcaactcacgacgggttcctttttcaggcaagaaccgatcacgcaaagatggcaaggagaaggtccctgatgaatatccaggcaaagcagctcgcatcggatacccagatagctgctgtttcgtctaccgctcaggcagtggttacaactccagctgcgtctgctatcgtaacccctactacatctaccgccgcgaccgcgtccgtttccagcccgtccaccacagcctcagttgactcggtgtgttttatctcttttcttcttgcttgctttgatctctttgtatctcataactaaacaaagctgtacattcatgttcaattctctttcagacaaccaccacagccgtacccgtcgtcgttccggccacgtcctctacttcgtcgcagcttagccaagctgcttcggctactcctgtttcctcgtcttcgtcctcggtcgtctcgagtagttcatctgctacatcatcctcatcctcgtcttcatcctcgtcttcatcctcgtcatcttcgtcttcatcttcgtcttcctcatcctccagcctcactaccagttcgtcttctaccaccacggctgctccggtttcaacctcatcatctgcttctctcgtcgcgttcgtccatatctcctttgctcaatcataacctgaacgttgactgatatcatggcgcgtccgcttcactgtcctcttgctttcaatcaaacatgcagctcgacgtccaccggagctggcggaaaggttgtcacaatcaccatgtccgctacagatgatgatgattcaagtacatcagcgaccgtttcgtcgtcttcttccgctgccgcttccggctcgtcttccggtctttccaccggagcaatcatcggactgagtgtcgttggtggtatagtcgccttgggtggcggtctattcttgatctatacgctcaccaagaaacggttcagtagctttgacgatgatgatccgaatgccatcaggtggcctgagctgaacaagcacgggatggatgacgacatgggcggtgtcgccctgcctgcccgaccgacgggtggtgccggtctccgaacgaatgcgctggacggcgaagattctgacgacggaatggatggtctgacggacgaacggggagagcatccctcgaacagatccgaaatctcggatgtgtatggctaccctgcccagattccgccagacggaacgaccggggcccacactgggtactatgacgttgatccctacgaacagatcgattcaagaggctaccccacttccaatacagatattcctctctacaggaccgatcaatcatccggcgcgccagacatgtacagcaccgggacccaccagcatgagatctatgggtcggctggtggtcagcaggagtcctaccatgcaggggactcgagagtcggagatggaggtgaggaagagattccgatgagtcaagtctctagttccgggccaagaaatccgtatccgtcgttgatgggcgtacacgatccgtatggcttgggtggtagatcggacaatccgtacggggcggcgggagtgtccagcagtcggatggatgataggtactgatcgtagggtgtgtgtgctctatgagttgaagctggccttcatgaggtttcctctcttattgttttccttcttttcaacgggaccctcgttttcttcctgctttctatacatctttcatagtttgttagctctgcttctatcctcctgtgctcaaggtgtctgttctttttcttattcgttcggttgatcgtattgtatacccctttctttctagttgattcggttttcatatggggtatctcttcttttttttttggcctccttcatccgctgtctgagaatgaaactcattctgttcacatagctcttctctccagaccttctctgtacgtttgtgtgcatgctgtcgacgctcaagaagagcacgcgatggccgatatatgtctgaaacacatgaacctgaatagttggatgacgaacagaacatggacaaggggaagcaagacaatgttgaatgaacccaaccttgtcggctgaccggcagatgaagttcggtatgttttcttgtttgtcttctcggttgatcccgcagggaatcgcgtcgagcatgtttaccaaggaaacgttgatcttctcgcccttgttggttgaaggagtactggattcgtcttcggtggttgactccgtctgttggttgttgttgctgttgctgttattgaggcttggctatcgctactgctgctagtgctgattatgccaatgctgttgctgctcttggctgtgggctgacggacccgttgatataaaaagcggtcgaattttggagtttaagttctttcttgttccttcacaaccgtcttcagacctgcttcctctctctctcgctcttcatcgtacatcacccagatatgcctaccgataagccatctctcctaccagtaacaaaccaaactaatgagaaacattcgtctggaccgacctatcacttatcggtgaagacctgtgacgtaatcgatcccgactatggtcgtgctggtccttccacccgacacgcaaagtctcacttgaagggattgctttctcttggtgctgtcacatcggttgctctagtcgtactagcctcaagctccgatacggcctgtctgtcgtctgctatctctcggctgccttcgacgtcctctgtgtcttcggtcgttcgatgggctaccgggtatgactcatcggtgcacgagcttcgataccaagatgaggcttgcagacatcgacctcaggagacgagtttagagattgatgattggatcgatgaggagagggacatctcccatcgggctatactggacaacatgttcgtccttttcccctctgtttgctttccgcattaatcgttatcgatactgacggggctgagaataaacatacatacacttacagtggcccccgagcgggtgctattccagggctcgttatcgcctctccttcaaagtcccacccagattatttctactcttggacgagagacagtgcccttactttctccactatctttgaccgattcctgcccggaccaaactcgacagcttatgcccatggagacccgtcgttagaaccgcttatcagagaatacatccatgcccaaggtaacttgcagcttttgagtaacccgagtggaactttcctagatggcggattgggtgagccaaagttcgaggtcgatggaacagccttccacaactcctggggtcgtcctcaacgggtaagtgtatcgtcttctccctttcttctgcttcttggcaatgactggataagccgtgctgacgacccttggcatacgtgaactaatttcttccaggacggccctcctttaagagcaatggtcgtctcccaatatgccgaataccttctcgatcgaaaagaaccattcgactcgacatatatcaacgaaaacatatacaacccaaagactgttatggccaaagggtcgattttgaagtccgacctggagtacactgctcataactggcatcgaaattcgtttgatctttggtagggcctatctctttcttgtcttatcaaacgtctgcatagtcttcccttattcaagccctcatccctcttccggttcggttttgaatttctcagggaggaaatcaacggtcttcacttctttactcttttggcctccagagttgctctcgagcgaggagctgctttggccacccggttgtctgatcctggagcagcttgtatgttgtctcattctccttttttctccctgatcatgactattaatctcatccctcttttcattcattctttaagcattctatactcaggaagctaatgccatcacggaccgactcgagctgttttggtctcctgaccgaaactttatctctgccactatcgatgcccctcggttcggtcgttcaggtcttgactctgctcttatcctcgctttccttcacgcgggtgaacaaggtgatggcgtctggggaatcgcgggggagagagcgttgtcgacgttaatttcctacgtggattcgttcaagaacgggctctacaagatcaatgacgtcccaggtgacggttggaacggagccattgccgttggccgatatagcggtgcgtctcatcgcctttctcgtttgtctctgatgaatatgaacggaataagtcaactgatgttttcttgttatttctttccattcacacagaggacgtttacaacggagacggcatgtcccttgccaacccctggtacctgtgcacctttggagtagccgagatgatcttccgtatcgccatccactttgagaaggttgatcaaatccctatcacaccaatctctcttcatttctggcaaaacgtctatccttccgccaaatctggagacgtctaccaaaggggagacggagtgtatgaacacgtccttgagaagcttgcaggttgggctgatgggttcctgttgatcggaaagtcgttcgaaggtcctgaagggtcctttaccgagcagttctcccggttcgttcatctcgacctttcatcatcatttcttaaacgcgcgatctgactgacatcttctcgaatgtacatcacagcctggacggtacacccaccggagcgaagaaactcacttggtcgtacgcatccttcatcgaagcgaccaacggtcgcaatgaatacagacatatttccgccctcaaacgcgattgaaaggtatattgtttgatgtagtttcctcaattagatcgatccaatggatcgactaatcaatttgaactgtgaacgttcattctccgtccctctcataaattcttggatactccaatccccacccatcattatttttctctttattattactgtatttcgtacattctgttggtttgctcacgggcaacacgatgcatttcttcttcatttctttcttgttcttttccttgtgtttctgaatagttgtataaatatcgagtgacctcctttcttctcatattctccttctctctccaccctttcctctgtttcccttttgctcttccgtttcgattggttcggatttgttcacttgtagaccgtatgtgtcacagctcacgactttacgatcctcattttaaccccctttgccctcgggttttgtcttgtcttgtcttgtttaatgtatcgaaacgacttgtacgacctggtgatgaccagcccgtttttcttcctatattgctactatactctatttttattctaatgcacgcgatgaatacccttggttctgttttgcaactaagaaggaaagttttcagatggtgtttgacaaacagacttatcttggaagtccagcgctttttacaagaatatataccataagtcaagtggtttcttttatggaaagacgggcaaacagaagaacatccaacggacaagggggatacgaactctagtcggaaaaagagggaaaagaaatcggatatgtagtaattaagatgtttgtggttttagatcgaaacttgattcagtatcacgtataaaaagagtatgtaaagagagagattgacaagcggtgaatatgaaatgaagaaggtgttgatatatctgatctatctataacgaaccgagaataaacaaaaggatatatgtctatatatatatatatgtgtgtgtacgtgtgtgaggacagagaggtgagcagggaggaggtagacggttaacgattgcttcgatcgttcgaaccgccaacttcgcgcttctgagctgatcttcccactttactctctacactctcacttcttcttccagcctcaccagaacgttgtgtcggcctgatatccatcagacccatcgagatcattagaggagacgaagcagccgatgtgtttgccgaaggtaccgctgacgaagtcgtcgattttgatcctagtccacttggtgtagtcggaagaagtgaaggtgaactcgaaccggacgtagaagacgaaccgaagccaaaggtctctcctaactttctaggtctcgcaggtgatggttccctgaatgctgccagggccaaactaagttcatcctcgatcatgagttctctgattcggataccttctttgaagaactggccccctcctggtcgagcaagctcttgacgtcgaagtgcgtcccaattctctcgacacatgcacacatcactcatgtcgcccgggtgattgatttctccttcttcagcatagtcaggtagagacacgtacgctcgcatgcatgagcatgaggccaacatgacttgttccttatagagcgtggcgatcttgacggttgatggatcggtcttttcggtgaaaacaatctcgaacacgagttcgcatgtgaatcggagagaggtctttgtaccaggcagagtggtcgaacgtatgatatcgtcatgaggcttttgtttgtcgatagcggagtatgaggcagatggagagaagaaggtagagtgaagaaggtcgatggtttatcaacagatctgaacgaaggatgatacagaggaaggaatgtcgaagcaagaaccactcacgattctaccgactctgccccacgtccaaaccttccctgcatgcttgtctccatctaaaacgacatctccggcctccctcgccttctcggcgaagccatcaagctcgtacccactctttgcgccttcctggtacacaaatcgtctgggtcctcgtatgatttcatgccgtcggccaggtcgggtagaagtgatcgaggtggtttggaccatgtagcaattgatcgcatacacggtgactggctggacatgtgaaaatgtcaatgagagaaggagaggcgcgctgatgatgaattcctgttgaataggttaaaagtcatgctcgtaaggtcatttaggtgaggcagatgtgaatgaaagagttggcgaatatcttcagaggactaacgctagatgtcatactcaatttgaatggtccacaactggaagagtatgcttcttgtcgaaactcgaacgcgggcactggaaaaatccaagtaaacaagacagaacgttccatcaacgtgtatgttaattcgatgattcccatacatacacataataagggattggaagcccagagttacgtaccatgtccagaaacgtgcgggttcgcgatcacaaatactgttttctggtctgttaatttcgatttgaacaagttgccacttccttggaccgagcctcgaataagatgaagaacctttccaaaagcgcatcgatcccaaacagaactatcactaggaatgcaaaaggagaattcgaaactaaggaaaattcaaggatagatctgaaagtcagcaaaggaaacgagaggtctccagtcaagatatgctttgttcatgagtgttgcagaactgtgtttgattatggtccatacctgttgactcctttctctagccagaccccagatgaaccatgtccgcctagaatgacttctctccttgcaatttcatcatcctcccatgaggtctcgcctggaaagaggattctctgttgaccgataaattcaaccttgatacccttggccagcttccgtttatcggatacgacgttgaagaagccgttgatcttgccgtcagcaccgtccctgtctgcttccatgagcaagggagttccttcctgagaagagagtcctggtggccggacgaatgtaagaatctcgcttagctcgagtgtcgctttagatttcgtcggattcaaactgagggccgacgtgatcagatggttgattcctggtggtgcggccagaagggattcatcaagagagatcctggcgatactgtcttctgggaaggtttttgtagtctgaacgccatcgtctgttataacaccaggaggaaagtagtcggtcggattgagggtcgagggagaatattcgggtagggaagatggtgtagcattagaagttgtcgaaggtgaggatgacctggacctagacgtagacaagcctcgctgggaccgttggaacattgagctggtgaacgtatggagttgtcttcgtttcttgtattgtaaactctgtttcctccttccgccctatctcagaaggtctgtgttctctctcagtgcgcttgaacgttggggatgactttcaaaaatcggagggtccacgatggttgcagtggaaactttggagataaccaaatgttcggccgactctcaggccgcggctagacttgatgactatcatccttctcagccatttggactcttgctcgtcatcatcatcagcagcggcagcagcaacagcagaagcagcaacagcattagcaaaccatcgagaaggactataaggagggaccagagacatggatcaacccctgaagccgctcatgccggcccaaccacagtggattttcccatcttgtgctctgttgcatacaccttcacaggcaaacaacaagcaggtcaccctacaggtcgagctcgctcaacggtcccaggcaagcaattgggcataccggatcgtgtccaccttgttccagtctcaacgggaaaaagaggagcatctggtacttgtttgggcgacggcctgcatgttcattcataggttctatatgcgagccgatttgggtgaatattctttcaaagacttggcgaccacggccgtttacctggcattcaaggatacagaacacatgttcaagatcaagtatatcgttagaattgtattggccaagcagaatagggaactcaagataaatcagcctgttttagatgactcgccggtgaatcctttcttttcatcaggagttgagaagagaacttccagctcacattctgtcgaactgattgtcctcgtaacgatcgatcaggaatttaaaacacttcaatccaagatcctagcgttggaggagatattgatccacacgctctgcttcgagctgatcccacctcttccttaccaaccgttctcaagaggtctccggagattacatagcgttgacacaaacatcaagatctataaatcatgggagatgaccggctggagtctcatcaactacaggtttgaccttttcatgagaccttggtgtgcgtggatgctatttgctaaacttgttttgtttctttgtttcggatgcatcatcacagtttcaacacgccgctctgcgtgctgcagtctccagaaacaatagcggtggcagcatatgtatgcgtacgatgtctgatgtgcgatattccgctctccgagctggaacatacatttgacacgtataagactcagtttggtatcgtcgatcaggaggatttggaggtgaagcactatgtttcacgaggatgggctcaagttgaaggtatgtctgtcgttctttgtggctctcttaccgttccaaaggactcaagtttttctcgtctgtaccaaatgtttggtctggttgacggattagaatgtatcgcttggatgcggtatcccgagagatcgttttcggtggagtgtcttggtcctggatgggctgatgtgagttctgttctacatttggtcgaggctatcattctttcactgactgtgagggcatctgttggacccatacagcgtcggccattgcctcttcctgtttcgaagggacgaccgactgactcatcactcctttcaagcgctgtcgaccgaaagttatcggcttcaccctctcttttaccgagtatggctaacagtccgatgaactctcccacggacgactcattcttaccctctcaaccactcaaggcttcttcggccttgtcaaattcttcattgataaaccccaacaacatacgcgaggtacataagatcacttctgccgctctaccacctccaaagccttttaatactactactttatctcttcttcctcctgcgccatcatcacctccaccgctgccaccgtcagcatcgcccataccgtcttccgcttctctcctgagatcgaacaccatgaacgaccgaccaactgaatcaccggacacgccggcagctacagctccaacagcgctcgcgacctgtctgaacacgcctgcacccatcctggtggtcgacgaaaagacagatccgaacatggaagaaagagaagagggcgaagtcgatgagtgagagtacgaaagagatacctatagagatgtcccgatacccgatgaatgccccactagactgtagccaactgtaaccataatcgtaaccataacgtaaccaagcccacttagtgcctaccacctccttgtgtttctcttctggtcgtcttctttgttttatcatcgtcagtcgccttctcttttgctcgctctcacgtacatacacgaacgcacacacagttcagagcttgcaaaataggaaggaaagaaggagataaaggacaaggacagactgtattcgttataaacacagcaggtcaatatcattcaaaacgttctctgccgtttcctacgtcgtccgtcctgggtcccctaaaagaaaaacaagaggacaagggtgaatccaggccagcaagattcgacgaccaacaacaagtcctttcagtgattgttctctcgctttgcatactgtgatctgctctccacaagggaagccgttccttggaaatgtacgggactcaccaacgcgatattgcctattacccatctccatcccgacctccacttccggttctacccccggagccgcccgtgtccctctcgacccattctgttctgcagtcggccatgggctcctctaccagtcctcgttctgctgctcgtctcaatgcccatgttgaacttgctagacagtcgagcgattgctcgcaaatcatcactggatcgatgggaccctccgagtctaatggccgtcaagaatcctcgaaagggagtacctcatggtcggaacagagtgactatgccaatcaagttcccgtcgtcgttcatgttcgtctgtctcagttctttctatcctggattttttctgtcatgcttgcattgttgtcttttggttcgtttcaccaaggaaactgacgtcgtccgaaacatcttttctgttgcttgtcttgctcacctgactcaacttttagggtccatcggtgccgttcggtttcaaagcgccttttccagccccagaggcggccagctcaacaaatcaagtcatcgatccatggttctactcacccgtctctccagctccatctgtttatcctatttactctggatcaagagttctggacgatgttgctcccctagcggacgacgcggacgagtggactgtgtggtcaagaagtgaggcagccgtgtacgtttctcctttttctattcactttctcccatctagctcgcccgtatacatggtccgtgtaccgtagtcatgtattaacgcggctcttgctttgatatttgatctccttgacttacgtgaatggcctatgtgtactgctgggatcaaattattgggcatgtttctacggctcagaactatcgtccctccctcgtaagtaacgctttgactgtcaacactcgactcattctaagtgagacactctgagcaccattcttctcttttcgaactcgtcaatgcaacacaggcctttgagaacggtgtgcaaacgatgctatgatcatcgagtcgaatgtagctggtgagatctactcatccgtcaccaagaatgtcgatgcacggttttaaaataacatttattaatcattcggtgatcaactaggccgggtgaagatggcgctggcgcttgctcgaattgtttcttctcgtattctctcgtcagttggtttcattccgtgctttctatcactttctcaaatcaaactgaacatgccttgcaacaatcgttacaaattctcgatttctcagtgttcgatcgttcagcccgcttctttggatcattccatccgacccactctggaatcaattccgtcaaccgactctctagacgcgttcaaactcgagccgacttatcctacagacggaccgataccttcatctgtccatgactacgccgctatcccctcgagttctgctgatccggagactcctcgtatccgatctgcctcactccctgttccacccttatctcaaccttcgacgacgacgacgacgacgtcatcaacatcatcatcgaggttatctcacacaccagaaattgatagacccacatcacagaccacctaccctacacaacgtcctacggccatctctccgtcgaacccttcgttcgtgaccaacctgctagatcaaagacagccggtgaattttcttccttcttacaactcgtcttccaatcaaaccatcgttcacaatacccgccgaccaatcttaccaacgccacaagcctcatcatccagtagttcatctgtatctcaagctgtctctccaaaaccatcatccatcgacccagaccactttgtccttttccgagaatctggaggaaatctactatcaaacatatctctcatacctccgtcatcacggactgactcgctcatgtcgtctgccacgtcatcgagaccatgttcaacgacagatctgtcgaatcagttccagtccaacaatggaccgaacacacagatgatcgagttattcgacagagtcgtcagacttcagtcggatgcgacggcaggcctggtccaagtccgaacggtcttgcaggagaccgagacgtcaacgtcggtggcgatagataaaagttctagaaagaaagaaaagaagagaaggaagagagagctgcagaaagagaggcgtaaggaaaaggagacccaaaagaagatagaaggtccgaaggagaatggagaggacgagtcgatggaacaagtcatcgaggaggataactccaaccaatcatcgcaaggctaatagctgggactgacattctgtagaagactcaatagaataggctgagagcaggcaggagggggaaaagagagtggaaaacagatgacctttgatgaggcttatcggtcgtttgtctatctgttctgttggtcggttgttcccgtacctggacgagtggacacaaggggtttgcggtgtgcctgcatccgtccatatactcgtgcttgggtgtttgtaaatctagagtgatttctggctcgaatctcgattttcgtgaacctttcagagcgcgtttttgcgtttggtttctatctctttctgactttgctttaaattatcgttcacttgcatttgcctttctttgtcttcacctcacatctatttgctcgattatacaattcattcgtactgattctacatagtttcttcgtcctttctttttcatcatttcgtccaatcactttcttcatacagaaccaacagaagagaaacgaggaagggagtctgggacactttgttcccgctcctttcttttttctctgtctttgatctctcctcagttaacccctcactcttcttctgcgctcatcccttctattcttcttcttctcccccacctactttatctaaatccctaataaactattcctggtgttcgtcgttcgacgtctgacgttctccggtctacgtttacctctaaccagttgtatttagtataatcatatttcgatgagatttttgtaaatgaagggggaaaccccttccatgcctcttcctcctgatctatcagtcattttgatttcctcctgtcccacatcgtttcacaaaagatgaatcaaagtataggaagaaagaagtgaatgaatgagaacgaaattgattgaataagacaggaaacggacgaaagcaaaagatggccgacaaacaaagaagaagaggagagcaaaagaaaagagagatgaagatcccgaggaatgatccctctcgagtagaatgaggaaaaaaaatggagataggaaacgaaaaggaaaacaagaaaactttttgaaaaacactttgtttctctactctggccctcctcatccatacaacccctttgtcttcgcccacgctttgactcgtcgcacctatctcgatatccaactcagcctaacgatcgatcgagcgagagaataacaaggtcaatctatagtccaaactgggtcgtcaactgcttgacgatctttgacgcatcagctttcattgattcgactaaatcgcgccgtttatccatcaaacaaaaagataaagagattcgcaaagaagaaagaagcgaaggaatcccgttgtggtaagcatcatttgagtgaaaggtcaaataggtaagaaaaaaggtcggaccttgttgttcgagctgtctgatcttcgacctggcctctttgaggtcttcggtcaactgctggttctcgtttcgcaactgttggtcaaccttcaacaatacgacacaataaacaaatcgaacaggaagaaaatgattaaaaacgtattctatatcatgccattcttggttctatcatgtaaaaacttggatgagacaaagaaacatgaacgtacgatggaggtatcctccccatcggcagcggggacgatcggcggggtagacgcagccgtggtgaactcagcccttacaggcgatggctgctcgtcctcgttctcactgtcttcttcctcttgcttgatatccaaatcctggactgcaggcaagtcctcttcgacagccactgcaggaggggtaggcgtgagagtaggttccggggaagccaccttaggaggttcttccgtcttggcgggttgaggagcaggagaggacaaagcagcaggagcagtctttgaagtcgatggaacggctcgcatcgtagacgatgtagagacagggtcggacgtcacgggggtggcgccatcttcgagagacacaagcttgggctgggctgtcttgccggcgaaccagtcgtcggcggagagagcgggatcgctcgagagtgcaggagggaaaatatcactgaaggcagaatacacatcgtgatctatcagtcacaagccctgtataacaagtcaccaaaaagggggtgagactcacgcctggaagctgtcagcctttctgggaacgacgaaacccaaaggctcgatcaggttgcccgtaatcttgaatcctcgagcgacctcgttctccgaaacgtccagcgctcgtcgaggcaagaatgtcattcctcgctggggtgactgagatccatattcggacaagtagaacaagttgtcggcttcatactcgtagtatcggatgttaccatctccttttccagcaaggaacagaaggttgttggcttcggagaagaagggcatgagaacacccgaactctgatcaatgttaattcccttgatctcagacaatcctccggtctcccaaatcttgacctgtcgatctgaagattttgagaatcccgtagtagcgattctatcgtgaacacccaaccagaccaatcgggaccctttcacaccggcatgcccatcagtaattcggacaggagccgaaccagctcgaggatcaaacattcggagtttcttgtctcgagaagtggtagcaaggatagtgcccgtcatgttccaggtcaagccctgaatggaatcaccatgggcttccaacgaaatttttggcgctcctccgttttcgacatcaaatagtcttacgacatggtcgccagatgtagcggccaacacgttcgatgcagtcggatggaacaggacctgtccgatctttctgtttacccgtatgcaagataggcaaggagtgaggatatgatgcaatcgtcagcgagaaaatctacgccaaaaatcagattctatcaaattggcagaaacacatgacagaggagcaggagacgaaccggccaccagcgttgatcttgacatcaggctgaaaatcctcagcaacccatccatcttctccccaaccctcaaacttggaagggtcaatcttgtaaatgttgacttttccgtcctccgctccggacgcgacgatggaatcatcgaatggagaccaggcggtactgtatgaaaaatataacagatgagattttgttggcaccgcttgagacgattgtagctgatatcatgagtgaatacctactctaggctatgtcccgttcgattaaagtgagagatgagcaaagaacaaaggacaatagtatatcagcttaaaccctgaacacggatcgcactatgatacatcggatcaaaccgagaacagagactctggaaacaagaaacgaagaatacatacacagcacctgaatgacctctggccaaaggtaagatgtcaggcaacttgcctttaattgttctgggcttggctgagttgaatggagagatggtggggagaacagcgaacgctcctccaccagagacgttccagttaacagagatataggcctgttcacgacatggttggattcaaaattcggctcagtgttagctttttgatctctatttccataaagattgaatgaggtacgcagataggaggaagcttacccctccggcggcgacgaggtcggtatcccaagcgctattcgaaacctgatcacacatgccgatccatcgtgtatgagacaaggacatgtccgttagagaatactgaattgattttctttttcttttctttccaataaattcaaccggagctacttgacccgagggtgaggtagaatatcaagctgaataggaagggaaagagcgtactttgacgttctcgtacgaatgctccttcttgggcttatccgcgaagacgtgtctagacacgaggaacagataccagcatcacgggaggtgcgataaatcaaacagcatctaatcaatcatgctgaatactgagagatctgacgaatataaatcaacagacaacttaccgatatttacttgatctgggttgattcgatgtgcattcaaattcaagaagcgagagtaaaggatggcgggatggcgaatgaaagcaagagttcaaccagaatgatctctgctatttgcatctcacccttcttcttttattgactttgatatagaacaagcattgaactacgaacctcatgaagcgagacatggctggaaaatacgtaaagacaggggagaatagtcgttggtcgttgatcgttggttcaacgtgagattgggactcagagagatggggggatatccatctgggttccgtatccatcaaggctgtgtcacggatccgacgccacatcggcttttagaacatggcaaacgatagcggtatcgagcgtacacacattggcactcttgtcaagattcgtgttgagacaataccgaggtagaggaaagtgttaagcaggatatgttgtacattctacattgaatctgatgcatgtgagattgaaaagggcaatcttcttctgtccacaatttctcacgatctttaacatagccgctagcactgtcatcgcccccactaccctcgtgtttccatctcgttcttcatgaattgatccaataatcactcgtccgtcaagatattatgcgcagtaagcccaaattcttgttgtggtccgagaagtacgtttactcatctgcttgagaggaacgacgggtgcatcgatgagttcaaattagtcaagaagatctagtctagatggccgaatgctgaaagatctttcggacttaccggcaatgagagccaagatcattcggtagaggtagtagaagctgtatggaccaccaaatcagtatgtgtttgtcaatagaatggaaagaaccataaagtgacacgtacaagcaaagaaggtagaaccctagcttgatgaaagcctccttcttgtgaccaggaagctgaagagtgaatgtagacaaggataagagctcatcagcgagttgcttccgacaaggaatcaatgagataacttactgtacggaagatctcggtagcgtcgtacgattgttgtcccttgaagatcctgtgaagatgataaagagagtatcagaagatgatcggagaaacaattatgaatattaggaatctaaggacaaacttgttagcgttgtaggcgacgagaggcgcgttgaagaggaacgcgagccactgtccggacaggagaaagagtgtggtgagaccggcatgggcgatcatctcgggaaggacgaactagaaaagaagaagtatgatacacgtcagcaggagaacagagcagagagtttgattgggcgtaagaaaagacggatactcacagcattcagcttgttgcagagatcgatagggttgatgtaatcgcactcgagatctaatggttcgcgtgaccggtgagactgaagatcagccggccgttttactgagcagaggggagagaataaagtaaaagtacataccagagaacatgatgatcttttgagcgttcgtgatcgcgatgagaggagaggagaagagatgaaacgagataagaggagacgaagacaagatataagtctgagatatgcttctaaagacacgagcaaggtcttgattgtgttccaatttaaaacagggagacaaaagaggctgccatctctaaaagactggccatctgatgaggtaggaacgtacaaagaacaccatggtgaagaggagtccggcagcgagtagcacgccgagtaagaaaagccagcctgttgatagaagagaggacgatcaagagaaagtgcagatggcagggaaaaaaagcagagaaaagagaaacacgtcagtttctatgattggagtgatcttttgttgaagggcaaaagagaacaagtcccgtccccggagcagaattgaaagaaacaggagcaaaacaaagaagaacaaccaccttctccaatcatttttcagtatatagttctggatgtaggttgagcaaaggcaaaggaagctgagtgggatgagcaaaggaggtcgttcgaggtaacaagtctttaggggtgtctggagtgtggaaggagagacgatcagggttattcatgtatatttttgaatgttaggcaagagtttgcaagcgctacctaaggtatgatgctttgtcagccagtctagcccatagtacataccctcacacgagcagcacaagagacatccagctcgatcattcgcaacagaacgatgcatcgatagagagagaaagagagatcgacggaaacgaccgtcgagcgagccatgatgtgcgcgcatgtgtgtgtgttcgtggttctccatgactacatatgtgtacatccatagaggctattcagatatgagccatcggaggaagccgtaaaaccgaaagcggccacgttagaaaatatcggctacaaaaagaagatggtcgccttcgctttccttcttttcttttcttcttcatcttatcgtgcaagtcaagtagcacatccagacccagacacacttattattagcttactatgggactgccagcttatgcttcaaatagaccggcctcagaagccacggccttgcctagatgggttcattaccttcccctcctcttgctcgctccgctcatctccgacaaggttacatcgaccctttttcctcctgctcagcctagtttcatccaggtcggtctagacaaatgtgcggccattaaagccgctccattgctcacacaccataccaggaaggtctcggaccgattcgttccgggaactcagccggtgttgctcaccaatgctaccatctggaccggaaacaaagatggacaagaagtcattctcgccgggtccgtccttctcgagggcggtttaatcaaagcgatctctaaatccaaggatgacatcaaagatctcttgaaacgatcctgtcatgttcatgagatcgatgtcggcggtaaatggatcaccccaggaattgtcgacatgcactcccatcttggagtctcttcatctcctgatctcaaaggttcatccgatacgaattcgctcaaggcacccattttgccttaccttcgatcaatcgatggaatcaacactcatgatgccgcttacaatctcagtattgctggtggtatcactaccgcgttgattcttcctggatcggccaataatgtgagccttttttctatctctttgtggtcacacaatacattccatcaagccaacactgaacatgcatacaccacgtcaaaccttagattggagggcaggcgttcgtcattaagcctcgacaaacagctgagaataccccttcaagcatggtcctcgagaatccttgggtcatcgacgacgtgaacggaggtctcaagcgaactgggtttgatcgacacatgaaacatgcctgtggagaggtaggcctttccagttcatttccttctcgcgtcttctttcttagatactgagctcatgaaagtctttgttgccaatagaatatccaccgagtctataacgacaaccggtttgatcaaggatggaacttccgaaaggcttataacaaggcaactcagatccgagctaagcaagacgcgtggtgtgccaagggaaaactcaacaccgaagagttccccgatgaactggagtgggaagctctggtagacgtcttgagaggtaaagtcaaggttaacgtccatgtgcgttatgtctattcctgtcttttctattcttatgatctttttatgaaggagaataccctgttgacaacatccgttttggattgtaatagtgctacgaaacgtaagtcatttcactcattcttcttttcgcttgccatcgtatccgagccatacctgactgccgcaaaactatagcgttgatttcgatcaattgatccgactcaccaacgagttcaaattcgagcttgctgccgttcatcacgctcatgaagtgagtgtcattaaattgtctcagccgtctaatgcgaacaatagtctgattcatctgtcatctgtaatctccgccgagcaaataggcctggctcgtcactgatcttatcaaaaagtcatacggaatcaccccgactgccgctatcttcgccaccaacgctcggtacaaaagagaatctgttagtccaccctctcctctatcagacgactgatcccaaatatgtcctcattttattcttttgatcgcgcatcagttccggggatctgagtttgctcccaagttcctggccgagaatggaattaacgttgctatgaaggttcatctttcactgctgtgcatgctctttcatgaatcgcactgacacaagcattgctgtttctactataatcatagtcggatcaccctgttctcgacagtcgatacctcgtatttgaggccgcccaggcgcaccattatggattgaatgcctcgttggctttgtcctccgttaccaccagtgtgtatattcttttctgagtgcaagcgagtagcgccattgttgtctaaactatcatcttttctcttttgatgtgtcatatcatagcccctgcccgggctattggtaaggatcatcgaatcgggtacctgcgagacggatacgacgccggtcagtatctcttgtttggttacgtctgatcatactttaaaaaagctgaccacttcctccattattctattacagacgttgttgtttggtatgtcagaccataacgatttcgggatcacttatccttccacaatacgcgtcgctaatgtagctattgtctcatcttgtctcgcgtttccctgaaaccataagggattcgcaccctctcactttaggcgcgaccccgcttcagacgtacatcgatggaattccccaactggaacaccctcactttgccccttccaagcccgccaagctccaggctgttccttccacacctgactgggacgatgaaccagagctccaccgacaggctcgaggagaccccgactacgctgctatcctcaagaaacgattggctaagaacgtagtgttcaagaacgtccgaaacgtattcctcaagaatgaattgaacgatctagtagcttctagtgaacgagaaggagaaaacaaaatggtcattgtcgagggaggaaagatagtccaggtctgtgatgaggagtgctctcagactcttcagaaggactgggaagttatcgatctgaagaacggaagcgtccttcctgggtaagcctctaaacgtatgcagatcaattcttttatccctttaatttgactgatgtatcgtcttctcttgttggatgacacatttacgttcgtgttcagactggtctcgtttggttctcctcttggattagaagagattgctggcgagaaatctaccaaggacggcagcgcgcctgatggttctaacccggcatcgtctttgggagttgatgaggttttgtacgctgttgacggagcatcctttgccaccaagaatgcattgtacgttcttgtggttctttccctcttgaacaatatctcaagcagagctgatactgccgcgtcgtcttatatatcgtcatataggatcgccgctctttctggagtttctgttggtgttgtcgcccctgactcatcttctctcgtctctggtgtttcctttgcattcgacactgctgccgacggacctttatctcctagggctatccggtccgaagctgttgctttgcacgttaatgtcggccatggattctcttcttccatttccaagtatgtctcttctctctcttctctttcgtcgacccgctttcaacgagtctgatgatctcctccctcgtctgaaattacaagccaaattggacagcttcgcaaactccttctgggcaagacccctgatgcggatggttggtggaaaaaggcgactcaaggagagattccgttggtcgtcgccgtagacaaggccgacatcattgctcggctcatccaactcaagaagagcattcaagaggagactggagattcgatcaaccttgtgattcatggtggttctgaggctcatctggttcgtttctatcttcagttcaggtatcctttgatgcaaagcatcatgtgatcgaacaggcttgctgattgagaaacaaaccgaatgattgtcacgacttcggacgatacagctcgcgaaagaactggcggaagccaatgtaggtgtgctcctcgcgcccgccagatcgttccccaccggatgggaccaacgacgaatcttggctggaccacctatcaccgcctccactcctgttgacgtcctggtcaatgcaggtgtcgtacgttccttgctgctgtgtctgatcactccgacttgtgcttactgaaccctatacacatctctcatcatactatcagacggttggattggcgatcgtcgaaagctggcaagcgaggaacacaagattcgaagcagcctgggcgctccttgcttcctcctcgctcactaccaagtctgctcttgagcttgtcaccaccaatgttgagaaactccttgggctcgatacctcctccacggatggagagggagactggttcgctgtcgtatgtctctttatgtcttcatctcttttgattctctggccgtggctttgcttcaccaaggtgttaaagcgccaagatctgacctccatatttatgtttgggacgataccgaaaacgcgaacaggagggagatttcttcggtttcgagggcaaagtcgtagctagaggaggaggaagctcttgagaaaatcgacaaaccacttctgttctttcatacataactacaacgccttcttctacatagttatggttttctgtggttccgttcctcgtgtttaaacatttcacttttgtctttgcgttaatgagcgtcagtttcgcgtgtccatcatctggcgtcgtatggggttgtgttatatctgtatcgatatcgatgatgggatgaatacatacgcaaagtgcaatcctcgggaaatgcgtacagacttataaggaaatttggcgggaagtacaaatgtctctcacatcgactcaaacaaaagcacgtagggttaagatccttcaaacgatccctcgtcgatcataacgatgagagaaacgaggaggaaaggttgaagaaaagacaaagaaatcccatcgacatctatctttaaacaatactctctaactctctagcatagcccagcgcctcatcaatcagatccttaacgccctcgccctgcccatgtgcgtcagaagtagcagctgggaagtaaatcgtcgagcttgaaggagagagcgtccatcctcgtcgttgagcaaacgcggtgacctcggagggtgagttgaagaagagtagctgctgagcagaagagatgggaagggatttataagatgaaaggaaagacaacgagatctcgttcctgtttgaaagaagatccaaggaatatagcattgtggtttttacagagatggattatatcagttttgagcatatggtcgaagactcagatatcaataaaagaaagccggttcagtccatacctgatagaacccactaggccatccgccagaacggccaatcctccgccatccttactgtcaacagcgattccagccaaggccttttccttctcgatcagacttgcagccattctccacaccttgttgtagctaccctccataagccctcgctcgagctcaatcacctctttcacgtccggttcggcttgaagtgccggagggatagtttcgaggagaatgtggaatgcggaggttcgggatgatgagagaagagcgagaagctggagggctagaagagaggcacggtgtggcgacggagggaggcttctatttaacggtacagagtaagacgagcagttgttaggatagtaaaagagaagaggtatagatgatgagataacgatgaaaatgttccttctcgctaacggcatatgaagcaactcacgaaaaatagaacgcatccaactgagcaaggtatcgctcgaatgccggaagcttccctgttcggattgagtgaaacgctccgatctccaaaaccgagcctttgagggaagatgaaaacacaagggcaccggtcagtgattgttagaaacgatgagatctgcatagcgggactcacgagcagtaatcagatcctcttcagagtgatttgatccagaaggaaaaagtagttgatgttgaacaagttggatctaaatcaaaccaaggtgtgaatgaccctgttcgctcaaagtaagagtaatgacagaagaaagagaagacgaaggcgaacctttaacggagcaagctgctgtccgacagacgcgagatcatttgcatcgaacgaggccttgagtgcgttgaaagatgactgaagagacatgatagattgtgtaatgtatgagaagagagatgagatggccagaggatgatggattggatggacaagtttggatggaagaaggtgagaatgagccaaagttccacgacatcagccaaacctccaccaagacggccatcaacctcaaacgaccatcaacctaccatctcttcccttttctcttcatactaccatcacacacacacacacacacacctctacatccctaatctaatcaaacaatcatggagatcggacgtgcaggcatcgataggcttaagaagggagagatcaacctcggtgttcgtttaatgctttccctgctcttccagttaatatctctgctcctagagaccataagactcacattcaaaccgttgttccacagacttccatcatggccgttcagttcaatggaggagtcgtcatcggagctgactccaggacaacctctgggtgggttattgggtttttctctatctctgaatatattcatactttgaagagaacaaagatcaaccttcaatcctcacgtcgtcaccaaagctgatgcatctggtcttgtttgccaaacagatcttatattgctaaccgagtgacggacaagttgacacatattcatgaccgagtctactgctgtcggtcaggatcagccgctgacactcaggtgtgtttcgctgctctgacatactgtcccttcgcaagagagatctgatgatctgactacccatctcgacctacgcgacataggccgtagcagatattgttcactatcagcttcagatgttctctgctatgactggcgctcctccatctgttcacaccaccgcttctatcttccaaaaactctgttacgagaacaaggacaacttgagtgcaggtatcatcgtggctgggtacgtcttgtttgcatcaattattcatatgtgtacatggtcctttgaagtcgacctcaaaacctggctacaacaactgatatatttcttatgctatcgactccatgcactcttgtttatctagatgggatgcggagaatggaccgtcggtatacaacatccctcttggtggaggtctcttccgacagccgtgggccatcggaggatccggttcgacctacatctacggatactgtgatgcaaccttccaagagggctggggagaggaggagactgtgcagtttgttcgaaatggtttgttcttatttgcccgagtgtttcaagcacgacgtctagatgcttacagcggtcatctgtctggttcgtgtttgtaatcgtactctaaaacagcactttcgttggcaatgtcccgggatggatcttctggaggagtgatccgtatggctgtcatcacgcctggtggtgtcgagaggaaattctatgctggcgatgatatccctcggtacgcacggctcttctttctcatgtcctcttgccatgtctacacagaaccaactgattttggatcccctttgcttttctgtagtttctgggaaggcaaggaaatcttaaaggataccgtgccaggaaaggatgttgcctcagtgagatcgtagatagaatcaggtcgggactagccttgcttcttccgtaacaagaccacatgctttggtattgccagggagatgaaatcgctttcgatataatgacatgtactagctcagtaatcgtgaacctcaaagcgagcaagacatcagatgtgatttacaggaacacggacatgagacaactgtattgtacacagaggtcatcgcatatgttcataaacggtttgacaacaatattcaagcaaaacgagcacacggatagatcgaagtcgttcatatattttgaaatgatatttacattgaaacaagaaagagaagaaaggtacaagagttgtcactcgcattaggtgatcctgttatcctgggcagcagctccatgtctggaaataggcctccttcaagattgttttacatgcaggtgaaatacccttccccccgaaaggaaccaatcccacccgacaaatggtcaaggctcctccgatcaaaagacccgcacatcgctcggttaaaagacggaggcagttcgatcgaaaagaaaaccctagtccactcaggtgggtgcccttccgggggggttagaggctattcgtctagtctggatgtctggacctccctctatcttggaccctggagggcaaggagggaaggaatttagtccgaccatgagaaagagaaaagaagagggaagagaaaattcagtcttgtgagatttatatagggtagagattgaaactgaatcacgtgatcaacttgatatccagtcacgattcaccgctgttgttgtcagggtccgggttcagagggtaacgggaaggttacaagaatgtaaccaggcagggaatagggctggcaagaaggaagttcaggctctctagcttggtgactgtgacgagagcgcaaggcagggaaatagtatgaacaaggttgatacaataatggaacaagattactcgggaacaaaggaatgacaaaggattcaggcttggtagactaagctatggttggcggaataattcccgtcttatataacatcctcagactccaacggttatgcataagaagatagatcacagaaggtgctagaagcccctgcgctggaaggtcatatacctgcatgttcatgtaatgagagagcataaggaataccgaggtaggagaagcggcagaagcaggagaaggttgccggggtgtaacactcaggtcacatccctaacagctgtgctgttgatacccacgtgacattctcaacatccatcatcctaggccgttttgaaactatccggtattttcctattcatctcgctccgaccacaacactttctcatcaatacatatcagctatgagtcgtcaaccgataggagaagttattcaggaggtgagccttccctatctcgtttttttttggccttatgtatatctttgttgtgggaaaaaaatcacttgttctctcgactgatgcatacctttggcttttcattcttctttctttctttgatggcttcatgacgttgacatacgcccgtctattcctctcggtgtccctcgtgactttggctataccatgacttcatgcataaaagttcgctgatggaggaaactacatcaagaacaaactcgactcagccgctagggagctcctgaacgcagaatacgcgaaacaagagtcggccaagaaggaaaaggcagctggatcagcagtggcggtagacgagaaggatgttgcattcatcgttcgttttcttctacttctttcaatgccatccggtatacaggattgaggtgttgaatttgagagcactttgttatcccatcatgatctcttcaggtcagcgagtttgagatcacccgatctcaggctgaggagagcctgcgtagctcaaacggagacctcacaaaggcattagagaacttggtggccttgccttcgaaatagggaacgaacactgcttgccatgccctgtttcttctcttctctcttctgttttctacaatcttccaaaagcaaaatctagacgaatacaccctagaagataatacatataaccaatgcaatcctttcactccgaaatacacctcaagtactttctttttccttctcccttgacaacgtttcaaggcattatgttttacaccatttgtcataaatcaccatcctgagagaaagactattgaagagctgatttttcatcatatcatcgacccctcggataaacccattcgaccaacggaccctcctgcgctccactaccaccatttctcgctcttctgtccttctccttcaaactgagtgaaccagccaagacctctctctgtttaaccaccctaccgtacttagcaatcaatctatcgagagatttctcatcaggtgatagatcccggatgaacggtttgagatcggctaaccgccattgagatcgagtagaaaagagttcctggaaccgctcgacagggaccgaaggaagcgaggtgtaggcgaacggaagtagcgtaggttgaggactgagcaccgtaggtgggttgatcaggtagtttccctttgaatatcacatcagtatgtgttcaggaaacgcaacaggacggagtatagggtcagtacgagcgactagacaatatgaggataatgagagtagcaaaaggaattacctcgagagaggttaggactgtatgcgcgctgaaggcgtctcctacgctctcagcccaattggacatgaagtcttctaatgggattccgacgtttgtctgtcaaatgaagcttctattagtattggactcttttgtagagaaagatacatcagaagaaagaattcgaaaggatcttatcgactcacttcgagtcccagaagcagtcccctgccaacttctctaacgatccccttaacatcatctaacacccagtccatgtctgtgtcgacctttccgaacaggttcatcacagcctcacccagctctggcccaacccctcgcttccttaagtcaggagcgatgagcgcgaaaggggcagagagcggaggttcggtgggggagtgaatcacgaggagggagagaaggaggcaaagaaggtgacacagtcgagtaggtggtagagggaggagttttcctgagagagacaatcaaaaccgcagagagatcaatgggtgaatatgttttatatatttgtttggttcaatttcaatcttgtacaaaggcaaagaaacgacgaaccgtccagctcgattacattccgatccttgaggccttggtcgagctcagcgtctgatgcttggatgatcgaccggagatgcgccaatgtgtatcttgtccgtttcctcttttgattgagaataaaccgataatagatactgaagtttcagaattgatcaggtcgttctataattctcgagagctcaggactgaccggtctctctccatcttcctcatcttcatcgtcttccgtgtcgttctcgctggcctctcctttgatgtttgaccgcgtctgacggtctttcagcccgctccattcctgacctctcagcacatcctcgatccgacccaaccggggcacacagctcgtcaattccatcaactcatgcagcgtctctgtatacatcaacttctcctcggtttctccagtttcatctgatactgaacctgttcctccgtccacttctttcggggatactgaaacttttccgaaaacatcttctcctgtccctgatgatgctatgcgatctccctctattggagtagaggacgaagaggaggaggagggtaaggagagaaggacaagctcgttggagatctgaacggtccgaatggaatatgtagagtttggtgtacatagaactgcttcatcagatggtcttcctttgatcgtcaacctgttttgtttctcgaattttaatatgtccgtccgagaaagaggataaggaagagagttcgcgggcggaaacgacaggatgaataatgttaaatcaatttttcaaaaaaaaaaaaaaggaagaacgagaaagaaaacgaagagaacatcccaacaggtaagggcaagaaaagatgcgattcgaatacaaggagaacgaacgaaagtgggttggactctgatccttgttcaatcaacttcacgatctctggcggaagttccatcaatatatgatctgaacttgaacttgttcctcctcctactcctaccccggtctgacccaatctggttgatcgaccgtttgataattgtggtgggaaaaatatcgggactgtgttgggtgccataatcttggaagagtcggtcgagtgttgagacagataggtcgggtcaaccaaagcttggttgtgtgatttagatgtatgttctgcaaagggaatcaacttgatagggcgcgtctctctcatttaggtatccaacgcgacgcgtctggtaacgcgtcatcgctctgtgtagaagtttctctctcaagcaatatacgacaactgattttgttccatacatactaacacgcacaccgctacaactagcaaaactacaagagctaaagtgacaacatcataacaagagaagtagcagaaagagaattttgaacgatttatggcattctaagcatcgtcatcttcgacgtcactctcagaagctagatgtttccgtccgaaacagccaaaatcagtttttgtagttggtatatttataaaaatcacaggagctagatgaacgaacctatctttggatccaaccgtttctcaggtcggactcgttctttacctttgttcatcgaagcccgtcgggcagggttagtcggaaagaggacttgatcagacagactggcttgcggtttagcaccctgtcgaagatgtatcaagaaccctgcaaatgattaatggatgaatcgaaagagaggaaagatcactttcaggcttggagagggacacggacgattttaaagcctccctcagcgcctagagcggattgggaccagtaggtcaacgcttgaagcaccgaaggatcttctgccgacgcagagattacaggactgataaagaagtatggatacacgtcaacactctatgtactagctcagagcaaggaaagaaacttacgacacagcggcgaatgtatgatcctcattaaagactccgaagacccagttctgagtggtgtcggaatatagtttcgatctcaatcagaaaagagatgttgcgcagagccttctgaatggggacgtacgttgtaatttgtaaggacaaagtgcttgatcccaagtcgcttcgtaccaaggctctgtctggaccaaagccaagatgcctttgactttgggttatatcggtctaatgagaggcgcgacaggggtcagagcttctttacaacgaagataacggcggcatacatatgatcatgtcttcttacaagttccctagggtaatcaggggcgaacaagatattagcaggagtaagggcccgagtgccttagtctataaaggagagatgggtggctttgacttacagtgacactgaattcatcgaaatcttcctgctcaaacggaattgtcaatgctcggacgacaagcgcaggaacgtctgctcggctgtcaactaggatgaattcctactcgggggggtccaagacaagaaggctcaattgtcaaggacaagagagcatatatgtagaacaattatagacgaacagtttctcccatcggagactttccgtacttccaggcgacgctgtccttgagcccagagaccgtgccgacctcagcaccgtcgatcttgacctcaccgagttcctctagcgggtgggcatccgcctcgagactagatgatactttggccgacgtctctggatcgttcgacagattccacgcagagattgcggctacaacggcgtcgaggggaagcgtttttagcgccttcaacaggcttgcgtccggggacagggacatggttcgtgacaacgactgaagatgaggaaacaaatgaccaggatgggtgggcagcgagttcgttggaacctgctctttgaaatctgaagatggatggatggatgagattctgctgtcagatcagatcgattatgatgcttgcagacaagcataaaataagacgagatagcaagagactgagcgggtcatacatttgtctaccatctctttgaagtctttgatcttgactaaagactggagcaagccatccggccagtccggccgaggagacttcccacctacgagccagatagaagggaagaagatgagtataaataggcaagaagattaacaatggaaatctacaaggaaagactgaccaactccaagaggaggagatccttgaagagtaggaaggggactggctaagcagggcagaacgacataaagagatggaccgggttaaccgccgagataaccatgaaagaaaagaagaaagaagccgggacaagtggcactcggaaggaactcgcctaggtaagatgagaggacaaagtttggctgaggcatgatgtgtctatcggacgagcgataatggtggcaatggtggttgaagaacagatgaagaacccggaacgatccagcatctttataaagcagaagaaagccgtgttctacgttcgttctctattcgatgctgctgttgcgctcgcttcttcaaacaatgggcagtataggagtttggcccggaaacccgcgtgacgtttgagacttcgggtcaactcggctatctcggaggaacgtttttcaacgtgccacactgtgttatttgtgtttcctcatgttcttcactggatatgttcggtggatgcagagcggaaggagcatgtatgagattgtctttgtgtttttttctttttcttttttttttccttatcggttggatagattatcttgttgtcgagaagaagtgtgttgcctggtagatggtcatcatcatcattatcaccatcatagtagtaaagaccatctgatggctctgcgttcgctggactatcgactgagaacgtttctttaataaacgatctggcatctgtccaactcacaatctaccagcatcatccttgaacatcctgccttcaaacaacaacaccctgcctcatttccacagcatggactgtctaatgtaaagggcacagacaccaacgggcatagaatcagttagggttctgatcatagtttcaccgacgatgacgtattgatccgacaggtgacacgtgacacgtgacacgacgcgacgcgacacgctcaaacgcgtccgatcgcgtgctgaccaagtcgtaatgaaaccaatccccgatccttcttttgagcactcactaggatcactttcacctctcgtactttctttctttcgctctactttctgctctgtctgctcgcttacttcttctcggatagctgtttccttgcatttactcacatctctaggctgcttggtacatccatggagcatcatccgtctctggattcggtcgacgcgtctcttcaagtcgatcgggtcatttcttttggttcctctccttccggtagtctccctgatctcctcatggacatagactctcctgcactcacagaaggagaccgagagatatcagaccatcagttgattaaaaagccatctgcatcgttggatcctggaaacataaacgatcctccttctgaaactgcagccatcgccgccgccaccactactgagaatactctttcgtccagtctgtcgtcatcggcaccgtatccactatccacccaattcatttctctcgttcccagaggattcactgctatcactcctacctcccagtcgaacaattcctcaccatcctcctcccaggcaccatctctcacccaagtctctaccgtgctcaactcagacaccccaccaaggcatctcgaacagacaccatcttctgctcccctttccccattagctccaaaggcagatacggatgggggcctttctacggcaagctcgatactgaaagtccagactagcacaggagacaggaattcatcaaccgtctctcctcgttcacgtccaaaattgttttttgaagattccgattcggatcacggatccaactctcctcggtcccgtccgaacggtacttcagagggcgacggctccgtctcaacgcaacctactcagacgagcgaggacttccagctagataattctcttcttacattcactgttcatcctcctgttgatccttcagatggaccctcgacctcattccaatctgccacatcacactcggctgcctcaggagccagacgaccttcccggacgccttcggcgcctccgtccaactcgaaactcgccggttccatcaccaagggactctctggcagactcggctccctcggagtcggccaaacttcagataggaataagcaatcggcatcgagtgactcggactcagagatcgagtacatgtctggtttgacgcctgtgaagaatgaaccatctacagcagcgcgtacaaagtccatagaggttaaacaggagagggaggctccaggaagtatcaagaggaagctgagtttcgtaggaaacgaccagtcggattccagtacgtttcattttttgtgtgacatatgatcaaaccttggacacaaaattgaccgaacttgcttttcgtttatcgcgaacatttttagttggtccacaaccgacagtgctacctgaagaaggaggttatcttggagagtttgtcgtagaaggatatactatggtcaaaggtttggctcctccgcttgttgcctttatatctgccctcgcgctcgtaaattgactatgtatttgtataaacttcgatccttgcatgattaaatctaggcaaagggtattgccagccaggttcagctgtatttctctcgagaatagagccacaggccggaaaagccagaccaaacccttcaaacgtttcatccacaggagctcaacggtccctcaaggatatgatgaaggcatgtccctgttctcgtacatgcctgactttcaattgtttgttcatcattatgctccatgtctgtgcgcgtatcaacagccgaaggtggaaaccaaagataattctaaagctccaaaagtcaagcctaacaccattattcggttaaaaaacgatcgaggcttcggttagttcacaactattatccattgccgttctgttggggctttaatcatgctcgcatacaatcataattgatcgcctccaaatttcttgcaatctatccgtcacaagaaatcggtaaacttcctatcaagacaacctcttggcttgctcctctactggatcttcacttacttactatcaagggaactatcgtccattgtgacgttcctatttcccgagttggagataccatcgtcctaagccttgacgtctggctcaaaccagaagcattcgtagagattgatatcaagagaccgttagcaactgaaaagacggcgatactggctgattcgagtaaaccggcttttggggtcgaaggactggctacagaggaggaaatcagattaggaaaaagaaaagacggactaaaagtcatgtttcgtacgttttttctccttccgtttcttgcgctacttgctccattttttgacgaattctctgaccgtgcttatccgaccgaaacagaaaagattggcttgcgacctcgaagatcatccagtatatctaataaaaagctcaagtctacaggtatcaccaagcctttttctttggagaaaggcaagaccggagagctcgctcagaatcaacctgaagtgggatcaacaggggacgaagatgaggcaggagatgagatagatgaggatcaactagatagtatctacgcaaagtttgtaccttttcattcatcattccgtcttctggagcaaatgtctgatgccttttggggtttgtccatccggaatgggatcagagctcaaaaggatgatagagaacttgacgagatggaaccagccaagacatttacacttacacttcgtacgtcttcacactctcagatattctccttatctatccaattcgcttgctccaactttcttattcacacaccgagatactatgggcgaaacgatcgaatgcaatgtttgacaggtccttaccagaagcaagcgttgaagtggatggccgatctagaacgaggattaaaatcaagtagagattctgcgcttcacccactctggcaggagtatgtattctttcttgcttgcatcccctctctatactgtctctggtagcagttctgttcgagtcttacgcttcgtttgtctgttgatatctttgcgtgtgtgtaggtatgcgtttgctccggaaaaacaagatttcgattcaggtgaaatcgtcgatcttgaacattgggtcgaacgtgaggcttctgttttgtacatctccctctctagtccctttggcctgactttaccacttccactctcgttgatgaacgaattggcggatgtgcctagccaacatgttctactataacccgtattctggtgaattaagcttgaagttcccaagggtcgatcaagtctgtcggggtggaattctggccgactcaatgggaatgggaaaggtgtggtatttatcttgttatttatatccgaggttgttctattcggctgatcttcccggggtttgatatttgattgattgtcttctgcagactttgtgagtttaagatttacagaacacaccattcgaatcttgtttgaatctccctcttacgcttgtggtgaaaccgcttttctttttgaatgacagaatgatggcctccctgatacataccaaccgattcagcaatgccatcctcccagcatcaaaagacgaaactcctccttcaccaaccgctcctccgtccactgctgcccgtcggtcccgtcgacgactcatatttgattcttccttccgtgttaagaaagaggtagaatccatcgatgaggacgaggacgattcgccttctggtcagatggacgaaagcgctgatgatatggctgaacagcaagaacgggcagagggaggaccgtatgtgaccttggtggtctgtccggtttcattgatgaatcagtggcaggatgagctgaagaggagtgcgaggaagaagacattaaacacgatgggtctgtctctctccttcgcttgaattcacatagctttcatatcctgatactttccttccaatttttttggcctcgtagtttaccatgggaacgccaggggcgtgggactggatgaggcgctcgatccagataatcccaacagagtggatgtcgttattacctcctatgggtaggccaaagcccttgagcttcacttcgccaaagcgctctgttctgactcggcttgttgttgcatttttgctctattttggtccctcagagtactcactagcgagcatgcaaagtggagcgagaatcagacgaagaagaaagtcaagtcgttcgagacagtcagcttatttacatgtaagttggattctttttgattacaccaatgcgttgtagagtctgacataatgcatatttgttctgtctcaatttgttgggagtacagacgacttccttcggattatccttggtatatatctagtttcgattcgatttgttggcgtttggcattgagataatactgaactggatcgcgctgcttttgcaactcacgtctcagacgaagcacatcatatcaagtctcgttcaacacacgccgccaaggcatgctacgcggttgaagccgagagacgatggtgtaagttctaattggcgttcacgcacgtattctgagatatttcttccgtaagactaatcgttgttggagcgctatttttacattaggtgtgaccggtaccccaatccaaaatcgactggaggatcttcactcgttactatgtttcttgcgcttagagccttggggaacatattccttcttccgctcgtaggtgtccttctcccttgctctcttgttcgatcctctgtctcttttacagtaagactaacataggcgacgaaacgatatagatttatcactgtcccgttccagaataaggtatgccgacttttacttctaaatgattacccacatccgcattgcatctaactgcttaccatttatctgttctttgatttggatgactatcacaaaggattcctctgccatagatgttgtccagttcatccttcaatcttgtcttcttcgccgagagaaagacatgcgggataaggatgggaggtttatcgttgagctacccgagaagacggtttgtgctcatgctccaatcatgttgcggaaaaccgagatatccctgcttaactggatcaatgctctgtcttttccattcaggtggagcttgcggagctcgagtttagtaacgtagagcgcaagctttatgatgagctgtatttgaagacaaagtccaagttcaacgaatacagccgtgctggtgctgttgggaagaactacggccgaatcttgtaagtttacgcttttcaattcttgaaacctttgttcatcgtaatctgactaaggatcaaaccttgttgctctcttctcaagctcgatgttgatgaaactccgtcaggcagctcttcatcctcttctagttaaaactgacggtaccgatgacgatccagaggataacgacgatgaagatgtggataaatcctcacaactcaatattaaagagatgagggctcagttcgcttccggaggaagcgactttaagagtcaagcattccagacattcatagccagcctgaaagctgggcagcatgcggagtgtccagtctgctttgatgaggttcgtttgtgtttttcatcgtttctccttcctttacatttaaagatcttatatatcatcgaagttccccgcattactaacgagcttggtatgggttgtacagatggaagagccggctttattgccctgcgggcattcgggttgcaagacttgtctgcttgattgtatacagttgcattcggatcaaggagaggatgggctctgtccggtttgtcaggaacctgtcaaagaagaggatatcatggaagtgtgagtcttcatcctttgcttgacgtttttacttggttttgcacgtaacttgccaagtcgcttgatcgcttactcttgtctgctcgcctttgatttgggggtaatttgaatggtcatagtcaacgcagacctcgtaccaagttggatatgaagaccaacggggacgcagattggaagctcgtcaagaacgatttcaagtcctccactaagatggacgccttgatcaaacgactcaaacagatcaaagagaaagacccaaagttcaaggctttggtattctcccacttcacagtgcgtgtctagctaatttggctacgtgttatgagcgaccgactgatcatcattggataaaccgattgcttcaataccttcagtcgttcttggatctgatcgaggctatccttgagcggtacggtttccgatttcttcgattggatggttcgatgaatgtcgccgctcgacaagtggctgtcaaagaattctctcaaccctcgaacgaacccgtcatcttccgttcgttattcttttcatttgatcgcttacttctatgagttatgagtaaccttaatgttgatcgtctttttgtctgtttggattcctatatcgaccaatcacatagtgctgagcgttaaagcaggaggagttggaatcaacctgacttcagccaactatgtctttagtaagctttcatctgatcttctttctgtctatcctctctgcactgcaactgacattgtctttcctgggatttcatgaattaaacagtgatggatttatggtggaactcatcggtagaatcacaagcgatcgataggtgtcatcgaataggtcaaacccgtccggttcatgtcgtcaagtttatcatctcacatacgatcgaaaacaggtttgtccatcttttccttgcctcttcacttttttggctctcgtcaaattcttccacgccatctgtccatccagctcagccggactcatcttgtgcgttcgtctttttacgaaatgtcaaacagaattatcaagatacaagatcgaaaaaccgcaattgtaaactcgagtttaggaggaggcagtcaagaaggaactgcgaatttggaacttatgttttccgattaatctttgcttgcttagtctcgctatattcattccgatcatagataggtatctttgtatttttgtttcgttctttttctattgccaatttatgtatctatatcagatctgaatttctgttggacaagacaaatacaaaaaaaagctcattggatccgaaagtttccgttttcatctttcgttaaccgttcatcgcgtcctcttcgctgacttgttctgcttccacctcggctaccactgcgtcagacccggaagcagacgccgaaccagaaggaatctcgacagaaggcgaaccggatttggctcgttcggccgattggatggctagacctttagcccgagcggcttggtgaaactcttttcgagcctgttttaattctctgttcttgatctctacttctgcttttctctgctgggcaacggacgagagagggttccgcgaaaggcaaggggcaagacacaccgtcatttcatgtctctatacacctcaagaggggagggaaaaaaattgaagagagaagagggaacgcaccttctggtttttgtcacctctggcctccccctcttcgacctttgaattcctggctttaccagcaggaccccagttgggtctagggttagactggaacctgactagtctagcttgggagatgtgttttgtgagatcagggtgccttgtaaagttgatggtcgcactgtgaacagccggtgtaaaagacatccgaggtagaagagagagggttcaacaaacttgcgcaagagaaaacaaggagaaagggaagaagaacgaacgtaggctcgatagccaacaacttagcagccggtgaattcggctttatgttctccatctttacaggagccttttctttgatgaacactctgtagagatctaagatgaagctcatcggggcctgcgaattcatgggagtttgagcaaaggtatggttagtgaaaggaaggaaggaagagtgataagctggaaatgagaaccctgaaagaaggatgtacgttggttttgagtgctccggaagaagcgtgcgttcgagaaacatcgtagcccgcatggaggatggccgaactgatagttcgagtcgtcgtgataaagagagaatcattgagcaatgtttctcttgtggcagaatatacggattacaaagcgagccaaaacagagagaggcacatacccaatgtcactggtagaaggcgaagtacaatggaacattcccgagaggtaagcaggatccaagtagaacggggtttccaattcctaaaaattcccccagagttcatgttgtacaagattcaatcgatcagccttgacgttctgttggatcgaggtattcagctgaaagctagtgaaacatcttacctcctttgccattgtgaccattcctttcatcctggcgaccgtaccgaacttgtcctcgttcgcgtacacatgatctagaactttctgacagaacgtcttgtcatgaatcggtccgatccaaagtggtcctgcgagctaattttccaaaaatcgagttggaagcaaaagagaagaagagaaacaaagcgttcaagttttgtccgatttgtggtttgattgtagagaagaaagccaggggtaagaagaaagggagggaacaaacgtggtggaccgctccgcactcgctacaccgaggccccgtcggtggaccttggtggttcttgaacgcgtaattcattcctctacctttatcagtctcgacaaccctaccgaaaggttggatcgtgtaggcctgacatccggcgcacacgtagacagttccagtcttgctgttttgtaagacgatgagagatcgaacttcagaaaacaagaaaagtggctcgataggaagattgcagaggaaaaatggagaaagagagtcgtaaataacacaaacctgaagactcgcttgacctcgaacggagaggaatacactcggaagaagacacgcatgtaaaagtcgatagagagcgaaagttggggaacaatgtatcgaccgtatcgagcggcgatgcctgaacatgtgttaaggagcaaccggacggcctgtagagatggagaggacagaggcgtcgacaggaaaaagattccaacattcagcaacttgttcttgatgtagtcatcagaagggtcatacgatttcgtgcgagtaaacagccttggcagaaactcctccataattggcaaagctgatagtgaaagagacgggtgtagtaaggttggcatgaagtcaagtgagaactcttgcttgacaaaggaaaagagaagagggacattcttaccacttttcagggtagtttgacccggcagtgacagccatatccgtgcacgtcacacagagtagccctatttgaatggaaataggagagaaccaatgaaagagacggttaggtgagctagaagatgcgttttaaacagacaggtcttgcaaacacgcttacctccgtcggcagttgcctgaatggcgccgtcgaggaaaggagcagcggttccgtacggatccagatcgacacaatcaactttagactttcggtgattgtacatcaacgcgctatcgtgagagagttgaggatgaagagtgtttcgggacgatcagcttgtgcgcactcagataaacagaaggaacaagaaaaactcacatggcatcaccctcgttcactctaactttacccttccagttgttcttctccttagcctcaatctctgtttgagtacccggagtgggtcctttgtcggacggatcgagatcgttgtacgagacattacgcttcatggcctcaacagccgttggcgagaaatcgttagcgatgacgtaccttgcagtgagaaggatagacagaaataaaggagcaaacagaggaaagagaggaatgtcagtcgaccgctgtaactcttgagagaaagaaaaggaaagtaggaccgacttgacgccaggaatctctttagcgtatcgaatcgcacggagaccggtggccgagagagcctcgagaatgacaaattctcggtcctggtgtcaagagcagatggtattaaagaaaagagttgcattagttagattgatgcgcgtactagacgagcgcatacatagaaacatacgttatgctgtcgctgtggagaaaaggcgtcgacaagtacaagaacgagaaagttagagtctgagatccgtgcgctgaatatagatagtgtttaggctgaacttgagacacaccttggaaggctcctcgacggtagcggtagtagtggtagcaacaggcgtctcggacgtctcagtcccggcttcgacctcgatggcagcagcggcagcaggctttcccctcttctttccctttcccttgcccttcgcttcgagctctgccctgacctcttccttccagatctttccccaggtagaaatacaagcgatggagagatctctgttgaactgctggactgggttaaggaaagccgagttatcgtccgggagaaggatggtggtcgactgctcggtataaggagtcaagccggctggaacaggcttggccggaatgatctctggcggaggcaaaactggctgagcgggagaagtatcgtccgacatggttctcttctggatgaggtgtctgtagagagcgagaggatgggtatgcttgacgaatgagctgcaacaacggacggacaatcgaggtagaaagccagacggtcgcatgtctctatcaaaaagaagatcaagaatgaattcgttgggcggcggatatttgaatttcagtgaattttgagagaatttgagccgagcccaaatcacgtgatctccttcagtcgacagtcagtccatctttcgagggagcagcttggaaaggaagagagcaggcagggaagcaaagaaggaagcacgagacattcagagcagttcatgtagagttgcagagtcgcacaaacagaaacagccgctgaatcaccctccagacggttgactggcgactggacgatgtatactgccgagaacctgctcctaaacatcatctcgatcacagcgtctccttcttcttcttctcttcttctatactgccacggagataacactgaacaaactcatagaagaacgagtactaggaagtaagagaacaacagaacacaacatggttctacccctcaacttgtctttgcgctctcactctctaccttttctctgctctaccttgtcgtaaccatgggctagccgtaaccacagttccttatctttcgtagccagatcgcacgcgacctgagcatcacgtgattctcgctcggacctcgccgagaaaagcgacacgctgctcttcttattttttcctcacaagcttcttctgcttttcttctctctcccatcaacacatctctcggatcgatcaggtttctgttttgattgctttctgttctttggatttgcttcttcgccttcctcagtagctccttccgatggacaaccttggtttcgagaagaactgggttcaatccgtcttgttcttctccccgaatccacataatgcttcgatcaactcggccgttgatatcctctcccagccgtacgtctgtgcttcttctttctctttgctctgtgtttcctatgtcgtccacctagcatcagaagtgatctggctgtgccacagccaagacgcagcgggtcttttgctctcgaaagaggaaagatggtggacatcaagatgccgatagagctgttcttcatcaaagaaagactcatttgtcacacgcgtacaaaccacttatctgctcgttcttcgattattaatatctccgtctcttccttacccagtcctcttcaatcacatcgtttctgggccgacgctcggacaattcttgctctcttaggagccctctccgttatctccctcggccttcagtttgtcgtctacccagcagtcgttcgtctctaccgacgacgacgttctggtgattatcacccggtctcttctgcctcttctgatacgatcgctgctgatcaagatgagactaccgagacggatgggacaaccaagctcagacttgatcatgggttcatcgcccggaacggagggtcgatggttcttgcctggggaatcgtcaggttcgccggcctcattctcctcgccgttctctctgtcattgccggagcggcagccgaccgaaggagggagagcgccgtcgaatttaccctcgctgggttctttgtgagtatccttgtgctctacccacatcatacacacaccctttctttcttcttctcttctccttctttcttcgatttctgttttcccatctgagttactgataatctgttgatgctctttggcgacacagacttacgtagctgtattgagtgctggatctatagtgtatagaccttcaatcttctccaccttaacccatactttgaaagctcatatcacctgcttgctcatagtaggcaagtcaaagcacatcattcttcacaatttgatcaacattttaacctatccgtttcttctcctttgaatagcgttcggagtctttgccgttcgggacatctggcctatgctcaccttcacagtcgactcaaaggataacctcagtgcgctcatgtggattcgactggctgtgagttctcctcaaatgttatgcatctatacacatccacatattgataatctctttctttcgatagaccatcgctcttctggctatctttgctccaattttcacccccagaactttcatcccgctatccccatcgaacccgactccgcccactcccgaacagacgtcatccatcttttctgtcctgttctttgtcttcctcgatccgatcatcttcaagacctggaaagtaagcgctctcaaattttctcatgacttgcgtgcgtctatatttacaccacttctatttctgatccaattttattactcctagcttccttctttaccttacgaagatctgcccaggttggccgatattgaccaagcccagcatctacgagatcaaatgatgcatctgctcgatcctaaatccaagcatccccgagccaccaaaggttacagacatctcggctggcgaattctgcgcgcctggtggaaggaggccatctattgcgtcttgcttgccatcgcatttacagtgcttgaattcgccagtcctctgggtgtgaacaggttattacactatctcgagacaggaggcaaaaaagccgtcgtcaagccttgggtctggatcgcttggattggactgggtccttggttccaagggtgagtggtctgttgcccattgggcattgtggttctgtttctcctgaacagaagaattctaaaacccgcttgttcttccgtcttctctacattctctagatttgctttcaacatctttatctatatctcgaccagattcatggttcgatgtgaatctattcttactcaagtcttgtttgaacactgtatgtgtcttgattgcctctctcgcatccaatatctatcattctttccttctctaccctcagtttcttggttctcatctgacgcgcatactggttcttagctctccgaattcagcctcgagacgaaagcgccggaaaagctaatgatggcgagtcttctgaaaatggagaacctactgcagacgccaacaagggagcaaacattgttggaaagatcaacaatttgatgtctaatgatctcgactcgctcatcaatgcccgaatgattttccttgacatcatctctgctcccctgggggtgataatctctgcttggggattgtacagtatccttggttggagttcattcgtcggcattggtttccttggtgtgttcattctcgtatttgttctgagccaagttcatctacagatcaactgactcatcggagagtttactctttatggacgtataaagtcttgaccatgcctgtcccggccaagcttgcgatgctccagcatggaactcagaaacagtacactgatgcctcggataaccgggtccaacgagtaaccgaagccatcaacaggtgcgaacccatcttttctctttttcttcgtttctcactctatcgatcgcaatctcacacttcgatcgatgtggaatagcttgcgaatcaccaaaatgtttggaatcgaagaaaatgtcaaggctcagatccaggaacttcgatcaaaggagctcaaattaaaccggaaacgaaagctattgagtatgggcatgtctgtctcaaactacactgttcgttctatcatttttcttcctcaaaaaattctagaatctttctatcaacaccttcctgaatgtccttctctattcatgtagctccccttgctcgtcatggtcgtcacgttcgcagtgttcaccgtgttccagcatggagacctcagttcttccactgtgttctctgctatttctgtgtttgctattttcagttcgagtttgacgaccttcttccaggtaatgtctcttcctttccttactctcgcgtctcatccactttatctttcttagaaaccatctgtctctgaccattgacaaaccaacgattttctagatttctcgatacatcgagtcttatgttgctcttcaaaggatgaacaagttccttcacgagaccgagcttatcgatagatatgcggaggctgacgagtccgaggaggaggttgagaacccagactacatcggtttccacaatgcttctttcgcttggtatgtctgttcttcttgtttccttctttccttccgagactcaacctgttttttcgtcatttctcttttcttctccgatggcaaccaaacacatgatataggttgaaaaacgtcaaggaaggagataacgtcaggaacttcaagttacacatcgacgatctcaagtttaagaaaggaaaaatcaatctagtcgctggagctgtcagtcttcttatcctatatccctagctttatacatcctgaaaatactaatttttgccatcccttcttgataattttactgaatcaagactggaagcggaaaaacctcgctactgatggctttgcttggagaaatgcatttcgaagccaaacctggatctagtttctcacttcctagagcgggaggagttgcctatgctgatcaacaatcatggtatgtcattctttacctctttatcggttgcatcaatgaagggcagtgcttgttctgtgtttccttggctgatagtggaatcataatgatatgtaaaaataggcttcagaaccagaccttgagggaaaacatcttgtttggatcggaatacgatgaagaacggtacaacaaggtcgtctaccagtgtgctcttgagagagactttggattgtttgatgccggtgatcagactgaggttcgttggtcttccttctttcacgttctgccttgcttgtttgttgattcgattcgatctgtctgtatatgatgaattaggtcggagagaaagggttgaccttatcgggaggacagaaagcgcgtatcactcttgcccgagccgtttacgcccgtgccgagatcctacttctgtttgttcatttctcttcattcaaacgactcataagaccgactcgcttcctttactcatcctagtataaacttgaatacatccccaaaagtgatgatattttgagtgcgctcgatgtgcatacgtcgaagtggatcattgacaaatgtttggctggcgatgtgattgccggaaggactgtgatccttgtaagtcctttctctatccaccagacattctctcgatattgacattcttcatacattacacatcaattaggtcactcatcatattggaatggctagaggtgtcgctgattacctggtgtccctgtacgatggaagggtcaaggcccaaggatcaatcacagaaactctgaaagaggaccccaaacttttcattgaggagaaggaggatgaaggttcgtgtatttttggtcttgtgtcctctctgacgtgatcacttgggtttgagtattctttctcactttgtatcctgtcatataaaggcaaggaggatattgcggaggagatcaccgttgtcgagggcgatatcgatgaaaagcctgctaagtccgatggaaaattggttttagccgaagaaaaggtgagcttacccgtaccgtagccttccattaaacggctgttatgtcattaattcgctgacctcctccttctcatatttaggctgaaggacatgtctccatcagggctgttcggttgttgatcgattctcttggcggacctctgttctgggtgagccttctttcatagaatttgaccttctacttttgtagtttttgatcctcattcaagcctacgtttgttcttctcttctttttctgactttgtcttgaatgttggatgtgtaggttggtgttttgagcagtttcacccttgatcaggtcctcacgcttggccagacctggtggcttggacaatggtctgagcaatatgatatcaaggctcctgatgatgtatccatctcatagtgggtctattaccaccatttctcatacattgtcaagttgtggaagtcaaccggttaactgttggattattcctttgaacagctacctcggtctctactgtcttctggtattgtttggaaccctcgccatgacctctggttacactatctggcagtttggtgccgtccgatcgggcatgcgcatccaccatcagcttctcaacagtgtcttctctgcttctctccgatggttagattcaacccctcaaggtcgaatcgtctctcgattcgtccgagatactcgaacaattgatggagaatttacagagctcacgagtagtgtgattgacatgggactctctctgttgatcaagttggttgctatcgctatcattgtcccgtggttttcgctctctgcgttggttgttgctctgctaggtggtttcatcgccgagttatgtaggtttcgttctcaacgtgtaactctacattatcaaaagacaagtatttttctgaaactcacccatgttctctttgagggtcaactacacagatatccactgtcagatgtctgtcaagcgagatgtttcgaacaacaagagtcctctattctctcactgttagtactttccgctggattatatctgtatgctttgatcaactgatatcttattggtcggtcgtcatctatagttggtgatgccctgtcgggattgatcagtgttcgagcttatggtgcagagagcaaagttagagcggaagctcttcgacgggttgacaagtattccagagccaccgtgactttctacaacttggtacgatctgtttatgttagaatggcctcaagacaggtctttgcagcggccaagctaacattatactctttgtgtgattttagaaccggtggtgcaactgtcggtttgatgtcctcgctgcggtcttttcttgctgccttgctgcctaccttgtttacggacctggtgaccggaccccctccaccgtcggtttcaccctggctgtctctgttcaatttagttcgatgatcctttggttcgtcaggatcttcaacatgtttgaggtgtctggaaactcgctcgagcgagtccaggattacctcatcatcgagcatgagaaggcaggcacgccccagggagttcctcctgcctactggccgtcttctggttctatctcgatcaacaaccttaccgctcgatactctgccgacggacctgtcgttttggatgacatcaaccttgagatcaagtccggagagagaatcggagtatgtgtcatcgttttttccgatccagatgttgacactcgaaaactcacactcgtcttgttttgttattgtacgatataggtcgttggtcggacaggaagtggaaaatcgactttagctctagcgctgttgaggttgattccaaccaccggagatgtcttgattgacgaccgaagctgcgcggccacgaatctggatgcacttcgatcaaagattaccatcattcctcaggatcctacacttttctctggaacgcttcggctcaacttggatccttacgccgagcatgaggttcgtcttcttaaccgctcttctgatggttctcttctctcttgtcgatttgttattgatagatgtttgatgttttgagtttaggactctgtcttgttgcaagctatgaagtcctcaggattggcaggcatgccgggacaaccctcgacgaacggaactagtacccctggaggacatgctatcacgcttgataccgagattgctgtgagtgttcagtctctagtctatatgatgaacattctggtcacgttagtgtttctgatgtttgattcttttctgtccctccccctctcgtgtatgtaggctggtggagacaacttgtcgcaaggtcaaaaacaactcgttgcgcttgcagtaaggcttttttccttcaaaatccatgcttacgatttaaccttcgatctgtttcctgatcatacgaacacacttgtcttgattttcgtagcgaggtttggtcagacgatccaagatctttttgttggatgaagcgacggcctctgtcgattttgagactggtgcgttcactttctctccttgcctttcgctccgccacttatcatatgtatgttttcttctcaaatcactcgtgttcattacagacacgatgatccaaacatctatccgaacggaacttgatggagtgacattgatcacgatcgctcatcgattgagatccatcatggactacgacaagattctcgtgctcgctgctggaaaagtcgtacgtcgagttttgctatcctgtcttttccgtcacgttttctattttccatgtgctgatggtttgacgtgtggtcttgatgtgcaataaagctcgagttcgattcgcccaagaagctcttggagaacccgaccggacatctctcccagttggttgactcttcagccgatgcagaggaactccgatccatggctcagtagatcaactcccaaaattgtcttctcttcctttcccttcctgttaatattttggtctatcattgctatatgaaaggagactgtttcttcttactgttaaaatttttgtttctacctttcttcctctcttctcttttttttttcttcatcgttctatctctttttttgtcgttctttcctctgccttttctcagggccaaattccgatcaatgcagacgttcgtgccaattcgttcacttgtcgtgattatcatatcactcttctctcaaccggtatccagaaggaaggggttgtcgcatgctcaatggagatcgatcaagaggaaaaagcgagagacgttcgaggatgcggcatgcattgaaaagaataaaaagatatcaagaaagagtatagatacaaacaaaggaggcttcttcagcagactactacaacaactactacaacagacgcagaaaggaagaaagagggaaaggaaaacggatccactggacgctaggccccatggcaaaaagacatgagtttatccctgccaggcgtgcttggcctgtatcatcccgttcatcaaaccaaaaatcgcgccgaacgagaagaagagagagagagaagataggaggaaagaagaggaaaaagagaagacgggtttcagtatgtgaaggaaagtcctttgggtgtgacggatagagatgtccagcgattcaaatgcagagaggtggggacgaaggtttcacacaagaatgttcccgagagagttgaccaagatcgataatgcgagtaggaagagaaggaaaaggacgaaaaaacgatcgtgttcaacagatcaagaaaggacgtacgtcgttctttgatccgtcgagcccgtactgagcgtatcgggtgttccgattgttgtgtcctggataaaagtagtatgcaaccataccgctgtttgaaggaagtcgaagtaccgtatcaatgtcaaatcacaattaggtcaaacccgtgagtgactcattcgagtgagaaccaaggaacgaacaagcatgctccaagagcgaggtaagtcgtcatgtcttttgtacagtggtatcatgattaatttggtgcatgggcgagataggatcatcagctcattacacgggagggttctagagaaacaagaaaacagagtgacggacggttcttcctaggtttatttcccattctcattccgccttgctgcaaaggcatcgttgccatcggacgcttaggaaacgttcctaccactcggttgatcccggtctgaactcagaaagatcaagagaagggatgaacagaaaaaataacggtgcagtcagctgatcgtatgcacacatgctgaatgctcaatacgccttggacccttcaacaggtcaacaacgcttacggagcggaggatgatcttggaggattgcatgctgagaagccttgtttgagtgttggtaagagggagcagagtgtttgtgtatgtgatagatcaagatagagatagagatagaagaagggaagaagaagggttgagtgagcttgctcccgttcataaaggatttggctccatccaaggacgtaggccagatttgatcacctggccgatcgagtgatgatctcatgtacacgggacctgagaagataagataacgatctcttgtgcctgtgcgcggttacgaaattcaggatagatagaagaaacagtcattggagaatgatagcattacggatacagtccttggggaaaatggagattcttgtacaactccttcaggaaacaaaggcaaagaaaacgaaaactagacagcgttcacaccgctcagtgacccaatccaacggcagccttgaccttctcagcgagggaagccttgtgggcagcgtcatgctctcccgtggcgacaccagcgtgctcatcagcgtgagtagcatcggtcacagagccagcctcagtagttccggtggccttaggagcagtagaatgggtggcatcgaagggatgaccctccttgtcccggatccatcggacaccgtgctcgtcaaactgggtgtgagcgtcgtgctcgccgacctgagctccagtctcagtaccggagtgagcagcggccctgttttccaacttatcctcggctcgggcgagcttgctatcgtgagcaccctcggctccatggtggccagccccagcaataccagcggcgccagctgcagcagcggcggatccagtaccaacaccggtcaaaccagaaccagtggcagatccagtgtgctgagaacctcggtgaagagcttcgtccttgaggctagaaccggtgctggtctccgaaataccgtgtgctccagagacaccctgggctccaggaagaccccgggtatcataagcgccgtgagttccggaaacaccatgagagtgaacggctgtggcaaacatataatagtgattagtaagatgatcaaatattgagattcataagcagtgtatgtctcttactgtcagcagcaactccggctccgactccagcaccgatggcaccatctctcaaattgtgggaagtgttggaagtgtgagacgtgtgggaggtatggctgtgacccagcccggatgagacaccgctgacctctacgatgggaggtccaagaggcaacccagtctcaagaggaagggcagaaccagtgtgctgatgggggtgatcaccaacggagccgaccaagccggtctgcccgggaacctgggagcgttggtgagtgtgatcaccagtggatccaaccaagccggtctgcccggggacgtgagagtgctcgtgactgtggtggccggtggctccgggaacaactccggcagcggtggaagatgcagtgtgggaagagtgtcccgtctgagacgaaagagggttggcggaagagctggtggctgtataaagcatcgagtggtcagatatctgcgtaaaaactccacagtaaatattgatcaatgaatgtgcgacttactggaaggcaaatgcgaaccagtctgcgttccagtacgagagtcgaacgcgccggtggagtgagatccctggatgccggcagcagtgtgggggttgtcgagtcggttggcagcatcggtaccgattcgcttgttgtcagtagtgtcgctggagtggagggctgattgagagagaataaactgttgtgtgagaaacttctgcatgatctgcgtgttcatgagattgtggagatagaaaatattgaactcaccaccctgctcggtcaatctaggaatgggctcagaggtccttgaagtatggacaccagagttcacgtcagatccagctagagttgaaagaggccgagggaaaaaagaaagaataaggtcagctgttcaggctcaatgtggaactacgagatgtgcgcgcgaactcgagcaacagaaggacttactcgttccagtggcaccagactgggagacgttggcattaccagacttcccggtaaaagcttcttcgatgttgtgcacagcgttcttgagaggagcagacattatagatatgtgatgtgatgtgatgtgatgtgatgttgtaagatgaggaagttggacaaagacaagatgagatgagatgaggaaaaggaagaagaggaaaaagatcccgaattctaaaccaagtctttataccacaaggcaagaaggaaaaccctgtcagtccatctatgctgtcagctcggtcctcccccctttttttcttctccccctgggatgcggcaggtccgtgcgctcgccgctcatctctgtcatctctttcatcttccgcccgcccgcacgtcatcgcttctaaaaatgtgtgggcgggttgaccggatgagcttttctgacgtcatcgttttgttctcgttcgttcgttcgctcggtcgattcgttcggtgggggactgtgctgaggaacgggttagtaccgttatgctaccatcgaagcgcaaggggttagtcgctgatcgtttgatcatcacgtgccttgcaacttgcataggtgcctgatcggcgagcagactgctgcgcatttccgccgctccggagatagaccaaaacacacctcgttcgcacgcggcaaggattcttattcactccgatacacaaggcttctccttcttctccttcttcctctcttccatttgttcctttccgttgctatctccgttgctatctagtactctcattcacttacacagtgacataatcttacgcttccatcgatgctgcaattacttcttcctctgcttcttgcagtaccatcaacggtcattgcgcagaccagtccccaagcacttatcacccagtacgcgctctccgagacgtatacctacgcccagccgacaaaagagctcgattcgaaccaaacggtgaaatacctcaaggagaattggtccatcaacaggaaccgtatccagacaggttcggaatacatatcctttgtcgatgatccgttcgacagctcggataaccagaccgtcctccaagtcaactacatggcaggcagctacggaggatccggcgacggaggtgcccagttctatgtatgtcgagtcttcgtactggtcagagttatacacagccatgtctgattgaattctctcttttacattcccctcttcccgatatttttctccattcgatcgtcaatgccaattaatcaatcaatctctcagtctcaacctctgaactcgacaaactccaccggcctgacatccatgcttctctcgtacgacgtcgcgttcgactcagacttcatcttcaatgaaggaggcaagcttcccggtctacggggtggatccgatatatacggttgctccggaggctcagaggcaaacggcacaacttgcttctccgccaggctcatgtggagatcagtcgggcaaggtgaaggtatgtcaagtcgtctctaaatttgattcaaactttgttgccaaggctcctattgttagctctctcctcacgtcaatgtacctcccttctattcctctctttatttgcgtatcttcatcatctcgtttgtctttgtcaaacttcatagtgtatgcatacatccccacatcggggtacgatctgtgcacctctaccaatgtaatctgcaacagtgactacggcacgtctcttagccgtggatccttcacctttagccgaggcggatggaacaatattcaactctttgttcaatacaacaacccagtccacaccgcaaacggaaaaattatcatgtttgttaatgtgcgtagaaaatgctgtcgcctatcgtcccttctcagcattcatgattgccatcgcaggaatcatctgcaatcgatccttctcttaattcttggctgtatctgggcaatcccattgattcctttcccttgctttgccttcttttttgccgaccttgttcattcaggatacccttgtgctttctcacacagatctattgatccgatcgtcgaccaatttagcttccatcggtggcctctttttcagcacattcttcggaggatctgactcttcctatgcgtccacgcagaatcaaacgacatactatcgaaactttgcgctgaagggatcaaccttgttgagtgatggcgctggctcgaccgtgaagtctggtgctcagtcaaagaatgcagtcttagccaacggctggatcgctttcatgttcgcgacggtcgctctcgtttgctcctttgtttactagaattaagaaatagataaagggagaagatacatctaaggactctctgtcgtttcaatgtttgtttttctgctttcgttttcgtctctcttcttcccacctgcctagtttaccatttgtgcttcgccttctgcctatcgcgtacctttcttttcatatttttggaacttatgtcttgttttgaatctttacatgtggtaatgtatcttgacagcgccgatgaggttttgcgccctacaatgttcttctctttggtgtctttttttagctaacctatatatatctgtctcttcagaggtggctctttcggtttgtatctgcgttctgcgttcctattgttgctatacttgggatcttgtaagatatttatctttcctgcccttcctttttcaccagaataggaattatttattcagtcaatagtactttgttgtgttgtccagaagatccattgtatctatcctcaagtgaaaatagacaagtaacataaacgatcgaaaaagagtccatttggtctccattcgttcactcatcaaaatctattcgctctcctagccttcctggccgccgcctcgagatcgaccgccggatcctcgttttgactgtatccgtccaaaagatcatcgtaacctggtccgtcaccagccacggaaccttcatcatctgcatccgtcgtgttgctcacgatcgaggtcggtctcgtttgtttcaccttcacagccggagattgtctcaagctcgaagtcgaattcacgccgccgctgccaccgatggtgacgctgctggtcgatacctttcgagggcccctaggtccgccaacagggctcgacccattcgaggacgtcgaccggactcgatagtgctggaaaggcagtgattgattcaccgaaggcgaggatgacggggtcttcaaacttggagaagccacagtagatacagatgcgccaaaggtacctacaggggtgtgttgggttcgaacatcggccgaaggaaggttggtagtgatgatggtcggtttgacggctggcgctcctacagaggacgtcgactctccttccgacccaacggtaggcttggtcggggacggacctgccatccgttcaacgcgcacgtccgagacagaggtgacctcagcagaatttaaggtgaggggccgtcccagctcggagggcatgacgttctcagaaggaccgtcaatgtggtcagtctctgaagaaggttctcgagaacgctcaaacgtaggatcctcgacctgagtcgcattcgaaggcgattgaacagagtcaccatcgaccaaggtccagcctcgctgagatccttctccggaacttagtgtactcaacctcgatgccgagcgtggcggtgctatcattgagtctgagtcgcttcctgcatagctagaagcggaggatcgagtccgactacccagcgctcgactcctgggtgatcgggttggcggccgggtaaagtgatcgtctgacgacccattcgtaccaattccagatccaggtcccgctcccgccactgcactaggtttctctcgaaacttgatgccagacatctgagactttgccgacgtcttgaggaaagatgtctttggctgagaataatcgcttccgacggacccactgaacgagcgtctcgatccgatcggtaccctcgacgatccgctttcagactcggacccgcaaggcgagaccggttgtcgagaagcaaacgaaggtggaggagaggacgagcctgaggtcgatagcggcgagagcacagatgacgaggattccgaatgagattgtcgggacataccaacaggactgtacccatgtggcgagcttgacacgggcggtctggccgaagaggagagcaaaagtggtttctgagcggaatgggaaacagacggtgaagaaacaggcgtccgttccggggtaacgatggcaggcgttgagagcttggcggccaatcgatcttgcaggctcttatttggggtgagaacaactttagtgggcgtcgcaacaagatgggctgatagttcactggagtaagaactcgatggagtgatcgatccgttagaggttcttgggggcttttcaacggagtccattgaaagaggggcctgtgaagaactagcactaaagttgtttgaaacaggagagctcggaggttgagagcttccccaaagtttggcggtccacgaagaccggttcgaaggttttggaggaggaggcggtgggcgatctgttgtgtgttcatcctccggtactgactccaaacgttgaggcttattataatcctcccatttcgataaggcagcagccgtcaaattggatgatctcttcgataaagcagcggccgtgtcactctctttaaaagcttcgacctttttgagcatcagactgtatcgagatgattgagacgaggtcgaagcatccaacccgttatctgaagcatcacccattggcccttcttcgggaacagatgatatcgataacgagggctggtgggaaggacggaacaatctggtagcaaaagaagatactgaaggcaacgatgtagatccaagcgcgccgagagtctcatcatccggtccatctccgttcaagtcggctaggagtcttcgttgacgagactcttgagctagttcaataattttgtccaaaccaatccgagatagagggtacctttgaagaagcgccatgccttcaacgaatccctgaaccacagaaaagaaccttttagtacacctgataatatccgcaaagtgccacgaaacgaacctctccaaaatctccattctgctcatcgacatctccccataatccgacactttgaccagaacgccgccttccggcttggataagaggctttctggtcaatagtaacatggctgtacacacatcaagcagtagatcgatcttgggggtctccgtacgcgtcgtagaaggctcggaaagaacgaaatcccaaatacgaagaaggctctccatctattcatacatttgtcaggtcgattgagaagtacatgtgcgtcaacttgtctgaccgctcttgcggcttcaataagtaacgaagaagcttacgggaacatcttgagcaagcaaggtagaaatccacttgaaagagtaatacggaagggctgggtctaacgatttgtggttctgtgatcaggttgagtgatgagtacgagagattattacgaaacgcaaggccagaaagatgtgatcttcggtattagtagaaaagcaacgtacaagttcctcccacaactgagtgcagcgcgtccgacgagatattagccatatgctttatgttcatctgctcaaacaatcagtaattgagactcatacttaccgctagatctgcccattttaccctgtctgacagccttttaagagcccatttgacgtccctttctaccacgcctccgataacgattaagtcttggctccagatacccgctccgggtcctttaaccacgttccccacttctgccatcaaaccaacgaacgcccaaaatgtatctccctctactgcggcctgctcgtactcttcgatagatgcctttgccttggcctcggctacggaagcggacgcgtagacgaaatatagcggagcgagtatctcggcaaacccttgagtgtaagccagatggggatgaatgagagtaaatatatacaaaatacgcgttaaggcatcggagtgaagctctacagtcgatagaagtgagactgtaggtgcaacgttcgaaatggatgtaggagtcgtagaactatcctcttttgtcggttgcccatttgacgtgatacgcaagtcggaaaagtccaacggggggagttctgggagagctagtgagctgatcgatgttgaaggatcgatagacggagttggaacagtctggtctcggctgttggtacggataaggttatctgaaccgatggaattactattaatagggacctccgagctaccttgtctgacggaccctgcatcagactttgtagttaggatagctgctgagtctgatttctcgcttccagtctgaatggaactacctgcacttggccagaccgccgattgaatagcgtcgtttcggttggcgagtgctctacgatgcttgattgagtaagattgagaagaagtttgtgcagaatcacgtctgggatatgtgataggctgagaaaagaagttcaagtgggtctgagttcgattgacatctttagatatcgagtctagaagcttgtcatttgcggaaagcggatgcgatggagcctatatcgtgatcacaagatggaacgatgatgccagagtcgtatgtcagacaaaattgaagaatgatatgattagtgatggagaccaaaggatgatcagacacttaccgaggcatcttcaacctctttgagaaaattttctgcaaattgacagtatttatctcttccagtacttcgttccttttcccagcttgatttctgctttccgagaaccccaagtagcaaagagtacgtgataggtcggagatgaggcggttccgacgggatacctatttttgggatttcagatgattgatgtcaggatagttttagaaccagattagttgtcttgacaaagttgacatggcacattactgacctctagctgccagtcttctgagagcagaaagctcaacagtttgttccttggttgaaggagaagaatctaggagagactggaaggcaactaggctgaaagtgcgtgtgctccgaaagaagccagttaggaggcgctctgctctaaatgacatgatgttcggtcaaagttttcattataaggtctcacgattggtcgtcctgcttcatgacaagcggcagaacgtctgatgatgatatatgcaaggccgacttgaaagagatgatagaagaatgctgatgatggagatgatggagtatctagattgtttataatagacaaagaagttgttcaacaagaacaaacgcggtggttacatgccagtaaccccgctgaggagactccttttgagaaaacgctgaaacggaaggcattttgatatggtacaaagacataaacataaggcaaagaaaggaggggggtcgtccagagtatcgtatatatgataagatatctaagatagtggtatttctatcgatgcacctactggttacttctttgctttagaagcagctttcgatttggcagccgccttacccttagtcgctttcggctgcttgataagcttgtcctttgaaaagtcgtctgcatccccagtatcctcgcgctcagactcctcgtctcccaaatcgtcgtcgacctgaatgagatgcaaaaaattgccaagtcagcctgatggactatcgagcgacaacatggtaaggagaataaattgcgcacgtcttgaacatcttcgtgatctgcctttggaccagcagcaagcttcttggctacagggacgttagtagccttgtgaacggcgataggatgatcctttttgttataactatgataccggaagagaaaaatctgatgagttacggaactctttagattattcgattagttcagaatacagagaatagagaaagtatacgcactttctagtaaacgtgcttttaacagatgtcggtatcttctttagaatagtttcatccttcctctcgcctactcctagctcaactatcgaatcccaatcttccttgctcaggtagtattcatccataacgtcgatcacatcgtcaacggagttctgaacacagatggaaaccccacaacaggtatgaagcgttgaagcagcaaaagattagcaagcaacttttttccaagtgaaattagattcattacgtaccgccccctctttggagcataaaggctcgaccatttgagaatataaagtaggaatatagtgctctcgaacttggttcatattagccgagactttaagccgcatatgtatatgaatgtcgttcaactgtcggtaattctttgtttgtcgagaattctggcctagccacctagattcgtttcaacagcacaccaggcatcaagtatatccgttcagcaatcttcattcttgaccagctgaacgctgtttgatcgaaaggagcccactcactctgggaacttcataccgtacccgccgccccaacctccactgcctccgtaacaaaagtaagccggtcggacagtcgacatgattgcatggttcgggagtaaagaccactgttggtccgaactataagcagacaggggatcatgaaagaatttctttgtcaacagagctcacatgagtcaaatgttttacaggaaaggatgaacgaacctgtgaatcattctatccatcaaatctccttgagagatcgagtcagcagcctgatccaaaagagtaagttgcttgagtgtcctctcggggcctgacaacccatttaacctggcaaagttttgcttggagtaattgtcctaacggatccagaatgaagacttcaacggacggatcttctccacgaagcagttatatataaagagagggtggacctacttgaacgaacaacggaacgaaactgaaatcatgaaagtacaattccattttctcaccgagcgattgcttgttggtgtgagagaacatatacgggctaaagagtttatcacagattgtgaaaggagtcattatcgcgttcttctcgttagccctcgcgctagattaatgtccgcgcagacgaaatcagtgttatatcacgttagcgctgaaacacgagtaagtctataaggaaagagtaagagacgagacgaacagttccttgccttcatcgaaggtcatcgagtcgctagagagtttccatgttgacatcatatttagtacctgtcggatatcagagttcgaaccagcgattaactgatctaccacattgactgggattttcatcttttccctggtaacgtgataatagagacagtttttattagttgagattgcaggtcggatatttcgtatcgcgcaagacaaacctgaaggcgatagacatgatgcgcgatcgaatctcctgaacagttgctctaagatcaaaaagaggtaaaccaaaagcatagagtcaggttcacggtgatcttttgccggtagtagctaacagtgacactataccttcggaagggcatattgaagcaagtagactgaagaggcttcatctttggatgatttctatcattacagatgagaatcatagggatctagagttgaaaatgaatcgcatgaccacgtaaggcttttgacctctcaagagattatcaaactgagaagtgatggacatgccttggtcttcttgatcaaagcattcatagcgcctactcctccacgatcaccagaagacataccatccacctcatcgaaaatcaaacaggtcttatgtgtgatctcaactcctgcggcagtggtcttttcctacagacgattataaaataggtaagcgggaaactcagctgcgcaacctatcatcacgtcgacaacttcagaaaatacttacacctccttgtttgagccagccatccatgctcgtgttgtcgatgttagttcccgactgataaatgaatgatacaaagatgatcagaagatacttgaaactttgaagaagttggaactcgacaagtgaaaacgacggacttcgatcagcttcttactccttgcgtcactagcgttgtattccagcggttcatatccgcaaaccttggcaacaagatgagcggcggtagtctttccaattccaggagggccagagatcaggacagctcggaaagtccccatagcgtctttgccgggcttcttgaatgcagacttataagaggtactcctgaaaacaaagaagagaatggaattcgacagagtgtgatttgttaccgtactgtgcgtttcaacacatcactgagtataagtcagaaccgttgagacttaccaagcatgaagccaagtttgaagcttttcaacattggacttattaccacaaatctgagataattgtgaaggagcatatttagtcgtccagagttgggacttgggatccggaggaatgattctagcacaacgataataacgaacaagataaacgatccgtctctttagcgtgagatcaagaagacaaagacacagagagaattatactcacttgggagcgctgttgctagctgcaggcttctgagcctctttgattaattgagccctctttttttgctcctctttctctgcggcttccatctcttgagccacctgcttgattttcttctcttcatcagccattttcttcttagtcttctcatctaattcaccagcgccacggctaccgatcagtcctatgaatccgtcctcatccagggtcttgacgttgagcttcttgattttttccaacttagaaggtccagcattttctccaagaacaacgtatgaggttttgccagaaggcgccgtagtgactttgctatattaaccgatcacacatgcagatcaaagacaaaacattcttcagcctcttgctctctcaagtaggaatataccttcaaacggaagctcacccgccatatcgtttggccaattcaaccgcctcttctcttgccaaactggataattcccctgtgaagacaaaagtcaaacctgccaggcagttgggttttccatcaggaatttcttttgacccaggtgcagccggcccggttgagctcgccatctttctagccatgaaagctttatagcttcgagttaggtatgcaaattaagactattagtgtaactgttctgctcaatagaggtgtgtcagttatttgtgacgtcaaaagctattctcacttatttgcctttgtgtctgacttctcgtctttctccttgagttcctccttgggttcgtctttagatgtaaccttcttcactgggggtttcttctcgacaacaggcgccttcttagccgatgatttctgggccggtttgatgtcttcttctgatgatttagagtcctttcgtaaagaagataagaatgacatcagctctacgccacgtggtatgtacctacttgctgttagacttaccttatcatcttcgacccttctcttgttactctttacggcagttgaggctgaaatcttagatccgttcggtttagtagcagaagcaacagcaggctttttttggactttaatctcgtcctcagagtcactagaaacaatctttctctttattggagtctttcgcgctgtcgtcttggttggctttggcgcttcctcgacttctgaatcagacgacaaagccttccgcaccgccctaggacgagcaactggcttagaagtcctggatatggctgctagcactggagggatcttttgggagctgttaagatgttttcaggttatatagcaagaaggactcagatcagctcacgttcaggagcgatctacgtatacaacgcaaaacgagcaaggagctatttagtacctatttggttgcttagaaggtttttcatcatccgagtcacctataggtcagacagcagtcaggcagttagacatacgaggctctgtattaattaatccagctgtagagatttgtgatagagttaaatcaatgaggaaagaagggctaaccgagttcaatgacaccgtcatcgtcgaccacggtggacgaggttttggctgccttgctgaatggattacccttagaggaagaggccatcttgatcactgagctggtatttgagctcgattgttcacttccaccctaccatcaaatatgcatgatgagcgacaaggaaggatgtcaatcatcgacatacatttttgaagagaggatgaggagaaagataatatgtgaaggcttacgaagaacgatcgaatatcagctcctgatttatcagttggcttcggtgttacctccttctttcgtgggacagaagttctcctagatctctcaatctccacatactcttcttccgagtctgacatgacaacgaaggacctatttcaaaagaaaaagaggataaagatgaggtataaatgagggtggttgatcgatgggagtacaaatcggacgatgacgcgtaatcaggcgtgttcgaagacgcgtgtccacgaacgcgtttgagtcatgtgataaagcggtgcgcgcgcgtcgccacaccgtgaccgcccagccgagcactcactcttcctcttcctctctcttgcctctctccatctttcttcatcttcttacagcacacacacacacaagcgttttaagctagctcgctctctctagatcaatcagaactatgtctgcccctccatcagaagcgtcagttttgttctttattgctctgtgtttctaaaattgctcatctacttacctgccctcgaatcatctcgctttttcctgactatccgatcttggttcatatgtttctttttctctctttcttttttcccctaaatagtcgacttcgagctgaagcacgtaaggccaagatccaagctagaggaggtgccggtttggcccgactggcaagcaccgcgagaggcgaagaaggagccaagttgtacgaaacgcgtaagctgaaagcttttcctaagaagcatcctcttatgttttcctattttcgcctcatgaaatggagagactgattaagccgcatgcccacctttttgcattaaccgacttaataatatctatggacctaacatcacgtcttcagctcctcctcctattcgacgaacgacctctgaaaaccaagtgtcctctctacctccatcatcctctcagcccagtactttctctcccactccctctcagtcccaacaagagtttttgtctcagatgttcggaggctttcctcccgcctttgatggatcctcgccctcctcgccctctcccgatgccgatccacttcaagcaatgctccagtctttgcagagtttttcatcaggctcaggatctccttttccaaatcctatgggcgactctgctggaggtctcttcccacccggattcgatccgagcgcagggactgaggggcagcaggatctgatgtactcaggggtcaaatcacgaatggatagggtgttcacgatcgctcacttcttgggtgtactggggctcgtagtgtttgtgctgggatggtgggaaccgacggttagagaaaggagagcgcgtactggattcgttggagaatgggatcgaggaaatttggcctggaacgacaagggcgcaggggttgagctggtcagtgattctctattttgactttgttttctgtttcgtcctcgctgcgtgttggaacggagaagaaagacagtctttggacatgtgaaagatcgatactgttcattgacacggcaatcaaacaccccacagccggtcttctgggctttcgcaactctgtccttgattctgcagacgacacgcgtcatgcttttccgagtaagtttctttcttgtcgtccttccttaattgcatcttacattgtccaaactcgcgctgacttgctgttctctcttcacaaccgactcgatatgatcttgctagtctcggccacctccttcaaagctcctctcgcttgcttctcctttcctcccgttcctcccagctcaactcaagggatatctttttactgcttcaagatacatctcgatggtcactcaatttggacaggatctatgcctgcttctgttctgtgtcgcgctcggaagatggatccgatccggacaagatctgactggaggaaacgaactcgttgtcgaatgattcggaacgagctagagcttgaagaagatgaaactatattttaatcttgtatttgaaagagaagccaagaagatggcaggatggttatgctgtaaattcttggaagttgcttttttttgcttttttttctcttgttcctttttccttctttctcaatattcgtccaacctcgacccgatctatatgaatgagggggaagcaggagatgggacgaaatataccactagagcagcagacaaatcttatactggtacttgacataatatttgagatttaatacctaatcgtcattccacttttagcttcactatgtcgtctcgaccgctcttcacgcggcaaaatatgcaccatccaacccagacagctcccaaccaaacagcgatcgctgtactgatctcgatagacgataaatgtgatgaacttccgacaggaagaaccatcggagccgtcaacggtctgtctgttttcgatgataagatcgaggaggaagttcgaaaagagtacaaggtctgattcattgatgaaaacaggtccggaggaaacgggcttggtagaccagaaactactgttaaggaaggatcaaggttgatgacaagagtagcatgaagattaggtattgccggtagaggaaagcgccatgatacttagtagaacaagaggagaagtgaacaagaagaacgaacctgctgatgacgaagatggagatagagggcattttaggcctacccatggccattcgatatcaaccgtccgctccgagcgctcttcttctaccctcttcggttctagatatctcccgtgtaacggcactcctacctgtatgttcctttctttgtttccctctgcaattttctccttctgctgaatcagattgatctctaagatgagccctgatccgtctctcgctcggtcggatagtctcgaaaggggtagttccagctcgatatctccaaagaattgaactgagtcgcccaggacgccatcggtatgaagctgatcgatttggtatggatcaatgatgacggacggtgggacatgatatataagtagaacggtacattcaaggaatgattggggtatgtcggcgttcgaatgaacggtgggaagtgaaaacgtggtgagtagagttgaatgaaaggactgttcaggaagaagagcgctcgtgtacactgggagatcaaacggcggagggacgtccgaattcagatccaaaggcaaggattgtcgaaactgatggatcggaaatctgttcttcctggccgacctctgccgttcaaggcgttccgattcaagctcttcccgagtgaggccttctccatccggactggccgtcagatcggccactataggtgaggatcctagacctcctcttgctcctccttctctctcaagctgtccgtgaggcctatgaatgggcaagctcatgttgctgatgagtagataggtactctaatgaaagctgagaacaaaagatcgttcgttgttgggaggatgattcaatcgcagggagtgttctcaatcacttgtttttttcccaaatactctcaatctccgcaaaactcaaaaaagctgtgtgatcgtatacgtccgaggcttatctcatcaatcgcagctgatttcaaacacccaaagccggaataacggcgttaactctcagtctgaagaggcgtgtaggacaaagacatggtttgcatgggatgaaatcaagagaggatagaagggaatagactgaacagaacaaaccaaagccaggaccggaagcgaatgcaagaatgattactcaaaatatagaagaggaaattaattaacaggaatagatgatataattaggaaaagaatgtatggaaaagacagtaaacaacgaatgactggaatgggaaaaaaagaatggaatatgcggagggacatgactacacccaagaaagcgttcaggagagaagaagagaaacaagaaaagacagaaggaaagtgaaagacatgttaccctggcggtatggtgtgatggtgcatgcaaagacctgtggatggatgtataatgagaggaaggttgagtgaacgtacaaataattagaacagaaacagagttatagacagatgaagttgatatgtggagcataatgtaaagtgcaggcatgggtgatctaatcaaagaagagatgagggagaagagggaaagacgagatagcatgctccgtgattgaccagaggagagagtggacagacattgaggtccgaggtcgaaggtcatctttcctgtcgagaggatcctggtgtcggccgaaggtttgctcgactggatctagatcccatatgaggctgaggctgaatgtgaatcggttgttggtacgctgcctgatgcggttgaatatattggggtgtcattaggggagaaaatccttggtgttggttaggaaatccaaactgagtgtagtgagtcgagaacggataaccctgaaccgaatacgccggttgagggtaatattgaggctggggcacatgatgaaggtggtgaggatggtagtaggttgttgggggagaagtcaagaccggtgagtaagctggttgatgagtgtagtgcgtgttgccggcaagcgaaggggttgaatacgaatgaaccatcattggggatgaagcgtaaggcggagggatctgtagggatagactagagtgatggccagacgatggacgactcggtgcggaggtcgacaaggcgacaggcggctgagctccaggtgagctgagagccgatttttgctgactacctcgaaccggctgattctctatcgaggacgaaagcggtgaaggtgtgatggcagcggtcgaatgccgtttgcttatcccgccactgttggttgagacaggagagggacgggcggaggaaagaattgatgaccgaggggacgacgacggtggggaacctgattggggtgaatgggacggcgtcgtcgaatttgatgtcgacggagatatctccaacgcgttttgtctggatctatccggatggatcgacagctcgaccggggcgaacaccctggaagatctgtctcctcgcctggctgccggctggttggtatccatagggctagcgctattctcacccaacgtccgtaagctctcgctcctggttgtccgagaggatgttgcgaccctggcactgagcgcgccccattcttcgtagttgccgttgttgcccttcttgctcccgagcttggcgagatctcttcgctctcgagcagcagcgacctcggctcggtacctttcctgtcgtctccgctcttcctcatcagcccgaagacgatctcgctcgagtgcctcccactctgcgtcttctctcgccctgatctctgcctggctgtccatccagggagcctcgccttgtctatctaaatcttttccgagatcctccttacatgatctatcgtcttccatcacgtcaacctgggcaaacctaactcgatcccgcgctctcgtcgattgtgagggcaccggcgtgagggcgatcgtggagtgtctccgttggatctcgctcagcggggtctcgtcctccttgtcatcgtcttccaatgcagactcggcgaattgagaacctactggtggcggaaacgatcgcctagtgaccaagttcattgagctcatcgaccgtctcggtttcgaaagcgccgatcgagggatagcaagctgctgctgctgctgctgcttttgtaaccccaaggacgacgatgataacgacgacttgagctttgaagcgtgcgggacgttgttcatcgtcggagagagaaactcgttgacaggctccgacgaggcgtttgccttgattggagacgacggcgtgctacttgatcttctaagcttgatccctggtaggaccgtttctctgactgttggaactcgatcaatgaccaccttgagcccatctgccggactaggatctgtcggagaccgtctgcctaccagtgagttgacgagcgagggtaacgtcgttccggatgtcgaatgtctcgtcccaggaacattaacttcgaacgaggccgaagactttttgataacctctcgagcgtaggcctccatgccctctgaaaactcgagctccatcacggcgagacctctggcaggaaggattggttcgacaatgatcctgtccggatcattagctgccgggacaagaacgatgcttctgacctcaagagtcggtcgagaaataaatgcaagaatgccagagccggcgagaggaagattagcccgggggacggccgaggtagctgcaaattcggctgttgagaccgaagcatccgatgtgggtgagattgaggcgatcagccgaccagacttgtcgcgctgcagggagaccggacgagcttgggacagtctgaaaatgggtttttaaaaaaggtaggaggtctacggtgaacaagctgactggctgaccgagagaataatgtcctttggaagcaagaaggaaaagaggagaaaggacgaaccgaatcaacgcctccatctcatccgcactgagacgcgcgtcagtctctaatcgatgcatcagtcctcttacaccaacctctgcggtaagcccgacgactctacgtctcggtgtggactgtgcagtgaccgggttggtactggcaggatatcttcttgtctcgccatccttgccagaggccgggttgagtcttgacatgaaaaacggatggggcgatggcggtcggagaagaagactgagtttttgggaagataatagatgaagcgactgaagaggcgttagcgtaggaggttgctgttgctgctgttgaatcgaagattgggacgatccaaaatcctgacggaccgggcaagattgggaaggagacgaagaaggaatgttgggaatcgaaggaagagagattggcggaaaggacggagagcctgtcggagagccaccgggggacggtgaatcagaaaggaaccgtcgaccggcttgacccatgaatgccggagaaggaaaaacaagctcgggaaggaccgaggacgaagacggcggcgggaactcagaggactgagaagcaccagtggcgcccgaggtttgcatgacgagacatccttcctgcaaagatgtctttccgccggatggtttacctttctcctttaccttctttgggccggcgctcgagccggagaaccaacctttaaacataccgaaccctgaggacgatctcctcagtgtctttagatctttgtccttccctgaaggcgacagaggctcttgcccgtttgtcaggtttggcgagatcgtcgttttgagctggacgatcgaagaagccggactagccaacgatggcgcggttgacgttgtcgaagtgatcgacgtgtccgacgagttggatgatcctgttgtactcgagagctttatagaacggaaccaatagaagaaaccgaaacgacgatagtcagtatggcggagatataaattgacgacggatacaccaacagacaatcccgagtgttagcacgagaagggtttagagttttgtcgcacgctatgcacgcaatcctctctgtgcacgcatgtgtacgagtgtttgcacacactcatacacgcacactttctttctctctttctttctctctctctatctcctcctccctctctctgtctctcctttttctcttagatttatctctcaacctatgtggaaccaagctgatatgaaacacagaagaatcggatgacgccgagaattagacaaacctctgttcgaccgctgtcgcatgatccgctcctctccgacgccggattggccaggccggatgcgttttgtttgagagtgaatcggccgtatctctcgccgtcttctaactgatggtcagtcgtccacctgatgtgtcctgtatccgttctgtccgtaggggacgttgatggactggtggactgaaggggaggataaagagtggccgagttggaaagcgaggtatgcgaatgaaactttgttgttgccgaagaggtctgaagatcaggcatgtgtaccgggatatacgagagagttgctgtcgagggcattcttgccagattatctctagaggaggagagtggacgccaaaggaaataggataggtggcgaaagtcaaataaggatgaccgatcggggtgtggtcagatcggttgagaggaacaggtggacgtaatgagttcgcttcttggcagacagaataggactcacaaacaaactccgaggtttgcgcgattcacccggcgtgttgtctctgctcgagaccagaagttgaacgagaagaggacagggaaagggggagaaatcaaggtctaacactagatctgtactaatgccggacgtcatgccagatgaaaatagacgatagggtagtggtggtggtggacgataagacggaaaaagaaagaatgatcaatggcttcattctgaagatttctgacagggccgccaagaacgtgttaaggttgagaggctcaagttgtgacgtacgatagccaaaaagaaagacagagacagagagcgagcgtcgggaatgacggagacgaaggaaagacgagaggcgcaacaggtgacaagacgggcaagggaccacaagagagagaaggaaagaggaagacaccctaatcggtcggcgttgaggagagaacgaagggaaaggctataggaatacacgcaaaccagagatcgcgatcggtttacgcgaacccgaggcaagaaagtggatagacaaaccggttagaaccccgaacgaactgacaagctaacggactgacggacgaacagatgaatgaatcgaacacgagcgaacgccaaagataaggacttacagccaaacggggacaacaagggtagcggaggtgatgatcggagagacacctagccgggtttgtcaccaagagtgtgggagtaatgcggcgtcgggcagacaggaggtcggaattcaagagtcggtgtctgggtcagggtcaggatacgagaagagaacgaggtgtctgttctatccaacacgaaagatgtatgtttttgatgttttttaaaaaacaaagaatccaggtcaaacttgtttggggtgtgtgtgtgtatgtgtgtgtgtgtgtgtgtgcaaacaggacggaacgatggtcgctcaggcacgaaacaactcacctgatttagctggtcgaataaagatgtaaagagaagaagaagaagaaacgaagattctctcgagacgagagcaggatcagatgggcccggtctttcttccttaactctggaccaccgataggtgtgtgtgagggcgaagggaaggtatgaaggagatgaaggacggggtgtgtgatgtcgcgaaattgtgcaggcacagagtttatgcgtgtgtacatctatcgatgcaagaaaccatccagattctagagtacacacacacacacacacacacacacacatatatatttacacatctcatgtctgctgatgatttgccttctcatccatacatgtcttcattcgttctctctctttactttgtctgtcgttgagattttcacatgtcgtgtttcagtacaggtcggtcaggtcagacccgcatcgatacctcgagcgcaagaagagtgtttgaactaaactacctagtcgatttgaactaggatgtacgttgggtatgttgattgcctacggtccctttctagctgtttctatcgctcgagacatacgtcctctgcttctttccttgctttgttcttccccttttcctttttcccccttgtctgtcaccatctttctccaactggatatgcgctcgtcgactgtatctaattggagaataagaaaagatcccacgtgcgagtctcagatgttgttgttttctttctttcttattttcgtttgaaagttacgcagcgtttctggcacactcacttgaaagaacgggatttgttcagggcatcccgtctttgcggtctttctcaagacctgctcaactcactggctcactcgcccgttctttggttttccgttcgatctgcttgaccaagttcgattcagacctagacagacggaacggtcgcttctctcctcgcgcttatctgacagatctgtctgttttgcccgatctgcccgatttgtccgatggtcggggaaagagatagatagattagggaagagcataaagaacccggggtggacacagatggacagacagacaaacaaggaaggagataaataagcaaaccatctgtttggtcagttctggcttgctgtcggctcgtttgtttctaacatccataaagactctatccttgcggtttcttcttcttttctttcatttcttttcagttcttgtctgactttctttctttgttctttttcggtgagacggcaggtcgaaggggaaggggggttggaagacatacaagaaaagaaaagaaaaaaggaagtcaaaagtgaaagccagacagaggcaagaaaaaaaaggcgagagaaatctttgtcaaaagccggcactgtttcccatgagaagacttgtagaacgcaagaaaacagaggaagaaaagcgcatctcaatttcaaaaagtcaaacagggaggggaaggattgagggagtgtagatg

SEQ ID NO: 413 - DNA, 3118 bp, Xanthophyllomyces dendrorhous
gggagggaaatatgggtcaatctatggacgtgttgatagcaagtgggcaagggagaagggaaaaagaatcaagacaagacaaacctggataccgtcctctcccaaaaactggtttccggcctggaagggaacttggatgacggctccgagcttggtcaactctttagcggtgttgttctcgatgtcggcgattccctcaaagtaggctgtgaggagaagaggagagggagacagagagagggaaagaaaggagagggagagagagataaggtgtgagagatgggagaaagagaagaggaaacggaagggggcgggaagagaaaagatgaagagagcataccgataagcatctttgtgatcctgagggtagacgaaggatacgcgaggcgacggataccaagaaaggccagaccgggtaaatcaaacacgtcagaccaggggtggcgggcaagagagaacgcgaaagaaggtggggctgagatacgaaccgtttccaagcggtgaatcgctcgatgagaagatctgaaggcttgaaatcagccaacgcggtgttcttcttgatctgtgggagggggacgaagaaggcgacgggattgtgtgaacacatagagagagagagagagaagagaccaaggccattcggtcagtgggtgtggataagagcggggttgatgacgagagaaggaaaagaggtataaaaaggctgataggagaaaacaggacggatcatgagaacgcctaggaaagaaagactgaccagagactgggatctgctgatggtactaccggccttgtgggatctcgagaccgaggtcattgtctgtgcgtctgaattgtcgtgttggtgatggctgtggtgttgcattgtgagtgtgtgtgtgtgtgtatgtgagtgtggagatggatggatggatggatggatggatggatgagcaagtgggtggatggaaaaggtctggggattgatgagggaagaaaagagaagagaagagagagggagagaagggggaaagaaaaaaagggcacaggcacgcactttaaagagagatctgctgcgctcggctgaaggcacaaaccgttgggctcggttgaaaccgatgacgtcgtgtgtttgttttttgtttgttttttcttctttggccgtccacctcgacgaacgcttcagacgatcgacgtcatcgccaaggggtgtgggtggatgggggtgcctgtgcgcagtcgggcgtgatcatgatcgtgatcgttcccgcgtcggtgtccgtggccgtgtggcgagagggttgaactattacgccttggtgcccggattgtgtttctgtttcgagtgtttgatcgcgatctctgctgcctttttggggggggattctatttctgtgtctggcttgggtgcctgtggctagcgtgtgttcctgagtgctgcctaacgagtgtgcctaacgtgtgtgcctgagggatgatccttctcttccctctgctctgtgtgtgtgtgtctatctctctctatagtctctccagcctatctctctctcctctcctctcctctcccgtgcgcagtctttccctagtctctttgatctcaatctctctctttctctccctctctcttataatctgtgtagtgtttggagtctatatatcgactgtgagtgtgagtgtgtgcctgtgtgtggtgcctgtgagtgtgtgcctgtgtgtggtgcctgtgtgtggtgcctgtgtgtggtgcctgtgtgtggtgcctgtgtgtggtgcctgtgtgtggtgcctgtgtgtggtgcctgtgtgttctcttctctctctctctctctctctcttctctctactgtatgaactgtctctgtagtctgtagtctcttctctagtctcttctctagtctcttctctagtctcttctctagtctcttctctagtctacagtcctctcctctcttctctctctctattccctagtgcctaatcttctctctactcactctgctctctccctagcgttcattctctctctctctcgctctcaatctcactctcacacactataatagcaaatctatggttctttgatatacatactcacactcacactcacactcactcacactcacactcactcacactcactcacactcactcactttggcttcttccctcgaccgctcccaccatcgacccgctcaggctgctttctctttcttccctcactccccccgtcggacagacccgaaccatgcaccgcccggacggcctcagcacggacgctctcctttacgttccccatccagtagattcgttcccgttccccgcccacgatctcgacctcgatcggccccgacccagacaatggaggcaccgtcgttgcactcggtaaagctagaccatcagccaggtttaaactcgtggaaagcggcagatgaaagaccggtcggctagagagaaagcttgttatccgctcggataccgatggatgggcaactcgaatatgacactgttacagcgatagcaaaaggtgagtttagttgttgttgtttttttcttcttcttttgtttccatttcttttgttctgaaacgggggcctcgttacgacgacgacgacaaagaaagaaacaaaagaaatcgaccacgaaccgaatccccgcctttgatccaatcaacatacccaacctcatccttacccttaccctttgccatcccatccccctcctcttccccttgcttactggactctctcagaatggccccaaacagatccttgatcgtcgtctttgacgtatccggatccaatcgtctgacaaacaacaggcagccttctggataatccaaccgagtctctagccctcgctccggcgctttctcgccaacaccaccaccaccaccaccaccggaatcaggatccccagacgccgactcatattcgacggcctggtctgtgccaacgtccttccgtgctcttctctccatgctctccgcgtgctttctggtatcaaggtatgccctatattccttctccaatcggttgtactcggttctattatgccatcacagagatgtagaacccccccaaatatacacaaacacgcgccgtcaacattggcaagttaaatcacacacacacacacacac

SEQ ID NO: 414 - DNA, 2524 bp, Xanthophyllomyces dendrorhous
gatgagggggagggcgatggagttttgtgtttttttatcgggaggaggaagcagaagccatggccttctggacggctcgcttgatgtgcaggtgagctcgtcggagctcatcagagctggtatcctcaatctcgagcttctccaaagccttggcaagctcagcctcgacggcggacttagctcccctcttcatcttgagcgaaagctcagggccagagatggtagactcaacagagtgaatgtaagcctccaaatcggactggaaagtgttgataagaaagaaagaccaagtcagacaacgctaagaaaaacgagtgaaggaatcattcggagcatagcaaaaagcttaccttggcctcgtgtcgggcctggaagtccttgtcggcggccttgaactgctcggcatccttgatcatctgatcgatctcggcggaagaaagtcggccgacggagttgttgatcgagatctgggcgtttcggccggaagctcggtcaagagcagagaccttcaacaaaccgttggcgtcgatctcaaaggtgcagacgagctcggcctgtcctcggggcatgggggcaatgccggaaagctcgaactctcccaacaatcggttgtccttgcactgggttcgctctccctcgtagacggggaaggtcacctgggtctggttatcctcaacggtggtgaaagttcgggacttgttggtggggataggagtgtttcggggaacgacgactccgaagatgtcaccctgcatggcgactccgagggagagaggagcgacatcgaggagcaacaagtcggcggtcttgtcagaggtctgaccggtgagcacggcggcctggacggcggctccgtaggcgacggcctcatcggggttgatggacttgttgagctgtcgtccaccgaagaactcggagacgagggactgaaccttagggattcgggtagatcctccaacaaggacaatgtcgtcaaccttgtctcgggccatcttggcgtccttgaggaccttgtcgacagggtcgatggtggacttgaaggaagcggagttctaaaagaggggagagtaaaggaaaaaaaatgacggcaagatgaacaaattgtaccccaagaggactgcaggacaaaaaccaaagaaaacaacatacgatctcctcgaatcgggctcgggtgatgttggcggagaaatcggttccctggaagagggagtcgacctcgacggtggtctgggtgacggaagaaagagttcgcttagctcgctcacaggcggatcggagtcgtcggatagctcgggggtcctcagagatatcgagcttgtgctttcgcttgaactcggcctggaagtgctccaaaagggtgttgtcgaagtcctctcctcccaagtgggtgtctccagcggtggccttgacggcaaagacaccaccggtgatggagagaagggagacatcgaaggttcctcctccgagatcgaagatgaggacgttcttctcctccttggtcttctggtcaagaccgtaggcgatggcggcagcggtgggctcgttgatgattcggaggacgtcaagtccggcgatggctccggcgtccttggtggcaagtcgctgggagtcgttgaagtaggcggggacgctgaataggcagacaaagtgagaacaacgtcagcgagcgtcaaagttgggaggcaaaagcgaaaagaacgaacgtgacgacggccttcttgacggtcttgccaagcttggcctcggcaatctccttcatcttgatgaggaccatggaagagatctcctggggggagaaagtcttggtctcaccgaggtactgggcctggatgaaaggagatccgtccttgtcaatgacggtgaaaggccagtgcttcatgtccttcttgacgtcagggtcgtcgaatcttcgtccgataagtcgctataaagagttagggagaaataaccagagggatgagacgatcgaaaaaatttatcacaaggtttttcagattatttgaaagtctacaaaccttagcgtcgaaaacggtgttggtggggttcatggccgactggttcttggcggcgtctccgatcaatcgctcagcatcggcgaaagcgacgtaggaaggggtggttcggtttccctggtcgttggctaagaagagaagaagcaaggagaaagaaggggtcaaacttggtgagttgattggatgtggtgtgaagggcaggagcaagatagattactgaccgatgatctcgactcggtcgttctgccagactccgacacaggagtaggtggtaccgagatcgataccgctgtaggatagaatgggtttactagagtcagacacagctgcaatttttttccttgtctattcgatctttgattcttcaatttttccctatgccgggaaaggggaagaaaaaaagtactccatccgtcttcttcgccaccgtagtcttggacatagttttatgttgaaccaacttacatggcaccttcgtagacatcctcagcagacatgatgaccttttaaag

SEQ ID NO: 415 - DNA, 27762 bp, Xanthophyllomyces dendrorhous
  misc_feature (24582)..(24591): n is a, c, g, or t
aagaagaaaaaaaaagcaaaaaaaaaagatcaaaaaaaaaagttgcacacccgggggggcggtctgtgcgtacggagtttgaatgtaacgcactttgccctggttagggttatttcacgtataggctgcctagagcgcgtacagaacctacacaggtcctggagagaacgatgtatgctcatgaggggtgtgtgtatatgagttggagggaagacacgtagagttttggcaagtagaacttgaggttaaaacgtatgatactttccggtctaaaaacgtcactcgtagactggcagatgttttcgaggggaggagtgaacggagggaaagagagcggactgggtgttttgaggacaaacaattgcttggaggatgtgcgagagtgtgaaggtgtgaatgcgtgtaggtacgtaggtatataggtgtgtacatatgtaggtatgtagatgtgtacgtgtgcgtgtgaacaagagaggtagacggaaagcaaagttgaagaggacgatggagtgggcatatgagtagggattcaatcagacagacataccgatctcatctgaaccaaatgaatgagttcaagatgtgccatgtgtatctctgacctatacatgtctgtctctccatcagtatgcacctcattctccatctgcgtccacctcatcctccatctctctgtgcgcctctcactctcttcaatcggtctggggatgattggtccgggagagacggacactgccatttaaccctaacagatgccttagtctatcttcggccatctccattagcccatcaagagaaaaaaaagggaaacaagaaacaagaaagaggaaatgaaagagatgaagaattcatactatcaatcacccagactcacttcttgaacatccttctgttttccgtgctcgttatcatcctaagtcgttcctgagaatgtccaactttatcactcacggtaagaaaatcgttgccatcggccggtatgtctcccttttttgtctctcgaggcgcaagagaaaaagaaatagacagaatagaaaaggaaagaatactgaacgagagaatatttcacacgaccgacatatcagaaactacaaggctcacgccttggagctcaagaatgcgatcccaaaggagcctttctttttcctcaagccgacgtcgtcttatatcacacacggcgggactgtcgagatccccaaggggaccgaggttcatcacgaaggtaggaagaaaccaattctctctgtcgtttcggagactagatcgcgtcgttatcgattttgttgacgtggaacgagatggatttctctttgtttcttcccaaatgtacagtcgagctaggggtggtgatcgggacagggggccgagatatctctttgacggacgcgatgaagcacgtcgccgggtacagtaaggtcgtttgtataaacctcgagagcatctgccctgttcgatacatccgtcctgaccagatctctatcgggttgtctcagctctggccatcgacatgaccgctcgaaacattcaggatcatgtgaaggcaaagggactcccgtggagtaccgccaaggggtttgacagtcagtagcacgtttcgctttagttcgctgaggtttccagagcctggctggcgttgttactgaggcaaaaaatgtatctggatacactgggacttcaagcgttcaaccctatctctgggtttattccaaaggatttgatcgagaaccctcacgacttgaaactctcgctatctgttcgtcgcgtctctcggttttgcctttgcctttgcctctgcctctgcctctgcctctgcctctgccgttatacttcctttagaagtgtgtgcgtgtaggcaaagaagtgagtgagaacaagccgtgccggtgcttactcttcgcgtttgtctatatgtctgtagatcaacggacagacaaagcaggatgggacgacgtcggacatgatgttccagatcccaaggttgatcgagcacgtcagcagtgtgatgactcttgagaaaggagatcttatcttgaccggtctgtcctttgctctgatatggtgttgaccggatggctgaatgctcactcgaacgctgttgtttctctccctgtctctctggcttcttttctacacaggcactccttccggcgttggaccgatcaaggcttccgacaagatcagctgtgtgatgaaggactctgcgggcaaggagattgcccagctcgaggtgaacgtcaaggaccgggatggtggttacgcgttttcttcataggttgtatatgctcgaggcctgggtggtgatggtgatgagaatgacaatggcaatagcaacggcaatgacatgtgacgagacgtctggtgtatatgtgtgtgctagtcacgacgagaacaaagaacacaggcgagcaacgcaagcgccagagcgagagcagcagcagcagcagcatcacctccaccaacacaggcaacagcaagaacacaaacagataaccgagagttgccgtgggagagtacagaagagatcgaaacgaactgcccgggagatgaccggggaaacgtggggggagcgagtgtgggtgtccgtaaagttccgatggcgattccaacagagagcgaactacgatccagatcacaatccctaatacactttcccaataaaaactcctaattgagcccatcccgcgcttccccggctttctccatcttccctcggcctctgcactctgggtatataacacctgtgtgatctcctttcatcccgcttcctctttcgaccttcccagagacttgcctataaggatcagatcttctctctctctcttgttctcccatctccatctggtctctttcctttgtttatcaacatctatactcacatacacacacacagttcaccatgtctgaacaagccgagatcgcacctacctttcccgtagccagtgagtgtgattgtttcttgactcgcttctttttttttcccgctttctcccccaagaaatacacaacacacaagatcacacgcttgatcgtccgatacatcagctgatgcgctccctccattctttcttcttcttcaaactctccgtcattccgctatgcaccgtggaacgaaacactaacctcactggcacatcatccataatacaatcttctgatacatcaaccaaaaaaaaaacacgcctttttaaaattctaaattgccttctctaacccaaacaaaaaaaatcatccaatccgaaaccttcgaatacctatgggatccttcaacctctcttcctcgcgcaactagagcgtgtgtccggtacccatcctgatcatcctgttcctcacgtcggacctactctgcaacactatcatgattttcacgcacagaccgttggtggtaagcagggctcggacgagtggtggaggaaggttagtctcctttcttccccaaattgatagcatattccggttgatgcttacatccttcttctccttttttcttcttcctttttccttccttgtttttctttcttcttcttctttgcattccctctcttcgcctctccacgctcttctcgttatttccttcatggtctcctctcatctcgatcaaactttaaatccccatgtcgccgagattagatggccaaggatactctctactggcaccgaccgttcgagaccgtccggtccggctcgttcgagcacggcgatctccagtggtttgcagagggtggattgaacgcttcctacaactgtgtcgaccgatgggctttcaagaaccccgaaaaggtctgtccggctgttttgtctggtttcgtacgctcctgggtctgatgccttgttcgccattgcgcgtccctctcgtcttccagaccgctatcctatacgaagccgacgagcccggacagcacgtcgagatctcctacggagagcttctcagagaggtctcccgagtcgccaacgtcctcaagtcttggggcgtcaagaagggagataccgtgagtcctgttgtcttcttcttcttcttcttcttgctttcgggctttcttcagaactctgcctcacctcctcccaattcatcttacaggtctcgatctacctcccgatgacctggcaagcggctgccgccttcctcgcctgtgctcgtattggtgccgtccactctgtcgtctttgccggattctcggcagaaagtctccgagacaggtgcaatgattgcgagtgcaaggtcgtcatcacttctgatgaaggcaaacgaggaggaaagacgattgccacaaaggccatcgttgactctgccctcaaacagtgcccgttggtcgaacacgtcttggtcctcaagcgaacaggaggaaagatcgcatggactgagggcagagatgcctggtggcacgaggagaccgcaaaggttccttccgtctgcccggtcgaggtcatgaacgccgaggaccccctgtttatcctatacgtcagtctttagctctctcctttcctctacttgcctccgttcgacgcgttcccggttaatagcaattgctcatttactgaactcgcttaccgctttccttacaaatgctctccttctttcctctacagacgtcaggttcaaccggaaagcccaagggcgtggttcataccaccggtggttacttgctaggtgctgctttgactgtgaaatacgtctttgatgtccaccccgacgacaaggttcgtctccaagcttttctctttctcctaactctctccctatgtggccaggccaggccagacgcgtctttcggtttgtgaaccccttactgatcgtcatttctcacccatcctgtttttggttcacagttcgcatgcatggctgacgtgggatggatcactggtcatacttacatcatctacggtcctctactcaagtacgtctctcgcaccttgtatttccatgcaatcttctccctctccatcttacgtacaaatctgactttggtttccccccttgtttcttgtcacccatcagcggcgtcaccaccaccatcttcgagtccaccccggtgtacccgactccttcccggtactgggactgtgtcgacaagcacaagatcactcacatctacactgcgcccaccgcgattcgactgctccgacggctaggagaggattacgtcaagcaccacgacctgtcttccctcagggtcatcggttccgtcggtgagcccatcaacccggaggcctggcactggtacaacgaccacgtcggtcgaggacagtgtgccgtcgtggacacttactggcagacagagaccggttcgatcgtcatcactcctatacccggtgcggttccgaccaagcccggatcagccacgttccccttctggggaatcgagccaaagatcctcgatcctaccaccggtgccatcctcgagggcaacgacgtcgaaggtgtcctctgcatcggtgctccctggcctagtatcgcccgaacggtctacaaggatcacgccaggttcttggagacttacctcaagccctaccccggttactacttcaccggtgacggtgccggccgggatcacgatggttacatctggatcaaaggacgagtcgatggtgagtcctttcttgtgatttacaaacaacaacaacaacaacaacaacaacaaacacaccacgccttgtatcctctccgttgacccggagttctcttttcataccacagatgtcatcaacgtctccggtcaccgactctcgaccgccgagatcgagtcggccttgatcgtccacgccggtgtggccgagaccgccgttgtgggaacggctgacgaattgaccggacaggccgtctacgcattcgtctgcatgaagcctgaggtaagaaccatcgctccaggttctcttccgtcggatcttccatgctgaccgatctcatctccgacgcaactctttacgtctcttgtttgttcagtttgacttcaaggctcacaccgaggccgacctcctcaaagaattgacgttgcaggtccgaaaggttatcggtccgttcgccgccccgaagggaatcttcctcgtcccggatcttcccaagacccgatccggaaagatcatgcgacgtgagttctccttccccgtcttgtcttctcgacgagataatccttagcagaggatttatataaatttcctcgaaactggttattcatcacatttgtcatcctctctattataatcaggaatcctacgaaagatcgtcgccggtgaggccgacggcctcggagatctctcgaccttggctgacccttccgtcgtggagtccagtaagtctcttcgaaccgtccgtcaaaggtatctgacaaaaggtctcactcttgaaatgatttttcttcaacctactctccctttttttagtcatctccaaggttggaccccgataaaagacaacatatttctgttgaacgcctttccttccgttggggtttccttacattcttcgttgccatgtctgctctctcctcgccctcctttgggaaatatctctcgatgtatcactagtgctcgacccatcttttcgctttttttctctcctctgtttgttctcctctccgctttttgggttttgttctctccttcagctcgaggatgttggctttcgttgcttcatcttgatttcattccttcacccttctcctacccgttgttcatatggatgtaaagttgatatcgatgacccgcaaccgataaaatcctcttctcgtgttcatgccaaagacaaaaaaaggagaaacaaagcatagcactcttaggcaatgatagataaggaagaaaaaaccccttcattctatcgacgacctctccttcttctgtctcatcgcctcgtccttgaactctttccgcctgagagcgtcgaggactctgatgatcctactggtctccggttcgacagcgctctcgtccctcctcctcgcgatctcgtcctcgaacgtgagcttatcttgatcggcccggtcgatgaatttcctcaggacgttcatcgggatgggcacccggtcgatccctcggatcccaagcccgacttcgtcctttgtgcgaacgctgtcgacgacgtctttgctctcgatcccgtcggacgcacccaacggctcgcccagaccctcgcccctccatcctctggagtagagcaggtcatagatatgactgtccgtcgagcggatccggttgatgcgggagttgatcagatcgggatacgactgggatgagtagaacgcgtgcggggcggacagacgggcccatgactcgggcgtcagcaggtggaacgagtcggtcggctcttggatcgattccctgcctggttctgttggcgaggacggatcagaccgaggagggagcgagaggtgggcgaggatccattcgcagactttatgagctgggtaaggcgtttccctttcgtaatccggtagagttctgaatatagtaatcgagaaccaaatgataagagagcaaacccgcccgatgaccacgagtcaaggggagagcgtttctccagtaagaacaaggagctacaaatagcgacaaacataaaggagaagaagagcaaggaaagaaaacctacgagaccatgtttcctatatcgcccaagtcttttccctcctggaaccactcccaacaccaaccattcctcctcctcgcgaacgacgtgtcctccaacgtgttcaacctctttgttctttcttccttttccttctctttcagataatccctcacctcgacctcctgtcctctcagccgttccttcctgatggctttcgccgactttctctgtttccgttccggcccgacggattctctcgtcggatcgacagcgaactgaacggcctttggcttcttgagcacacgctcgtaagactcaatcttagacggtgggagaccgagcgctcggtagtctctttcggcatgtctcgttctcgaccaggatgctttcctgggtttcttcccggtaggtgtggcttcaccaaccgaagaagacgacgaggacgaggatgagcaaggggtagaatataaacgaatgacctgagaacgccgaatgagagatgtttgagatgtgctcgccaaacgggagcacagcggagagattcgtccgagactcattggctttttgacctcaaggtttgctctttgcttgtggagggaagtgtgagttgaaccaaatgggtttccgaaatgatgtataggtgagaggtcgcgaggtgaagagcatagcatatgtggcggcattgcacgtggcaattacccaacacgaacacataatacaagtttatacaacgattttacaagtacaaccggacacaataccaaaatacagcagacctcgagaaaagaaaagaactaaacgacgtatcggtagcctggaagaagagaagaaaggacaatcaacagtcagcaaggaatactctcggccttgaaacatgaaacgaaagaaaccctctggaagcttaccaatggtcttgtcataaaggacagtagtgtcgagagtgactgcctttgcaggaggcccaccctcagcttcgtctcgctttgcattctctctgtggtagtaggctgtcatgaagagagagagaatgacggcgagaccactcatggccaagttgcaagaaaatcccttggtccactttggtccgtccttggagacaaagaggaaggacgcggcgattgccaagcactgtccgacagtgttgagcattccgagagagaccgctcgagcactctcagagtacctcacgttgttggcaacccaactcatgatcaaaggaatagctccgtaggatccaatgacgaccaagaaggtggcaaagtatcggaccttctggttcttgtgcacgatcaatagaatgagccagcctgtgagttaatagagagttaaaatatgcacagaacaagagactccctttcagtacttgtttcgagacacagacacggagggagaagaaacgaggaacgtaccgacactagcaagagcaaacacaagagagacgtaaagtcctcgcctcttctgcctatcactaaagtagcagacggtaagagtaaagaccaaggcaacggcgtaaggagggacggtgtagagctgagcttctgagttggtgtatcccatggtcttgataatcgtgggaaggaaaccgctgacagatccgagaccaaagttcatgcactagaagtgaaaacacagatcaatattcattatcaacagaaggattccaagctagttccacatagtgaattggagaacttcgcttactgaataggtgatagaaatcacgtaggttttccaatcggtcaatgcatacttgatagcgacccaatcgatgcccttctttttctcgaccaaatttaatcgatccactgaagagatgaagaagtagagtcgatcgatcagtcccaagccacatctgaagaaggagaaacaaagaagtacatacttcgaaggaactggacggatctctccttctcgttaagatatcgagaagtttctggtcgggaggggaggaagaagaggacgaagagaccgaggacaaaagatgggactccctcgatgaggaagagaattctgaaagtagcgattgacgacttgatatgagaaacaccctaataaaagaagattcaattacaaaatactcaagtcagcaacgttgagaagatcctaacggttcaccagatcagaagatacgtacgtaggcgatcaatccaccgaatgcaccagccaacactccgcatccgatgaagatagagagccgcttagcctgtgagtattgatgacagttaggatgttgtcagtacgatgagtgccgaggcatcggagctgaaacagagaagatgctcacgatctcattgggcgtgtaccaaagggagtagtgaaatgcgacggcttgtccgaacctgagattcatagtggatcgaggatgaatatgaagaagcttcgagggggtgaacaaggaagaaatatcactcacatggactctccgagaccgatgaacaatcggcagacaatcatggaagcaaagccttgaacaccagccatacaactcgcggcaacagcccagattaagcaaccggtagcgatggtgagcgcgggcgaggtcgccttcgcgaggagggttccaggaatagaaaatatgatctatgcagacaaagtgtataaccctgggtaaattcgataggcccattgccgcggtcaagtgtaaagaacaaggcaacactcacataggtgatgaagaatgacataaggacgatcgagtatttggtatcatcgtcatccaatagggtctgtttttccaaaagagatgatgagagcgcaaatgaaagaattagtcgagatcacgggagacaccacaggcgctggaagtaaatacacatacaaacagcccttgaagtttggcatttccgatgtttcctctgtcgaggtaaccagagagctgaaagaggatgcataaaggtgaccgagtcagtacgttgtctttgctgtggagcagggcctgacaagtgacaaggtacacatgtcaccggactcacatagagaagcgcggtcaatggaatgatgaccctgtccaacttccggacaagcttccgctctactgctttctcctcctcagtcagttcgatgacaggcgcggtagtgaaggcctcctcgatatggttggtccgagctttttcgtcgtcgaaactgtcgtctcgaatctgagcagcttctttactcatgttggttgtgatggcgagtagttcttttggtatatatcctctgatgaagggatgtgtgcggggcacctatgatcgaccgaacgcagaggttgaaagatgggatgaagggagacaaagaaaattcgagacaccctcaagatggacgaacaagaacgaagcttttataaattcgcgacggccacactcgcccaaagggccgagaagatccagatgaaatacgtgtttgtacgtacgggacttttcttcttttttgggaagaactcagggaccgatgaacgcgaggctgaaggtggtgagggagcagagtcaggggtctcgggcgccgatgccgacacaggcacaggcacacgtacacgcccacaggcacattttcctgttccttcatttttggagaggagcatgcaacagttccgaggaaaaagccaggttctctagggtaatggaactcatcattcggcccgatcagccggtttaagccgtttgaagactgtcctccatcgaagcaagtctgattttcgagccgatcggtcattttaaggacatgatagggaattctcgtgtctaaatatagaacgagctttagtactgttcctcggtcaactcctaaatggaggctgagcctgggaaaaccgttcatagaataagagaagccgctgggacggataatgtacatatcttgagtaggtcaggtgcatgagagaaaattggtatggctctatcaggatagatcttacgcccgacagacgaccgatagacacggttcagcacaatccaacgcggtgcatatgcttaccggtcaatagagtgtagagagaaaagggtgagaaatcaacagggtagattgtatggcttacagacttgaagccgaattgtcgatccccgaggagaaatgtgcctctggagagtgaagacggatttatgtgacatctcaacaggacagcaggtcgaacgtcaaaccgaggcgcaatccgcgcggcagaccaggaaggtttccaccagacaggcaaggaggcagaccacgtttcgttccttggttgcgtggccctcgttggggcatgaatccgcgagggaagggaattgaacagaaatatcggttagaatgtgggaagagtcttcgtggaaatgttcatagctctggcttagtcaagcgtcagcatcggccgctgggttggcaacatagaaagcggactagacaacagtcactatgttagctagcacaaccaggcctatactctcacaatctgacaaacgagaactagcggtcaatagatttctcaatctgtttgcctcttttcctgttcccttctgctgtcttttctgataaggacagaagaaaccaagacgtactcaggccatttcatcatttttctctttctactctgtaaagattccacaataacgactcacactctccggtgtcaggatcccaacatcactcatcacaagcccaatgtactctctcggtgtgtaatcatacttcggctggtgatccttcatcgcctggctcatcccttccagcaacacttgctcaatctgcctctcgtccttgtccagtcctgagcttgtctcctcagcactctcccccatgttagacgacggcggcgacaacaacggagtggtcaatccaagactctttttgaaacataacggcagagtcgagctcgtctttgacgacgatccagagccggacgaactgaaaggaaggagcgggagatcctgttgagagagaggaaagagtcggagaaacttgtaggactctgccaggcagtagaacggcttgttcaacgcccgggatagcagtgccatttggtacgttccaacctagaagaatgcgattaaacacaagagcaagacttgttaggggagtggactgtagctacgcagcaaagaatagaaaaaagaacctactccggcgaccaaccctccagactcaaccacaacctcacttccaaccaacacaagatccactcgatccatcacgtaaccaacggcagagtccaacacgaccgtacacggaattcccaacgccgtcaacgcggcgtgtgtctttagcctaaccatatttgtatattcgggtaccagaagagagcagataatgtcagaacacaaagagctatattccttattggacttgtctgtgaagaacagagaaaaacacgtctaccaaccctccacagttcggacgggcctcagtcacgtaaacgttcacccgcttgttttgctccattgccttcttcagagtcagaaggacaactctggagaacgagtgcgtcagaatctaatgaacgtgcaacaaaagagacacactcgccacagagtgagtaccgtagccaacagttgacaaagagcaagaaagatgagaacgcgatcgagcaagactcactgtgcagtcatctttcaagaaaccttgaacctcccgggcaatcttctcaatacattccgaagcgccattcttggcgaatctatatccagaggagaaaagagagtaaagtaagcttctgaaccaaatccttaccacctcaacgaaataaagagtcaactcactttcgaccttcctcaacaatcccagctctcatttcgtctaatgtagcacccctgcctgccgtcccgacagaatccctcacccatcgctcaaacaatcggactcctgcctgggttccgtatgtcgccaagggagactcgaggatgagcgtcgaatttcgatgaagcgtcatcaacagatgagacgtagtggacgctatgaaacaaaaagaggcactgtcagtccgatacctgctgctcttatccttccaaacaggagaatatcagactaacctgactgagaatcaatcatctcggtcaatgcagagatagctgctaacggaggagtgatctgtcatatgtcgatcaggggacggcagaatagtgtggtcagagttgggctcagttgtgagagggcttcatggcgtataggagaacgtacatcttcttcgatagcctgagcgtacaactgggcgacatctcgaggagctggagactgggatccgttaggcatttgatagatttgccgacagggtgtctaatatatatgggtagagtttcgtttgattgttggctatcgatcgtccgttagaatattggcggatgaagaggaagaaggagaaggcgaatgaggagaaagagaagaaaaagactcgagaaaattgattagaaaagtacaatagggattcttccggagagaatacaaaattcctctaatcagtgaaatcctcccggcgggccgaaactcacctagaccgacgagaccaccatcaccatctcccttagactcgttcatcaacacgcttcaatctcatccatccataaataaacaacgcaagcacaatgtctgaaaacttgtaagctttgtttgatcgatctttcatcatcgtatctagctttagtctcacatctgtccccttccagagcaatctttctggaccgggcaaaggtaatgctccgtgacccattctcctgacttaaacgccatacgaaccctaacagacatctcattctcacaacacacatatacacacctagttctatgctacagactttgcgacttcgctatgctctgtactatgcaagccatcctcagaactcaagatcaatggtcggacgtttcagatcgtcaaactcctcggtgaaggcggcttctcattcgtgtatctcgctcacgaccaatcgacaggccggacgtttgctctgaaaaagatcagatgtccgagtggggatgtcgtcaagattgccttggccgagattgaagcttacaaacgattcagaagcaacaacataattactggttcgtcctaactttgagttcgatataaacagacgggaaagcaccgactggggctggaacgagggaaactgacggtctccttcattgatgtttccgttggttcgtatcatttgttatcttatgttcttaacatattcagtgcttgactcggctgtcgtccaagatgaaagtggagagggtaaaatcatctgggtctttctcccatactatgaggtttgttagctttttactctgctctcattcttggggtgtaaagaagattaggccatagtctaatgaggtactgaacgcttggcgtggcatcattctttcattcccttttttctctatcagcgaggcaacctacaagatatgatctctcgttctcttctcacaaaccccccgactcatccaccagaacgccagcttctgagtctcttctacggaacctgtctcgccgttcaatccatgcaccactacaagccttcccatgcgcatgccccaaccgcgtctggctcggacggttcggtctatccacctgccgctaagttcgtgtccgactcacaggctgagctagagttcgacgaggaaggagggatgttgctcgaaggacgggggggaaaggacgatatcgtgtttgatttgggcgatgaagaggaagaacaggatctcattcagaaggtcgacctgaagggaaaaggcagagaggtagttgttgaggagaatgatgcggaagatgatgaagaggttccatatgcgcatagagatatcaagcgtgagtaattataaaacaagaaccagaaagcaagaatagatttggatgtaccatccaactgacatgatgttcccctaactatctactctatatagctgcgtaagtcatctttctccgtgcttgattacgatgtactctatgatcgcttatgtgtttcttcctctggtatctttgtatatgaaacctgtgttggatgatgtagtaacatcatgatagctgacgatggcaagacgcccatcttgatggacctaggatcgtgtgttaaagcacgaattcaccttcgaaccaggcaggaagcattgattcaacaggtcggttgaccgtatttttagctttcagacatgctttttcctgttttagctcgaacgagtagacctatgatcagtctgtcttatgcaaactgcccttctgtgcgaacgatcatacgaacaggatgttgctgctgaacactcatccatgccttacagggcaccagaactgtttgagccgaagacgggtcagactctggatgaaaaggtcgatatatgggtaagttttgaacgcatgttatctccaatatcgtaagaggggagtggatgattacatcgcttacctttgcccttctcattgtgtttgtaatctcttctcaaccttccagagtttgggttgcactctgtttgcactagcctatgtatgtcatttttctctatctcccgtttctataacaatatcatcctaggaacggtgcctgactagatattccatcatttgtttatttcagaattattctccctttgaggatcctgctcaggctggagggtcgatttcaatggctgttgcttcgggctcttatcgacacccgagggactcgccctactctcaggaattcaaagatttgatagactcgatgctggttgtcaaggtcgagaagcgagcaagaatcgatcaggtttgtttccttctgttcagctggccatcttatcagcccatcgtcctattcttctcttgttgattcagttccggctgcttttattctcttcacctttgtgtaggttctggagaggacaaaacgactattggaagaggcccaatagttggctggcatatttgttcttgattgtgttctggccgccatgcctctcttccttcctttcatgaaagaagagatgttctcttgtattgccagaggtatatctgtctcagtttgcataaacttccactcttgaatgtatgggtctcgacaacaaagatgtacgtgtacgacatgaagaaggagagcaggaaacgcgtccggatgcgcctatgaaagagccacgggcttagaataaatccgaagaaaatcttccatgcgcacaacccatcagcaagttctcagatcttacacaccctctttcctttcctaccatcctgtatccttatagtaagagattcggtatcgggtttcttctccttattaagacttaggcgttagttttatcgtctgtttgaatgaaagcaaacctactaaatttattccttagactcaccgtgactcaccaaacgacgcgatgtaggtttctacttcaacaatatcttagaaccctaactcaaccgataacacccgctctactttggtcaccctcctctctattcgaacaagttccctcccttcaccttctgtctccctctcgcctctatctcggacttgacgatgtcaaactactctcggtccggaagctctatctgtggacatccttcacccgaagtttcgttctcaggaatgcctacccgattagatccaaccccaaataagcgaaagcgaacaacaacgaatgagaccgatagaaacgtaacactatctgggcctatggaacaatccgatccagaggcagaagaagaggaggaagaagaagaagaagagatggaggaggatatggaggatgatgtgtacgaacgacgagcagaatcgtcagctacatcgtcaacagtagacaagccgatgatctctcttgatgagggcgtcacgttcgagactggcttgagcggggatgaggatgatgaggatggtaagtttcctctcctttcttgcctcctttttcactgctgatcttactgtatatcggattctgtgctcgcggtttccttatggcttttttcagatggagacgggcctcggaaaaagacgcgtacgaactcgggtgattcccaaggaggccgaagatctattcatatcgaatacattgagaacaaggctcgaagacatataactttctcaaaacgacgagcagggattatgaaaaaagtgagattgagttgtcttgaccattcgcgtcacaagatggatgggaagaagagcatggctgataattttctgttgtggcctggctactatcttcaaggcctatgagttgtcagttttgactgggacgcaggtgttgttgctggtcgtttcagagactggattggtatatacctatacgactcctaaacttgagcccttggtcactcaaacggaaggcaagaacctgatccaggcatgtctcaacgcgcccgagggtgtcgctcccggaggagaacccctaggagtcagtatcctttttcttctcttctcttctcatcctcaaaacttgacttgtacgaatcgcagatcgcttactatgctcgcgtatcacctgattttctctggttggacatagtcgggtggaatgactactggcgccagatccaaagccaagttgaggtcaagcaatcaaggagctgccatcagacacaaagacgaattagttgtccctcctcgaccgaccatttcttctccacaaaactttgttgatcctaattctgccaccctcaacgtatccgataagcctctaagccatctccctaaacagtctaccccattgaagcccaaggctaagcctagttcggctcgaaagcctccgtcctcgtcttcttcgacccgtcgaccaaaaaagaacgctcaacggagtccatctcctacctcaacacatacgagtctcccagaaccaattaatcatcttataggatcagagttctccgaggatggaaggaagacgcctcctattacggaggacatgctgcatgctgtcgagcaggccaagatgcgacagatgaaagaagaagggccaggtcaaccgggcgaataccgaccactccctcctcactcatcgtatcttcaacctgttcctccgtcgatagatcgaccgaattacagctcacctctggaacattctcagcagcagcagcagcagcagcgacaatatgctcctataccatatcctcctccagagccaggtcataacctatatccttcttctccagcctttctgactcatcagcaacaccaacagctctatgatcagcatcttcagccttcagctggattccatttacctcctgaccaagctccttctcagcagcagcaacaagctcagcttcggaaccaaccaaacataccgcctccaaattctcatcaacataatcctcaccaatcacattcccattcgcaacaaattcacccttactaccatccagatcggtcaaactcctactcgaaccacacctcaccggcaaacacagtggaggaagctccgccggcaatggctgcacagacagacggatatggatacacgattgagcgggatggacaggatattggagcatggggtacgtagagtaagggaggggtccatgaggacgagcgcagcgttatcggccgtagattaggcctcttcgtttcctccttctcttttcactttcatgttgtcgtttcctctttcttctcttgtatgtcctcggtttcttgtggaaaagtttggaactagaaactccatcttcactctccgcttgtatgcatctcatccatatttcctcttcccggtttttcatttttcattatacctttgtagaacgcttctatatatcacaataatttcctctttcactcttctttttcctcctttttcattcttcctaattgctcttgtacttgttgtcttcgccattcctttttaattttttttcccttctgtgcaaatgaacggacatttgtcgtaacgttatgttcatccaaaacagaaacacacatatacactcacgtacgtacacaagcacgtgttatctgccttcccaaggaaaagtacagggccgatggctatacaacgcttgactgatcattcctctttaatgagaacgttaaaatagaatgagatagactagagagtaagattttgaatcatatgcgagtctctgacatgctagggggtcattcttcttcgttaccgatatcgtagttcgagtaaatcgttgctgagaaagccattagagacggtagttccgcgatggtctgatagcaaacagtgggaatgcgtcagacgtttgtcttgagaactggtggaagaaggaaagatagacaacaaaggaaagagacgcacatcgacaacgatgtttccgaccgccacatccagagccttccttccccattttgcgacccctcccagaacctctgctagccttttccctctggattctctctcttccaaatcgaccaatcttctgtttacactcagccccagtccaccttctgcttcgagtccgctgacgagcgcttcgaacgatacggctagacattcatctagaacttttccgaaattactagatctgagcacttgagacgtctcgacgagcagtgcccggagtggggacgctgggtctatttgaggaacagggaaagagggggaaggagagagagatgatgtcgaaagaagatgggcttcttgggtaggtgtttgaggaagaaggtgcggcacgaagctggaagacgaatcggccgggcaatgagaaaatagcacggttagacttttcttccttgctttcttcgggaaatagaacatgatgagataacatgaaggaaaactagacaaacgaatgaggacgaggaattccatctccgcctagatcccattcgaccttccgacggacttcagagaggagaatttctacgtctgttcgatcaatcatcttcttgagacttattctgcattgtcaaaggttaagaaaagaaagatctcgtcaatattctgagcatgatttcaacggcaaggtcgctgagaaagagggatagaagcgagaatatgacgaacggggtaaacacttcttcgaccgctaatttcactctctgtccaacctccttccatcctacgtgaactaaccaccacccaaagctcaagtaaaccaactcatcatcctcactaatctcaatttcttggtcaaccttctgctcatgtatgtcaggcgctccaataaacagattccaccaggaagattctggggtatgcgacgcatcggaaggaccagaatctggttctcgaacagagcgaagataagcgtgtcggccaaggatgttgagttgaactcgggtttgcagagataaaaggacaagggtatagattgtggtgatcgttcgggtgaatgctgaatgaagacgccattcgcgccaagggttggagcagagtgaaggaaggaacagcaagttatgaattcagttagcttttcccaagagatcgtgataatgttcatcccgaaacacttactcagcaacttgagctcgttccagatctgagtctttgtctttgaaggtactggaggttctggttccggaggtggggacgctggcgcacttggtggtagaggaggatacgagctccctacatgtggcgagccagatccatgagacgaagccaatgttgaatcagaaattacagactcagagacatcggtcgagaaagacgacacagacgcgtccatctatcagagtttggtagttagcggagcgcagtgtgaatgtgtcttctgaggacatttaaaagaaggaaagatgggtagaagacgaactgcatgcatagaacctgcttgagaagcagctttgaactcgcttgcccagctctcgcccattagccctgaggccacttgtctgtcttccgatcgactctcggacgacccttcatcctttgtctttgagcttgcttcctctcctccttcgattgatttagcttcctctgaggaagctacagaactagccgaaagtgagacaaccgagtctcccatatcaccaagttgaacttgaattctttctttctgtttagatgctttgatcgacttgggcgaggaggtagaagtgtgggtagaggtcggagagggtttggtgagctgggcgagctgtctatgaagatcttcaacctccatcgcttcgaggatctgaggtgacagagtaggaagtagggcggccagggtgaaagtggcatcttcttggttttgcagaaacctccgcttgagactggtgcgtgtatgtagatatctatgagtaactgtactgatggacgaatacgaatccatttggaaaacctacttctccttcgcccgacgctcgtccaatgctctctcctgaatctctcgaagtctatcgagagcataagcaccggcaagatatacccctcctatgacacctgccgagacggcgatcgcctttgagtgtctacgtgctctctgtttgattgaagtgagcatgcctatgatgtgatcgatggttgatggttgatagttgcaagccaagggcagggtagccggaatagccggggaggaggttcatgcgattggttacgatcacgtgaccatacatgatatcacacggacctccgcggatgttgctgtgtaaccatcccggatgagtgactatcattagttcataccaaagaaaaagtatcagaacagaaagaccaaagaagacgaagagagaacagcaaagaaacctctcacacaccacacacatatacactcccattcatatccgtacactccttgggcatctgaatcgacactatccatgtcctcctcaaagccagcacccgttttattcggtccgtcgctcgatcacgcgatcgcaggtctcacagcaggcacaatcacaacgatgattatgcatcctctcgacctggtcaaagttagatttcagattgccgatgctcccagtcgttctagtggggtcaagagagctggctttggaaaagaggtctggtccgctttgagagatgctgtgtcaaaagacggctggaaagggctttacagagggttaagtccgaatgtagcaggaaatgcaagcagttggggattgtacttcctctggttcgtccttttcatgatcggtcttgagtacggatgtgagtaaaagtttatggagtctgaacagaactaatcataagtttatgatttgatcctccaacaggtacacctcgataaagagccggaaacaggatggagatcataccgttcgactctcacccacttcacaccttctggcagctgccgaagctagtcagtcctcctttttgagcttccttttattctacctcttttggctgtgttctgtttctcatcctctcttactaaccgcgcatatcttgccgtgtttatcattgcccaacgacaaccctctcctaatgtaacaaccttcaggcgccatcacagcaatgatgacaaacccactttgggttgtcaaaacccgaatgttttcgtcttcgaaatcggatccaaaatcttatcacgggttatggggttcgtactatgttatctttcttttcgtatctcttctctttcacttgctcacctttattttaccttttttaaattaaaaaaactcctccgctgcaccccgccacctctgcgctacatccgtttgaacgaccacagatggtctcaagtcagtttaccgtacagaaggcatccgagggctctacaaaggatccctcttagctctcgttggcgtcacaaatgggtccattcagtttgccgcttatgaagagatcaaacggagacggactgatctaaaacgacggagactagaatcccatggtggtgtctggaagcaagagaacgaaatgctggtgtgtctgttttcaagaaaaactcgatcaaccccttgaaacgaactgacaaacaatggaattcgttgttcttccgtcactcttgaccttttgcagtccaacactgaatatattcttgcttccggggtctcgaaattcgtagctattgcgctcacgtatccctatcaggtcgtccgagctcggattcaggtacgtctataagcatctgtgtttcattgcttttttttttcaacattcatgtctgtccgattcatgtccattctaaccgatgatttctgtcaattcattagtcgtctaatccaacattatacccaaatattccgacgacgatccgcctgacgtacgcaagttctggtcttcgtgggttctataacggcttaggaacgaacgcgatcaggattctgccagggacgtgtgcattctttgtggcttatgagaatttgagctggctctttagaagggaagctctgaagcgagccgggcctgatgatcgagcattggcttagatcagaggcctgatctttcttctggtgttgttgttgttcttgtgtcgagttacatctgttactccttcttctatcaagttttgtctttatatgtatagaccactttgtccgcctgctgatctctttgtgtgcgttctcaacaacttgcattcatatatatttcttctatccctctatatctcacctccgtcttttttcttttcttttttctcctttctgggtcattcggtatcgttttgttatcttgttctcactgtctaatcactttgtgttctctcatgttatatatcgcccctccatcctatacattcccccgacattccttcttctctcgcgcctacgtctatccatactttctccattacccctctttctctctctttcctttttcttatctattcgggaaagaaagaagaatacggttgtaaaactcatctacctactcagagtcccttcttcttttcaaatcgggcggatattgcccttcagtcttcttcgtctagaatatctcttagatcactcacttttgggtttaatcttttcgttttttctcttttggaaatatagataaatctttctcgaacgtcgtcaatggtatgcatcaccatcatgatcgctatgtttttttttcctattaggcagaattgcggttgactcttcctttgctgttcaaggaaccttttgttttctgtgggaaagagagaagaaggagaaacgagattggatgtcaaagaattgatattcgagctgagtgttttgacttcagcttcggtatgatttgtctctagtgaaacaggaggaggagcaggggaaacagaggaagacgaaggagagtgtgcaaacgaggagagaaagagagagagagagagagagagnnnnnnnnnngcaagttactgatgagaaggaaatttatgtgaagagaagattttttaaaaaaaatgcaaaggaggttggaatatgcagcggagaacgaacgaaggatgatggtatgaaataaaatgtataactaaaaggggtggcttcttacaaaaaaagatgaagggtatcgaatcaaccgaacgaaagaggaaagtagtcgaaaaggggaaaagaagagactgataaattctatatggctatgtacaaaggaataacgaaaggaaagatatgtacaaggagtgaaaagaatagctttctagaaccgaggtgaatgaaactcgagatgttgctgcccgtcaacaccatcgttgtcatccgattcccacccggctctcgaagagtcactgagaccagggtggcattcgttctcgctctcactttcactctcttctccactactactactcccatattcgctactccagacgcttcccaactcattctcatttcctcctgccttccgttccatgctttccttcctgagcgcctggagagcttccgtccgggcgagcgcctgtcgtttcagatgagcgtatcggccgggggatattgaggttgggatggaagaagccatggaaggtcgtctatctgtagtgggatcgaattgatcgttctcgttcgagtccgagcctgaacgagcgacggaggcagaggtcgaacatgaaggaccctcaatcgatgctcggttcggaggagagtatgtttctggggatgcaaagaattccttatccggcccctccgagaatgctgttgaacgagaagggtctggacgagacggtgaaagtgaagataagtcgaacgggaattctgttccggcggtcgtgttggctggagaggtgagtgagatattgaggagctggattgttgatgtgcacacagagagagagtacttcctttgagcggatgataacgccggtcggggaagcagatgaagtggaggcagcggattggagataggatcatatggcgcagaaggctgagcggcagaaagtgactggtgctggcgctgaggcggaggcgacggcatggctattgtaaaatagcacgcacacgcatgacaaacaagcttctcctgttagttttaacacgattgatgggactaaaaagaaaaagaagagactcactttctttactagaagcttcggcttcggtttccagtaccggccctaacggctcgccagatgcactgacatgatgatcgggttcagacccgacatgtgctgtctgaggaaggacaagacggagatcgcgagctgtggatgcaaagtagtctttgcctgatcgttcatccagctcagaagagattggttgcttggatggacgggacaagcgcgagattgtttccaggccgacgaaaggagaaacaagacctgtagaggaggctgtggatgattttctactctgaattgtaggtgacagaccgggtagagagcactcggatgatgaggaatcggagcaggacgagtagtagagtgaagagggataggacatggcgtaaagaatgggacgaatatgtgagagcgaggagaggaagtgagagttaagagtcaagaattaagaatcaagagtgagagggtctacagaaacttggtaaggaaagaaggtttgtcttgtctgtccgattgtaacgaagatcttggaagaacccacgcgatggctgccgaaaaaaacaagggtatgagatagagaggagaaacgaccgcggtttcatctcaaccgggtcgtctatcgtctttctgttatagaagagtatggtcgctcttcccgatgagctttctcttgctttcctttgctgcttgcttctccgcgtccagtcggctcgcactcatgagattcactctgtcggtcgtcgcgttctcttttgggttttctgttcggcacaccctctttttcctgtgcccggcacatacccctttcttttgaattggctgttggatccgattcctaccttctcactctcagctggaggcttaggtttccttcattcatttgtttcttccttcttggcttcctttccctcttcagtctatcccttgtgagcttgaacgtacacgatggaagtctcatgtcacatcaacactctcagagcgtagtgggtttgacaagatagtcgagagataatcaaatatggctctgctggcccgacatgtaacgaaaacgaggcggcggcgaaggcggctgtcggagtaaccttctttggtccggtccggctgatgaatttgaaccggcataggttcggcgcgcagcacatattgctgcggaagatgctgatcggttcgctgatctggttactgccaagttacgttaccatcggccgaaaagggatcttcaaaacacgagtggaccctgtctcggacatgtctgcccgcgtttattgtctcattggttacattttgtatgtaatctcttgtaattttgtttattcttcttatttctatcgtttttagcattgttgcgtctttacttcaggttagggttaaacaaggagttgagacgcctgagcgatagatgaattttattagagtaaacaacgatgaaaccaaaagaaagaatgcaacacatttttcttgcggttcgttctttcgcagccaaaccggattctgtaaagggttgtctgatttgttgagaattgaagttcagcttcttttgagacatctttcagtgaatgttgtcaaaccctctttcttttccttttttgtttttttcttttcttttcttttgtgtcactttctcttcccaatgcgtcctttttgcattttattcaaattccaaagtatacaaactacctgaatcagtaaagaagcatttcttcttgtctttcctctcttttttggggggttacctttcgttccctgttgtacccttgtttttacggactcgtagttttcgagtctgtgccatgctatgctatgacataacatgatgttactgtttagaatgcgttttaaggacataaatttggacgatactaagagagggcaagaagggaaagaaacaaaggccggtgagaacatattgtcaacggcccaatgatctacaatatccatcgtctttccatcattgggggtgcacctatcggcaatcttgagcgtcacgggataatgtagaaaaacactttggaaaaaaagaaaaaaagaa

SEQ ID NO: 416 - DNA, 1907 bp, Xanthophyllomyces dendrorhous
gaaaaaaagaaaaaaagaaaaaaagtgagagtacaagcagaagagaaacctaagaaaaaggtgcgaaagaacagaaacgataaaagagggtgggctgaacatatgatgcccgatgtaaactaaatcgacgattggatcggcgatatctatgagggttcggatcaacatatatgtccagacgatcacgatcaagagatgtatagaggaaagaaggggggaggaataggaaatggtgtgctgattgggtacaaggcgttcttcctcccggctattctaaacatattgatcccttcataaggcgttttccaaccggatagaatgcctactctatgaatttcttatcagacatggccagcctgctgtcggaagtaaaagcgaacccatatggttgtcaactatcttgatcatgtgcttcagcatcagttgtttcccgatagcagggtctctatagacattcctcttatgaccaggacagcagagagatacattgaaagaacccgcgcgggattcgttgtctgtgtgtgtgtgtcaatgtatgagtatgtacatgtgcggggagcaactagatgacgaacaccctcttttgtgtctgtctgtactttgacacgctacggtcaaatttgatgaatctcttgtggtctactccaatctgattggcactgaacatgccggaatgaacaagggaaacacctttgaggtcttctttctattcgcctgctaacctccgatcacgtgtctgatgaaggaaaaataattaggcatggctagtctccgcactgcttgaaataaatcccatacctaggatccggacaatcgacggtgtttgttgagggaacggaaccctaaaaagacgataatcgttcggacccggtcaaaaaattaagagacggttgggcccatcggatggagaaaagtccagacctttctttaagcccactcccctttttttcattctcttgagagttgtctactttgaccttcttctctccttctctccttccttctctcttctctattaccccgggattttttctcttttctttttgtttaatcaggtcaaccctcttttttgtttttttgtttttttgttgaatcaatgagtgcgcgtgtcggttttgattctgattgactaaacgacacaacgaccagatggctaaacgacagagaaaacctctttttattttttagggtcttccctccgagacttctcctttttcttatttctacccaaggacgatggaaagagcataaataagaaaggaatccatcagataaagccttgttctgttccgtcttgctcttctctctcagatctcacatccattcttttctcactgacttcctccccttcactgtccttcctccttcaatccttcattccttacaaaatgttcgctactattgctgctctctcccttcctcttcttgctctcgccgctcctgtggacgtcgagaagcgaggtggttcccgattcacctactagtgagtgtctcttctcttcgttctctactcgggtagcagaacaaatgctgactacagcaactccctcgcacttgctctctctcagcgatacctccgttggactcggagcctgtggaaactggaacgccaacagcgcttacaccgttgctttgaactctgccgactatgccgcctggggaggaggatacccctctgctgcctgtggccagcaaatctgggtctcttacggtggaaacactgtgtccgctacgatccaggacgagtgcccaacctgctcctccggcgagctcgacctttccgagggtctcttcggagctcttgcttccatggatctcggtgtcatctacggatcctggggctactcttcctccggagccgccgccgctaccaccaccaaggccgctgagcctaccaccacctggac

SEQ ID NO: 417 - DNA, 13046 bp, Xanthophyllomyces dendrorhous
gccgaggccatcgtttctactaccgagtccgctgccgccgctgccgctacctccgcttacggacaacagaagatcgtccgaccctggactggtgttaacgcctcggccacctgccctgacgctcgattggtcctctggaacgtgaccgatgtcacctacaactctacctggcataccgtcaactcttccctcctcgattccgtactttcttccaacgagaccaagcgattctgcctcaactcggccatctccaagtacaccggtgccgccaacttgaccgcccttgttgacgagttcaaggttgtggtctaaatcaatagtcctagtggcttccttcttcttttacctctatttgatatagacttctcccagtcttcaatattccctctttttaaaaatatatttaccctccctaaaaatgcccccggtcctccgtccgctttcttttactcctcgttgacgaatctacttcggcgctctaggtcgccttatccttacttcatttcgattttcttctcttcttttttgtgaacttgatgttcctcttgggctttttggggtttcttgcctttttctcatgtgtttgtagtgccggttgctgccttccttcttttgctctgcttttggtgccttgcttaaccttttacatacttttaaaaacacaaaaccggcctggaggctggacacatatgtgatcaatttgtttttcatcgaaacgtttcccagagtgaagagtaaaaagaaagaggatacatatcaactaaatatcccgcgactattgcactgatttttcgtgcctgaccgccatctctcgctttctcagcctctgtgtcccttccccaactactttcttttcgaaagtcaatctcctccatctcctccacatacatatcgtgcaaaccacaagcaaaccggaaactcagtcgttctcatctcttatgccggcgagtttatcagaggaattattcacgcaacagtttgtcgacgaatcgtaagcctttgatctcttactctcttcttccttcgtctcgcgttctagagattgtctagcacgcttgagctcaaccaaacttcaccttgtacttttcggatgaattctgtttaactctccttctggtctggcttgttcctccaacatgtggattttttccctcatttgaacctatctccacgcaacctaaaaagacatatacgagcgtttgcgaaagcattatcggcaccagacctagccacagaatcatcttcggtcttgacagacaaagaaccgggcgaggacccggccagatctggaaatgatctcttggatctcgacctggccgctaaaagtgggggtggcatgttaaatgggaacggagcaaacggacatgaaggagtagaaaagttaaagtcggtcagtgattttgcaccaataaacactaggattcgaaagtacgtcacctttctccttctttccgtgcatatatggctggattcgatcattgatctacatagtgtcgtctcttctcttgatacagacgaagtaagaagaagacgagtggcgcaaaggccggattttcataccgcgtgtgtcttctctctcgtcttatcttgtcttgttctcctttcggtctaacactagacattgagtcgaaccccgacaggtcgctaggtatccccttttggttggtccatcaatcttctggcacatcggctgtatatcgacagagtcgtccacacgctaactccattttcctgacctgaataccttatagtttctcatcctcgggatgatcttcttcgagtttggcttctacgttgccacaaggcagatcgtaaacgttttcgagtttttcatcgggttgttcgggcaaaagtatgtgtatcttccctcatatccgatttttttccaggaatttccccttctctccagagatgtcttgtcttgagggtttcatttgcggttttatattgacgaaagtctgctcactcatttccgtcggatcgacaaagacgaaatttacggcataagttacggtatgccaagacattcgaagagtggaaggaagccgcgctcgagatggacgagtttctcggttttaatgcttggaaaatggtctgtggatatttcctgctagtcagtaagatgcatgcgccagtgctgacacttccttgtttctccttctcttttctacgctctcgggtgtcttgttctaggaagacgaagatgctcagtacgattggtcgctgtgcgtatctcgtgctcctgagacttctcgatgcttgactcgggagaaatccttctcatcctttcttcccctcacctctccccaccgagaacagtgtgcgcaaagtcaaaagatcgttagcgaccttgagagcacagaacgatgttcgtgggctagtcggtgtactagacgtttgtctccgaccgtcatttgctggtatagagcgtgtgagactctacagcgaagcgttctacggtacaaaacatatcattgaatgtgagtcgttccagtctcacaaccgatctaagaaagtatcttttgctagttatttacatccaagccttgtttggtatgtggcgcgcatagcatacatcgacgaagtcagtttagccctcaagttcgttagagagagtgaggaactaggggtggaggaaaagaaacggttcttcaaaagttgtaataaggtttgctccattcttcattcgtttcctgcattcctcatccgattcgtacggctgcccaatttgtttctagattgacgactgacatcgctccctcacagaattttggatcttcggctttatgtttgagtggtggagcttcgtttgggtactaccatattggtgttgtccgaggtatgcttcgggttgtctcatctggttttgtgatttcctttgggaaaaaaggaaagattttcagtagagttaattcgtttgatcctcgtgttgttttcgttaaatccacggcttagcctttttggacgcggacttattaccgagagtgatcaccggaacctctgccggagcacttattgccgcgtaagccattctctctacagcggattcttgagaccatactcgaagattacaaaccacagcgcactaaaatggcggagccatctttgcctcttctttcctcttgtcgttaagcttggtcactacccggacagatgatgagttgaaagtactgctaacacctcaattggcagatcggatcactgcttgcgaagattcgtaagttgtttgatgatatcatccctctcgtttgaaaaggattaatcaaagaatggttgtgctcgtcaggatccgagtgtggctcaagagattttggaagacgggtgctcgatttgatacagtcacctgggcagagaaagtatgtcttatggacatcaatctttttatgttgtcatgaaagccaagtctaaacggagtgtcaccttatccggtttgtacctaggcttcattcttcacccatggatccttgacatttagagaggcatatgaacggacgggtcgagtcctgaacgtctctgtgattcctcacgatagacattcgcctaccaagctcttaaatgtaagtgatttaaacgatcaatacgattgcctacccttgatgtttcctcatcatgtcttgatctttctaacagtacctaacgagtccggactgtgtgatctggtctgctatcagtaagtcgaagctgtatcctcgatctgttcatcgttcctacccaactagccagatattgatgttcatctgagtctgttatctcttcttctgtccgtagtcgcttccgcggccgtgcctgtatgtgtcttgggatctacatgccggatacctcgaagaagatgcaattcattaaatcttctcactttcttcactattatgaatttggacttctttctgtttgtagggaatcttgaatccggtcgtgctgatgaagaaggatatggagactgggaagatcatgccgtggaattggggtacccggtttaaagacggaagtcttaggtgcgtacagttctactttctctgtctgtgttgagtcagtatctccgtactgaccaatcgaggttacgtcctcctctttctgtgatttgtaaacagagttgatattccactgcaatcattgcatcttttatttaatgtcaaccactcgatcgtttctcaagtgggtggcacaattatacttgcatgtattcaatctatctcatctgatctcacggttctcgttcaaccactttcacaggtcaaccctcatgtccatttgtttttctttgcgccccaaggtaccgctggtcggccagtcgcacatcggaaaggaaaaggtcagtttccaccggtgactttacttttaggctcagacttatggatcggcttaaactctaatgctctctttctcttggtttggaggtaggctggagaggtggtttccttctgtctgccatggaacagtacctcaagctagaactcaacaaaaactttaaagttatccgggatctgtgcgtgcaaaggtttcctgtcgatttgtctcgaccacacagaaatcgacgaatatgtcctgatgatgtgttctcttgcttcacagtgaactcatgcctaccatgctcggtcaggattggagctctgtgttccttcaggtaagcttgtctcgcgcgtatatgcccaaatggggctgatctcgctgttaaccatgtggtttcttttgttcgttcttctgctgtagaaatttgagggatctatcaccatctggccaaaaacacgtgcctgggtgcgtttgacaaccagtctctatatctgaacacgtatctaagcaagaaaaataggaggaaactgaccgcgttggatttacactttcgcttctcacaggattggctcagacttctgttcgtgtcgtctgtctgaaaatactcagtcctgatttgatctcactgactgaaatattcgcgtcaatatatagcactgatccggatcggcaggagctagagcggatgatcaatgttggacaggcttgtgcttggccaaaggtaagttcttcttcttcctgtcctcaacgaaatcagatctgcgaactaaattatctatcttttttatccttccttgttctgaatacagttgcacatgatctcgaatcgagataaaatcgaacgtgagatccttcgcggccgtcaattcgtccgaacggttttagccaacccttctcgaagagatcggatatcagacgatggtgattccaaacatgcttctccttcccgacctgcccgtcgacaagattcgatcccagtcgactcggatgcagagtctggttacaatcgagcatccactcaaaactcaccttcaaggacgagatatcggtccgaggtctcacttgggcttggtagtagggaagacgggtcgagaattcatcggaaacggaatgcaacctctaatagtagccgctctgcatctcttggtcggctggaaaacccttcgtctgcaacagtagtagcacgagaagacatcatggaagactacgacgatgacgacgatcggtcagaatctgacgctcattcgactgatagagagagttccggatcagagaccaggttccctggatttcagaatatcagcaaacttggctcatcgttccgccggctgcgaacccagtcatttcctgcgatcccatggtcgagttcgcctctaaagtcgacggtggttcgaaatagaaagccatcaaggagcggaagtcgagctcgttctcgagggaccgaaagtccgttgatcaaaccaaatgattcgagttcgtcagaggatgaagacgagttgagagtagtagaggccgcgacatctagaggcgcttatagcggtgggctctcacgccgagctgttgaggaagaggcggcggaacacgaggaggctcaattggacgctgaattatgagcaagagaataacgacgatgtttaagacaaaagatccagagaaaacacaagcactgtatctttacgtcccttttttccttctcttcttttctttgtataacatccttgccgaaatatatatctacgataccatcagatctgaaatagatttcgatcatcaatgcattcatgagcaagaccagtgttctaaatacatacaacattgttagtcaaaccccagtacaagccaacagtctgaccctagaaggatgtgatttaagatttcaagatatagagttgatcttccgagcgcgtattcttcaagaaaggaaaatagaacggagaatgaggtcgaataagtttgggttacagacgcgcgcaagaacgcgtcataaggttgagtgacgcgtccgtttgatccgcctgccatcttctcggaggcagtcgagcaggcaacacccccagctcaattcgttcttgtccattctttctgggaagttttcgctgtttggaacccaagaacactttgtccataacaagcaatggatgaagcatcccagatacagcatttctcctctaagaggtcgtcccttccctcgttctcatcgagagagattccatcgtctccctctgtgtctgtccgtcgacaatcctttcagactcagccatcggaggctcctttagaaaagaagaaggacggccactctggtctaaagagaacttggtctatggattcagtcaagtccgactcagaagagtccactcatcctatcgggacgcccaaacgtgaaggcttccagatgtcgaacaatggtttgtgcttgtttcccagcttatcaacatatgtctctttatactgtgcatcctcatgcccaagaccaaagttgacggttgtctcatttgtaccatgcttgatcaacatcttgctctcagcccatccataccagatcgtcagttcttcctctgctgtcttgagcagaggcaatccaacacctacgaagaagagctgggttccgacccatagatcatccaagtcagcccttcattttgactctcagagcagttttgttaatcttgttaaagtctgaatatatggtctgattctttatctggtttgaaaacagatcgctctcctctatgccttcagatccatcataccggcctcgaccgcttcccactccaccccatgctactctatctccttcatccactacgggtgtacaccctcagttgtctccttgcccatctgatcaggtagaaaaacgaggcgtccgaaatctcgctcgaaagtgggaggagagaggaagtaactcgagtgaagccagctcggtcgaacagagcgaaaccgaagaaactagagtgtcagatcactcgcagagcaacagagaacctcgatctttgaatgagcacatcgttcccccaaatcaacccaatcgaattttcgatctcaatgggagcccaacgtccgaaaacgaagcatatagtttactacctccttctcctccggtctcaatttccagctcatctgatttcggtagtcctccattggttcccacccctcccgctttaatcaactactctcaaccgagtaaatattcgacccttagtcgatcgaccaaccgaacgcgccccaaacgaccctctgagtctttcgtcgacagaccatgtgctgattcagatggtgattcagacgaagaggatagtcggtcaaggacgttcaggcgaaatgtgaccgctcgaccttcaaaaattctcgtcacatcgcatataaccggttcgatcgaatcaaagaaggatgaagcagattggatggtgcaacattcgaacgcgccgggaagagagaccgagtataggtatatcattcagagtttgacagctaggatagaggctctagaagtaaagctgtttgatctagagcgcaagtctatggtacctttaggaagccttgactctgagcttcctccattcagtgccgcaggacacgttgtatcgtcgatcccaggttcatctacaccatctcgagccgcatcttcaaccagagagcgatctgacgggaaacgaaatagatcagtattagctgggagcgttcctggatatctattcttggtctctattggagtcggcatcgtcacttgggaggtcctctggaggagattcgtaagggggagaggctgagattcatggaactgcagggcttttttctcatcatttagttcattttcaatctatacttccttctctctgtcttgttcgttagtcggcgctctatttctctgtatcttgtaaaaacacatcttcctcatccctttcatcttcttctgtttcacatcttttctgtagtcttcacgataccctcgacatttcatcacccttgcgtgtatacccatttctgttcagttgttatgtaccttacgtcctttccgttgcagtctctatccccggcgagtcatgtccatgtacttctaaagtacattttggttatgttctggcatgcaatttctacgcaacgagaccgctgcatacgtcctacccttgcatctagagtgcaagacaatgctcgaccttggctcccaagatgtactcacgactgttactatcggcgatatccggcccggtccggttcggctcggagatttttgaagtgtctaatggatctagctctagatctcattcgtccatcaccatcatcactgatctctcggtcgaatcgctgacgagctaatgacaaacgtacgagggtcacatctgaagcatgctgggctagctctcaggtgagaaaactgaccgatcctggtgcatcctcaatcgatgacactcaagatggagcggccagatgtgtctacatgcctaaccgtcgggatttgtattcatgcctgcaagctgaactaaacgccacaacgcttaccttgaaagacatgctatcataccagatcccgagattgccactctggtcatcgcctctttcattgtatatcaatgctcgtttgctccatctcctctcgggttcttaactaccactctcctccttctctgtgctcttctcaacctttccaatcttgttcttgttcctgcccttgccttcttcttcttctcctccctcttcctcttccttcttccaagctgcctggttattatcattgaccgcatacttacaaactgatttcttgccggatggcggacttgtctatagaacaagatctcgacctagggactgtaggcggggttatcaactcgctcttatcggccgttctgagctctgttgagtccactaggaaagctacctcctccgttagcgcttcttcagtagtcctcagagtgacctctacaatctcatcagctagcctgacaagaagtgctagctcagttgctaggtgagatatctaatttcatcgtcgagtggaagaatggaacccaagtcgaattatgacgctaaacagaatggaaatacacgcacactaattcatgttcgctcgtcaggccaacttcatcactaacatcttcatcactaagaccttcgccaagaacatcctcgtcaacggcaccttcgtcgagtctatctgtcttgaaatcatcatcgacgatgctttcactcgcaacttcatcatcgatcccctcttcatcttcatcatcgaccccctcctcatcttcagattcacccactccaactgccatcttcttgacttctagcccggcgtcatattcgagttcttctgtttctgcgctccaggaaggagtgatcagaccttctgctcgcttcaagaggtccagaatcttgatcatcgtgctttcggtcgtcgccggttgtatctttcttcttcttctgctgtttgtgatccttcgtcgtcgtcgacgatatcgtttccacgaccgtccggaggatgatttccaacccgactcagtcggtcggagagatctttcagagaaacctgaaagataccaaggctcaataacggatgaacctgtcgttcgacctcgtcggttttccagtatatccaaacgactttggcaagatcccccaaagagacctctgactcctagctggggacctctaccaacgtttccagattctgcctcgctgatgactgtgggttctcatgaacgacaacttactcctcgtttcgaaatcgtcagtcgagacggtctgctgggggataatggaagcggtcacggagcgagaccttggaatttacagagagggtatagtgacccgatgctcaacaggccgactggtcgagcaatagaaatcgcacctatcatcatccatagaccttcagaaggcgaaaccgaagcagaacaggaaattaatccggaagaagaagcggaggaggaggacaaagggaatgaagatgtagcgcagagagaagttggagaagaagaagggtttaatagaaagagcgtagagaagtcatccactggttcgacaagcagtagcgtgctaggatactactctcggtcgcttcgagcacctcatcagtccacttcagagttctgtgaaccttcatcatcgtcgcattctttcgacactggaactaaatcttcttctacttcacagccagttctggaccattaccaagcagaacccttgaacgatcaccccaaccaatggacaactcctgctacttctcttcttgctcctcctcctaagccgcccaagtctctttatcgactcacaccggctctcaaaactcagatgtctcttacgactgatagtcggcagaactcagggttcacgttggatgggtcaaaccctttcaccgattaatcggttcaacactttcatttccaaactctccttttagtcttaccacgtcctttctcatttattccagcattcatacacaaactcgctccgaggtaaacgtttcctttgtttccttcacacatacaagtcccttgctcttaccaccctacatacactcgaaaaagacattattctttccggattctttggggtctatttatcagctgtcgtattgataccctcatttcatctctacactctttcacctcgtttgttctcacacatccacacacgcgcgcgcgcacgagccctttggctttctcatttctctctttacttctcttgcttcacattgggtttattgtttctccttcatatcctgtcaaatggaggctctcccagcagtctgatgtgcgggtgtatttggatcctgacacaatcaatttgcttggtgacgaatacgataagtgtttctctgtgcataaatttgaacaaaagtcgaaaaaaaaagcgccgattttagagtagaaagaagatcaattacagttctaaaaagtataacaagacgatctggggttaaaaaaaaagcatagaaaaaaagaccaaaacaagagatagtgaaaaagaagaaaagaaaaggaagtgaccaaaagatgaagaagaaaaaagaagataagaaaaaaggaaagtaaaaaaggatcaagaagagaaactttgatcagggaagatagccgagtaatcaaacaccccttgttcaagcagttgtaagatctccgaggcagatctacacacatcaaaggaaagaaagataaagaagatcaggatcaccctgcaccacaaaatatataaaaaaagatggaaaagcacccacaaattatcctgagtgatccctcctccgatgagtgagtccatcccggcactaggtaaacctaggtcactcaaatccggacctgtcacaccttgcatcggagaatcaaaatcgtcgaaaatcatggatgcaaccggatcaccgaatgcgttgaatccattcacgttcgttcccgggccaagcaagcttccgtttgtttcttcattcgaaggggacggaggagacgcagcggctgtgagatcaaagaattcctcattattgtagagcattgattcatcgtctcgatctaaggggaggtttgaagacgatgatgctggtatcggtgcctgtgccatctgagttgaaggcggctgtggggaaggtgacacgttgttggttgtggaagcagaattgaaagtttcgtccatggggggagataagaaatcgacagtttcaaatatatcaggtgtaggtatatccatcgccgtcgttgtcgtcgtcgtcgtcgtcgtcgtcgtcattgtttgctgtaggttcgaagaaggcgctttgttggtatttgaaccaggagggacattgttggatatcgagcctggtgagagagaagtatttccgggcgtggatgatgatcgggaaggcgaagctgatcggtgtctcctaacagggcgaagccaggccggagaaggcttcgagggatcaggtacttgcggaaggtctataggaaccttgcaaattcgacagaattcctccaagatatcggctgatctcaagccacagagatacctcccagaaaatcgtcggagcaacccgacacacgacttgaatccttccagactagccgagctaatcgatctagattctggactcttgcagttcagaatgaccgctaataacgttcgaccagcctgagcaagctggtggactacatggaccccgtaatacgtcatgaacccgcgttgcgagatatgaagatggtccgccacgatcgctaaggcgcatgacatggctgttcgacaatactccaggttccgagtgtgttcttccggactttcacctgccgataagacgttcccgctgaaccgatgtcgatagatgactacgagaaagaacggacagagattttttttcaaagctcagtttgtcgcctcccggtagctagatgatcgttacagattagaaagaagatgatgatcaaataactcacgcatcttgatcaaattttccagacagtgaagtctctccgcctgagtgattcgaatagggtctttgctagcgatcgtctctgggttatatgcccaatatggttctaataaccctgaccattcattcagcagagcttcctcctcctctaaatcctcgctctttggttgccgtttcgcaatcagttgagccgctcgggagaggaacggagagccagagaaagtagatggtcgaacggatccgtcgagctaggggtgacattgtcaaatttaattgtatggttatcggtacatgaacagagcttgagagaagtggatgttgacaacaaaacgaccccccccctccccccaaaaacaaaaaaaaaagaaaaaaagaaaaa

SEQ ID NO: 418 - DNA, 48128 bp, Xanthophyllomyces dendrorhous
cacaacaccctccagaacgacgtgagctctgatggcagcgacgaaggcacatatccgactcttgctgttctccggctggtcccctagaccatcacttcggatgtactcgtcatctagaattacaggctcggtcacatcacagtcccgcaaactgagaaagaggtgttcaaggttaaatgttgaaatctttaatgttactcgacaatcaatgtaagagcgaaggaagagaaacaacgtactggatcatggcaggtcgaccgaaacatgcccctgattgtttatcccaacaatatatagaccagaacgttcgctacaaatatacgcggagaaaactcgtctttgttaggaaaattatccgtcgaataagcgaaggaacttatggacatgcctttcgaacttctctctcaattggattgaatatgtcgtagcctcctacgtctcgatggagtcctccatcgatagccatcgtgatactacagagtatagagatagcaccggcagtaagttaacatacgaaaatatctccatgcgaaagactgatagagacggacctttcagcaaacaacatgaaagcttttgataatgttcctaaacccatgcagtagatagcctgatgccatcaagacatccctccaaaacacgtcacgaatttgtaacacacttggcgagaaaagcagaacaaataaagcaagacttacggctaagaaattggcttgaatagaatataatgtcggtcggtccgcactgggcaaatcctgcatctttttgaaaagttcaaggtaggattgaccggcgctacctgggtcgtctgggttcgttctcactctcggatcatccacatctactcaaccgacgcgatatgcccagaaagaaaatcttctctcagcctagcctgaagaagaacagggaagggacaaggaaaagagagagaataggagacgtacgtcgcgacgatagggtacatacagccacgatgaatctggagaatccaggttccccccacctggatggattggcatagtcctaaaagttagaagaagagccgaaaatcagaactcttatatgttcattaagcccgtatggagctgcatccatgcgagatagagaagagaattcgacactgactgctaggaaacttggcacatgaaggaaaggccataagagatgagtcgtcgacaactgtcacatcaagaatgggaatcaagaaaaaaaggcgcgtaagtttggggtcccgcatcggcgcgacggtctataaaaagcctccaaactgacatagctcctgataagggtatccatcagagaaggctcaatgacggcggtgatgactttccaactggcttctgggtttaaccttctcgcctgtcttggtttccttccggggaaaaattcttcgcctgcaccaacgcccgtctcttccaaacctcccagacctccaattgcgcctacggactcggatcggttagatttactgctcgccgaattgacggtcggcggggaggattgatgttgcctgttcggtggtcgacctcgaaggatgaacgctgaaggatcttctgaatgagaggtcgtaaacgagtggtattccgctccgtgctcgatcgaccctgagggtgtcggtacggaggatgacagaaatggtccccccgatagaggggaggtgttgaaagtgttaggggaagatactgcttgtcggagagctttcggcttctcaccgctggaaggagggtgttcagtatcgactggcgtgccagaccaggccgttgtgcactctggtgaggcagaggaacaatgggaatgctgtcgttttgtatgatgtggatgaagttctgcttcagcaagtctttccagcagaggaaacccagatgtagcaccctgccattttctgtggatgtaataagggaaacaagaagaaagaaaacaagaagtgatcgttggtaagtattaagaattgcaagtaatagacgacagacagatatctcacgcacgtcatgccaacctcgtccaagtagataaatccaggactgaggtccatcgcgttcatctccttctccagtctgtccattccattctgagcagccttactggatcctatcaaactagtaatccctccgtccgaatcgcttttccccaccgacgcggtccatccattctggactttgcccacactcggtccacccgaaggaggcgtgaaggtgaaaccgtaagctccaggagagacaccttcaaagggcgtttggaggccaggccgcgacatgtttgtcgggccggctttacccagcaaggtggatgagggggtgacgaatagtttctgagcatttggtgaagtggccgcgtcgggagttttcatcgaaggattgataagcgaagcatcaagttgagaaagagctgcattgtgaatatgcggtgggacctctaaagaatgtttgaagtgcgaccgttaaatttcagttagcaaagtcaaactctcgagtgctcttggtttttttaaccatcatgattaggaagagagaaaaccctgtagactaacggcgaagctgctgctccagaaaggccatcctggcctccaggtctttcacgttctttcgaggcttgtcagacggactgtttccgatcataaacaggcgggtttaacacatagaagatcaatcaaacatcagtaacgaaatcaagacttcttgcgacctaacacgtaacgaagaagaaaaaactgataaattgctcacgttcttggctttgagcttcggcgtaaaggggtattgaaagtaccttttattcgaaagcaaaaagttggctgagtaagtatgtgcacatacagaagaaagaaacagccaggctactagtgagaagttaataagaacaattaaaaaaagacgggcttacaagcttgctttgcggctatacaaggtgagcaaggagagttggtatcgcactgtaggcccaaacagaacggcttatcggtcaacgccaagtcgtcgaaacaagtggtgcagcagacgtgacctaatcactcactttgatctttcgtcgtctaatccacagcgatggaattaaattaggaaggaaagggaaaaggaagagatacagaaagcaggaagataggaaaaaaaaaaagacgattagtcgctactcggatgagcccggagtgaagaaacgtgccgagagcgaaactcacttgcacctgtcacacgctctcgctggacatcgaaattgatacatctgtgagtatgagaagaaagtgcatactgatagatatgactgacctaatctgagacgtggtcgcttattgtcatcaccttcgtcgaatgacgactcgtggtcatcctcggtatcatgtatgagggcgatagattgcgactgtggttcctgtttaaccgatgctgatgacgcttgtactgacgctgaagggatcgaaggcgacaacgatgataacgatgatgatgacggtttcgacgcaagcgatgggatcaagttagatgctgtctgcatgtcgagcagagagaaggtggatggttcaacggagagagtatgcttgatgtcctgccaaaaacagacggaaagggagaaacagtaaaagagtcatcgcctaggggggaagaggtaaatgatagaatagatgattttttccacagttgactaagggagggtgtataagcaagtgtcggtgtgggcatatttggacacgacatggggtgtttggggaaatatggggtgaaatggagttaagtggggccccatatggggtttcatttggggtcacccatgatgatgacgcgctcaatcgccggtcagacaagccgaacactcacatcagcatacacactccctcactcactcacccataccttgttctctgttcaagatgtttttcaaccagatcagagcttcagcaaagcccataggtaagttgaacctcagcttggctctcaattctcgtttgagtatgctgacatcatctcatttagcctctctctctggctttgctctgttttcacgcgcttcgtccacaaagccgggaaccggcaggtttctcatcaggcagccctctccgctcgcctctagagaagtacccactcctcttgtatttctgagcgccactacatgggataagactgctcccacagccgacggagctggcgggtggactgattggtccgcaatgtacgcctccagaggttacacctgtgagtatctgtaccgtcgttgacttttgatgcaagtactgattcaaagccaaatactttcgtccaaccgaactcaaggcatcgagattgatctcaatcctcccgatgtcctaccaggaacatcagaagaacttatggagcactttacatccggtcagtttaccaaatccggtcggctatcgtacgcagatgagttcactgactgcatctctaccctcaatatcgtcttctccccccaaacagagctcaaccagcaaatccggctcgctgccaatccattcccaccagttctgttcgcccgagcgttctcctctctcattgcccaaaactatatctcatcccatccagtgtctgctatgttcctcctcgcacctccgacgccttctgtctcagacacaacttcccctgccgcatatgaacctcgagaaggcatccttcccaccgccctacctgagttcaactacgaggccaggttcccaatcggagtcatgtaccctgcggctggaatccctatgtccgactttgaagaagaacatcggctcgctcaagatcaaggaggatgggttgagcatcttcggtttagaggaaacattgatggatcggatagtgaaagcggcagattggaggttgaaaagtggatggacagagtgggaatctaaatcttgtgatgtacgttcctaggacgcttctaaaagagcatattgtccagttcttctatgtgcttcacatgtgaaagatacaatcgaggcacagaaatgtgatgtctcccctaggcaaacgttaggatctgttgttgttatcatcgtcaccgtcgtcattcaccaggtccatacgctaaccctggccctcaacttgttcaatctgactcagtctctgccctgttcgttgtttggaccctgactatgtcttgatttgtataagaaggcagagaattctttcctcattcctcccttttctttctcttcatcctcctttacctccatcctacctgtttatatcacagtcctaccgtacctcttctacactttttttttccacgtcaaactcatcaacccatccctttccatcaaaccaaacatgctttccttctctgccgttaccatgggattcgccatcctcacctctgtttctgctgttcctactcctgtgagatcttgtactaatgataacgactgtgttcccgcagacttacatcgatctctcccctcattttttctctttcagatgactgaagctacggtcggagctatggttgctgctgatggtcaaggtgtcggagcaaagaccgatgtttcagccaacatcctcgatggactgatctccaccgacacccacggtgcccttggagtatgttcctctctgggctatttgtttccgtgtttgtcttcatctcttctatcattaactgaccatactgacttcaacagctctttggaagcaaggttgctactagatctcttgtaagtcctctagtctgtactcactgcttcatcagcggcttctctcgctcatcacgagacacttttcggttgatcattccttctctttgcagctcgatttgtccgatagcacctccttgggtttgggacatattctggactcttcgactggggtcgctgtttcagctggtgacgatctcgatgccaacgttcgtatcaacacttttttcatccagctagattgaagcacaaagatacaaattattaagtagatgggttttcctgttgtgaaggtttcggtcggcgagcacctcagtctccgagatgtcgacgccaatatcggcgccgatgtcgatttagacgccgaacctgaattcgaagcctctatcgactccctgcttggtgccgacattgatgctgagactggcgtacacgctgagactggtgtacacgctgatattggcgctaaggtcgatgctcatgcctttgctggccgaaacatcgacgttggcgtcgacgtagacgctgaacatgacttagaagcttccgtcgactccctgcttggtgccgacattgatgctgagactggcgtacacgctggtgttggtgtgaagactggtgttcatgtcgatgctcgatcgcatgtacgtctgttttccgctcttcttttggttacttcttctctgattgaaagactcacttgtgatgttataggccaacgaggaagatgaaaatgatgaccacaaggatactgaagcctccggtgtccaaaagtccaaggctgccgaaaagtcccctgcggatatcactgaaggagtgatcgccaagctgaccaacggcaaagtgagtacttgagttccaataccctttcttctcgagtcgatctagtttagagtacgattgacgatccgatttgttttttcaacagggtggatcttctagcctaggctctgggttgctaagtgcttgagctctcaagaaagccggccattaggtaaatatatgacctccatatactcctcggtaaactcgtcatgctgtgtcttgctaatattcttgcaatgatttcaacagactgctctcttttttttctgggttgttcacggtgttccgtttcctttctggttttatgtcgatgttttatttgtgaatccatgatccccgcaagatatgacattcaatgatgccaagtgattttgaaatctatcggtcaacctaagtagatcttcggtcgctttcattctggctgacttggttggtcctgtgatgatgatgcagatgacaatgaaagaggaaccaagcgccacccgttcgtcttgtgctctattaatcgactgtgagctctaagagagtcaattgaatggatggagtttcagaccgacctcaagtgtacttctatcctcgctctgaaactgtatcagctcatcaactcacgtacagtcttgttcatgatgtatctataggacgatccaccaatacgatgtctttctatctatctttgtatggccgtcgggcctcacgatgagaaaattaattccacacgtcggcttggatcaaacttgtgcttctttcgttcctatcgttcatcgagtgctgaaacatgagcagtcagattgatcatcaattttctgtctctctccttttcgcgcacacagaatcaagagagcgaaaaaggcgaggtgacggaagtgtctagcaatcaatctctatccaagatcccattctttccgtcaacgatgcccatcgccgaggccacacagccctccaacaaggggatccctttgaatgcataggcgccggtgaaccagacgccggcgaacccttggaaggaaagagggtgagacggcctaaaccgggagacgattgcagccgattctcgagttgggagtgctctgttttttttgtgattgcagtgggaaagtggaatccattcactcaaggcaggattagctcaaacaattatgatactgaagcgtagccttatggtggagattgaagtaaaagaagaaagggcggtactgacctttctaactgcgagaccgaaagaaccatctcctttggaatcggaacgatcgggtttgtcgtctgaaataccgggctttcatctttgacaggcgactgaacgacgtgtgtcgccattgtgtagatctttccatctgctggatcaaagaatggtacgtctgtgttacttttccagtctttgccgtctcggccagcacttggggacgaaggcgagtatgaatcagggtgaaagtcgggagatggccggacgagattgatatctttaatatcggccgggtgggcgggaagaacgatgggtgatcgatggttgacgacaatcgcaggctacgtgaggtgaacactcggatcagatcagtacacgcactcgatagaatcaacaaaggcgagagaagaaaaaggaaaaaaaaaagattttttcctcacaacatatttgaattcgcccaacgattgctctacctctcgcaacatctcgatttctcccttcttatcggtctctctgtctgcttcggtcaactcgtctaggaagcccttgagcagaactttcgcttggttggcctgagtcgcaaatacgacatcagtaaaatcttccagaacacgctccgaacccgagtcggttgaatctttgaccacgagcgtcgtagaattttgagaaaacgaccgatgaagaccggtgatggtggtattaagatggatgtgcgatcgaggaagggcggagaggagagcttgagagatggagctcgagttggaaggaacggtataatgagaagtgaagagggtgagatatatgtaatctgagttgaaagttcgtcacgaagcaacgaggtttaacttggttatcatagaagtacggtagcactcaaaaagtttgatcgtctctcaccgaagatcaatccgacgtccattcgttctatctctgcatccgagcaagtcgcaacagctccaaacaagctgaagactatctccttgatgaacccctcccaggcactcccaatcaggctaccccacgtgtgcttccctgttctgcgcatccaatcaccaacctctcctccacccatcccagtccaggagtaccaaatggtcaatatgaggagatacacgtatcccaaggcgtaacctagaagcctgagaagcgcgcgtgtaaagctgaaaggggaggacgtggttggaagggcaggtatggacagcccggaagctccagagtgaatgaagtgtgttgttaacgggatgtggtgtgagaaggaataactgaaggatgttggtgatatagaaattccaagtgagcggtacatagcaatcagccgagggtaataaccttgttccgagagatagtcattcattgttcacattggcatcagcatcatcgaaagaagaggagtaagttaaatacaaaagccgagacctacctccttggaaagagcgcatggggacatctacggcccacgtctgctttcctccaggttttggtgatgataatggcacatcaagggaattcgagaagaatcctattgagggagcctaagaatggggtcgaagtgacgacagatcagcttgcgctcctgtttgtcgaacaagcgattctctcttcatctattgttctttcttctgaagagggagaaaaacagatcgacacagacggtcaatcatggtcagacaagcggatgaagacgaaccttttcaaacagatggacttcgactatcctcccttgcttcctttcttcttcaagctttcgcatcaacaaccagacggtcgtcaatcctgccaagcccgagccaacaacggcaaccttaatggcccgctttctggaagagtatcttgcatccgcatctgaaggatcccgagacgacttcatactggattagagaacagattgggagtcgaactgatatctacaagcgaacgaatacgctctcgtgagttcttctgtgagtgatatcaacgggcagacgggcaaacgggttgttagtatttgaattatttgaatatacttgagtatacttaattaacaccccccgttaccctccctcttccttccctgctccttctacactcgccacaaacgttccttcgatcaacaccttcaactctcgttcgctcgacaggctctccgttctctttccatctcccatctcttgctctttctgtccaggaccaatctgggtgtcctgcttcagcgcacgcaaagaatctttcgtcaagtgggtctcagagaaagctgcttctagccatctcagcgtcatcgaccaatcatctttcgctcaagtcttgcctctgtttctatagattccaccggtagacataatattgatctccacttttcaaataggcacacatcgaccttctcgccggtctctttgccagaaaacagtacaagcagaaaaagagtcttcttctctctttcagcttgaaccgttttcaaccttcctacaactttcatgggttgtcccctccataatgcgttcctcttacttgcaaagaaggaatttaaacggcttctcgaacgaacctctccgaatggaggtcccaatgggagtaactcgtcctttaaccctaatggtaatctcggaggttcatcgtcctcaaccctaaattggaccggtccctcctccggtcctaaaagctggcagccagcctcagtcatccacggcgctctctcgagctcgtccggtcgagttgacatcaactctcgagatcgatacgggcggacgatccttcatctcgttgcgtcctcaccacaagagtcaacagcagtcgattatctcaaacttttacttgatctcagtccaaagaatgggctgaatgtcaatctacaggatattgaatctggttggacggcgcttcatcgagcattgtatgctggaaacctcgaagtcgctaggattctattgttagatgaccggatcgatcccaaggttaaggatggagaaggcttgacatgctacgatctctacaacagtactgtagaaggggtgagcattttgtctctctccgccgattccttctctgtcgcgtcgtgcgtgatcgggatcagactgctgatgctgttttcttctttggtcgcgcatcgtatttagacaaacccggcggaatcaacctctacgaagcagattcttttcacttggggcactaacagaaactgtgtcctcggatccggggacggaggtgaccgcattttgcccgaaaaggttcaccttgtacgcgcagagaagaagattcatccaaaagccgcgcagtttacgaatcaagaggaaaccgagagcgatagtaatacagatgaggaagatgagtctagtgaagaagacacaaaagaggagaccattgagattaaatccgatattcgaaggtttgatccggtgggcgtgaaggacgtcgtgatggccaagcttcacacaggtgtgtctgttttcttcgctttgggctgtactgtctcaaagtgctcaatctgacaaaaaaacatctattctcaaactctacaacagctgttatcacaacggaatcatcaagcaatctcaacctctgcggattcggatctggtggaaggttaggccgttctatacacacccagtacgacatggctccgataccttctttccctcaacagatcgtgtcgattgctctcggacaagatcatactctcgcgcttaatgcccatggacatatatactcctggggactcaataagttcagtgttcttggatacccggtagaggctcctgctctaggatcgaaattccagaccgcgccagaggaagcaatccagacgacgcctagaaggattgttggtggtttcaaaaaagaaaaggtgttgggcgtggtagccagtcgatgttcgagtgcatgttggacggaagactctgtgtggacatgttagtcctgattgctctttctcagaattgtttcttttctcaactagtcgtctgatctgtttggtgaatacaatttgtgtcttcgttcttagggggatacaacaacggtcacctgggatacgacagtggcccaaattctgctcagatatatccccgaaaagtggccggtgcccatcagactgtgatcggtcttgcaatcaccgattacgcgcttgcctgtctcctctccactcatgaagtccttgtcttttatcacggaacatctttcaagattcaatttcccaatcaccggcggtttgcagagtcagcgacttatcgaccaccaggatcccagaagaaactgcaggtggttaagatcacgagctgtggaatcacatttgcgtgtttgacctcgctgggggatgtgtacacgtttagtttaccgaaccccttggtggctgagcgggaggctgtggcggtaggaagtacagcacagaaaatggtgaagccacagagggcatgggctcttcgaaaacgatttacggtgagttcgatccttctttgttcccccgatttgtgatttgtccatccacgtatgtccgcttctgctcaccgccttttcatgttctttctttccaaacttaggctgttcgggatgtggccctagggtctgacggaatgatcattgtgtgcacccagtctgggcatgtgtttgtccgaactcggaacaataaaggcaacgtttccagcaatcccaccggatttgcttctggctccaaaacgtataaatttcagcgaatcccttatctccaacgagtcatcaaagttgccgccaacgaatctggcgccttcgccgccgttcgtgtagatgcatcccctaaacctgtcgatatcactggaaactcggtgggagaggacctgatgcttctgatccctcatgttcgtcgatggcaggagagcagacagaaggagacattcctgcctaaggcagaggaacatacaatttcaagagacgacctagatggggacttggaaccatatgtgattcaatcagacatcaaggtagcatgtcggttgactgaaatatgcgaagagtggcagccagcttcggcatatcctccgttgatcggcattgcaggaagcgattgtgtactccgtacggccggaagggatacccctgttcatcgaacgatcatagcagcaaggagtccggtcatccggcgactgctttccgagcttgtcgctgtcaaaaagacgccgtctggaggaaacaggggcgtttgggcggaagtaatagaggacggaagaacccggattcatcttcccaaagtggatcattactcaattcttttgttggttcagtacttgtacaccgatgatttcccagctgtgtgggatccccgggtcggtgcttcattaaagcccttcacttggtttttgggtaagaacactctcctagggaatatccgagtggaaatgcaatctatagccgatttactcggactggtttctctttcggcctctctctcgcgattgaccaaaaacactcctgcgccaaccttggcatctgatatggcgcgattgttttcaacctcatattcctgttcggaaaccatatcttctctatcgccgttccttcgacccaacgtgatcgtgcagttggctgacaagactgtcgcatgtcaagaggccgttcttcgatcgcgatcgcctttcttcgcaggtttattcgaagatccttgttggacacttcttcgtcgagatgaagctggcgtcgtcaaagtagatctcacatacatgaagtggagtgttgtccgtcttgtgttccgatacctttacgaaggaggtggagccgaactattcgactatcagcatcaagacaacgttgacagtttccttgactttgtgttcgatgtcttggaagtggctaccgagttgatgctcgatcggcttgttctcgtctgctcgtctgtcgtgcttcgacacatcacgatacataacgcatgtggtttactcgccgacgcctcattcttccacgccaacgcgctcagggaatccatcgagctgtatatttctcaaaatatggagaccatgttagagagtcatctattggataacatgccatcggatatccttgccaatctttcgagttatgtccatcggcgacaaggtctacggctacctatctcgcgctccggcgtgcttctcacagcagctatggagcgacaggccgaatggctggctcttcaggatgtgcctaaaccgtatctacgacctgccaagtcggctctggccatccaccgatcacccggtctgtctcccatcgaggttacatcaaccctgccgccgcccccaaggagatcctcatctaccaccattatcggcggtacccctgtccaatctagtccagcattcaaatctcagctgagatcggcggctgaaggtgatgatgatatgttccagatggatgaggaccaggacgtttcgagcattagtcatctagtgtctaacgcgtctattgaaggcgcggaagagtcggctggatcatcagtaaagcgagggtggacatctcagaacgacaatagcaagtaagtctttgcctaaacagacagaatgttgatgagcattcagagctaagacctaccttgctttccttctcttactaagattgaatatgagaagtattatagctgcagaatcagctgccgcttcacgacctagacctccacccaccccagtccgaccgccaatcactcctgaatctcaaaacacgtctttcagactctcccaaaaagacaggaagaagcttcaagctactcctactgcaccagtttccacaccagctccgacctctttgaccagtggcggatcatcctccccgtggcgtatgactactccacggacgaactcaatctctatctcacctgcgtctatcggtctcactatggcttctacatctgcctcacgtccagccatgtcgatttataggaaagactctgccccggcagggtctacttcggttttccctaggcttgcctcagggtcttcctctccaaagccttccaccatcggcggtggaggtggtggaatcactccgtcggtgactccttcatcaacaatctcatttccaaaactggggtcaaacgcttcaggaacagtcattgtaccgactcgtgcaccagccacatccaattcttctttcatcactcgaaaggtttcctcgttcgttcattcccctcctttacctttcatctttgtcttctgctggtttcatcacgaccatgggactgactaactcactgtccttctcctttggttcatcaatgacagtgacccggcatggactgtaccttcatttggaactcctattccagagcctagtgcgcctgctacatcgtcgttcgcgcacatacagttccaacaacaagaagttcgagaaagccgaccggcgccgaccaagacgctgcttgagatccaacaagaagaagccgcttcggtgaaggcgaaacaggaggaagaagatttcctgaaatggtgggaggctaacgcggccgctgtggccgcaggagaaggttctgccgaacctggagaaggcaaacggacaggagggaaacgagcaggaaaggcaaaaccggccaaaggaggaggaagaaagtcagccggcgaaccaaacgagggacaaaagacaacgaaggaggctgtcgagaccggcaaagctagcggtagtggtggtggggcacggaagaaagggccacccaaacctccctccaagggaccttctcaggatcagcctttcagcgcaccacgaacaaatccagcatcgccagcacgccccaaaaatctacccggtcattacaacgccagtagcagcaatgatatcaacaacaacaataaaaacaacaacaagaatcatacctctgttaacgataaacatgcatcccaccaagcgcaaacagacaaaccatctggacctccgaatcaatcaaaagcttcgatctcctcgccaggcgtgccgttgaaaagagtacagagcaactcgaatcagccgggcaggtctcaactagcatcgtccttccctcctcctcctttcgttcctagtgggttcactcttccgccgacgtcaacaacaacattatcagctagctcagctgctttcgaaccttcgtttttgagaaaaacatgaatagtctagacttttccttatttgacgggggtttcacagtaatgctcttttgctcttttttgttatcttccatctaccatcgttctgggtttgtccctttttttctgtcccaatcgttctatcctagagagaaatcgcgcggaaggaggatatgtattacaatgtattaccaacccccaaggatgatctttctgatctcacgtgattggtgagaaagcaaaaggagaacggagaagcaaatgaaaaaagaaagcatttgaatcaatcccatcctctatctttgcgttcgaccagagctctaggcagtaccctacccgcactccccctccccgcgccatgacctctctctctgcccaatacaaacaacgcgtctctcatcgtgaccggcccaccattcctcctccaatcctcatccgttccgtaggacaaggctccaccgttcgcacccgaattcagaggcctcctaccgagacctactccgccaaacgtaggtctaccaatcgagcctgaaccaggtcggttcgcgtcgtgaacgtttgggccgagtggggtggatgtgacggctgagaggaaaggtttggaccagccaccacctgtggcagtgctggaggtgttgttattgtttgtggaagttgaaggattggcattcgtcccaatcaaagatgttgatgactgagcggatggaaccaggatagatgaggctgtaggtgtagatgaagacaaggatgatggtcccgaggctgttggcgtgctaggcgccagaccggatttgccaatgggaccttttaatgttcgctgagcgggtgtaggtgtgatgattcctaagctggcaccagctccaccgcccaacatccatgatttcctggcgattccagctgaatgaagagcaacagagtttgatactctcttctgagtttgttccgacatcgtcttggctgttactccaggccctgccgctcttttcgatctctttgctggtttctctccagcgttcgatggagtcgatggatgatcggatgaagcaggtgcgtctgactttggacgcttctttttgttgctctttgtttttgtttttgaagcttcatctccgttggtaggtacatgttcggatcccccatcattgatggtgtgatcggagcctgtaccatctttcccaccagtcacagaggattgacgatcaccctcggcatccccagaaaggtcgtgctctggttcctgcccaggcaacggatcatcttccttcagccctagagcctccctcatcagccgttcgtcctcctttctcttttcttcggccttttcctcttcgtcccttgcaaaccgttccctacgcctccgactttcctcgtctctctcggttcggtcaagagcggtgatgactcgacctggatcggaagtaacgacctgcgtccaccggggggtttgagtgctatcaggatatgtggcgggtggtcgactggcatgcgccgtcgtccgatgatctttggccgagatcatggaagaaagcagatctctgacgcgagtctcgatcgacagagccagataggtcaacgcgtcttcttcgatttggagagaatagcttcttgtggctatttatgaatgttaccccagtatcgcagaaagaaagacaagttctttgagcgcacgaaacaaagagtagaatgacgtggcaaaagatgaggaaggacaaaccgatctcggccatcttgcgtctaagggaaactgcatcgagaaagttttgttttctgtttcgattgatctcatctggtctcctaccagcaggtggtctagatgaagcttgatatgagtatcctctcgttgcttcttcttccgcctttttgtatcaaggcaaatgcagaaaggaatggagcgagagcgatcgacatgggagcagatgtcaataacatcgtatgttttagggaaaacgacaaggaaaagaaggtaacccactctgatgtcaacccccttgactgcatcatcatctggctctgttttaagtgtcgaggctataccggcatccgaatctctcctgaaacctaacggaggagtggatgcggaggtgggagtagaggacatgccggtagaaggaccggacattgacgcgtgccggatagctgtagttgcttggtggagtgttgtcgggcctgagtatgagaagatgacgcgtgaagtcgaagggcgatgaggaaaagtcgacattgaaagggagaggaacacagatatgacgatgcggaggagtgtatgacagatatttaaagaatagaaggggagagggtaaagaaacgaacgagagaaaaaaatggaaaggagtaggggtagggatagaacgaacctgggccgggctttctcgcaccaaccggttgctgtgctagtcttggaggacctacagggttagttgatccggtttgaagcggtggaggtgttggtggcggaggatccatgactaaagaaggactggaagagccctcagtaggacctagggcggaggccggtctgagcggcgcgatcgaggaggatgctgtcggaaggcccgaagcggagagtgtgggaacagatgacacggtcgatggctttgatgtcgacagagatgatgaaggagagagtacgacgtcaggagagggagcagtcgatgtgggtgtggacgtggatgtcgggctctttgttgaccttgcgactgagggtaggttgagcttgagcgagatgttggtagaagagtcaccgactggcagcggcaacggcggcggcggtggcgatggattgggcgatacggatacagagaccgatggtgtagaagcagaagagtttgctgttggagttggtgcttgtctgttgggagggagggataggttcataagaggatgggtgatggatgatggcagagaagaagaaggttggaagttggacgtcaacaaaaccgagcgggctattgatattacgacagcgagactacgcctagccagaaacgtcctttgtctttacaaccagcatacacctcaattttctccgcatacactcaacatgcacttattagaaatcgtttggaaggagaacacctacttgttctgagacagagagtgcgatgaggacagggagagagtactttggaacgtcaggggtgtgagcgacgatggtgctgcatagagacaggcaagagccgtagtagcactatgagaagagactacagaaaggactacgatgggtgatagaacgagtaccacagagaagactacaaaaaaacatcgagacagactacagacagaatagaatggacactacaaaaagggacgttcaacaaatgactacaaagatatcgacaccacactacaaaccagactacaaaaaaaagagactacaaccaacgacgggccgaaaggctgtgtgatggatcgttcgggctttcggtctcgctctttgtttcttaacgacatcattcgactctccatccactcttagactcatatcaaacactcaacatggtatccccacactacgactttctcatcaaacttcttcttatcggtgactctggtgagtcggtgtttttctgtagttggttgtcttgttttcctctcgtttacctctcttttggtattaggtgtcggcaagtcttgtttgctcctcaggttctgtgacgatgcttggactccaagctttatcaccaccatcggtatcgatttcaaggtgtgtcccagccgtctttctctatatgttgtgagagcgttcgttcaaggtacttctgctttgtgtcctttcagattcgaacaatcgagctcgacggaaagaggataaagcttcagatcgttagtttgtttcgcttcttactccttttcttcgggtcctctggggcccgactccacctatccgtcttatatacttactcccaatctcattccttaccatattgtctcttctatcattatgtcttttgtactaaagtgggacactgccggttagtcaatccaaacgtacacacatacacgcattcatgcttccgtaacctctaacaccttacacttttcatctttcgctctcacctactcttttccctgatctcacgcaaataggacaagaacgattccgaacaatcactacggcctactaccgaggggctatgggcattcttcttgtgtacgacgtcaccgacgcgaaatctttcgagagtcagtcgccttgctcggtcgtatatctatcgtttctgtgaacttcacgccctgacctatcttgcactgccttcctttttttgtacgtccacatgctttgttccttattagatatccgaacatggcacaacaacatcgagcagcacgcctcagaaggggtcaacaagattttgatcggaaataaatgcgactgggacgacaagcgagcggtcaccgttcaacaaggcagagaactcgcagacgagcttggtctccgtttcctcgagacaagcgcgaaagcaaacgagggcgttgaggaggccttcttcaccttggccaggttggtcttcctatcttttcctctctctcttacttcctgttttcttctatctgcccgcttaccgcttccttctctgaaccaaattcctctggatcactgcacagagatatcaagttacgcctgatcgatacccaggaggcccaaccggcaaatgtggcagccaaatcttcgagcaatgtcgccgttggtggaggcaaccagtctggtaacaacggaggatgctgttaaatctttccttctttctttcactctcttccattaccttcttggtccttctctgctttttgtccttcattcaactttaaggtggtctaaacgcttgacataatgtcctgcattagagtttccttcgctttctcgacccatttcttgtcctttcttccacacttgttttctgtttctcctgcttcaatcatctctcgccatctaacggttcttcctttctttttggcgtcttccctcttactctatacacccttcatttccccattacactatcctatacacttatatattgacttgagaaaacgtttcgatccggtcgtgttcgtcctcagccttccaggggttgtgatcttgatcggacagaaagataatatcgatgtacggtacatactgcttctttttagcggctcgggccgagagaaatcacgtgcttgcttcgtgatcacacccggtcaaagccgagtcatctcatcttgcagagatcacctctttcttttctccctcggctttctttttcacttctttcctcccaaccaacatcgtatgaacattgtccgatctgttctttatcgaccactcatctatcagcctttaagtctctctcgcgcctctcgaaaaacactacacctgaggaatatgtctggtgcttctatctttaacacgactaggttggaggacaaaaccgttctgatcactggatccgttgagtgtctacttttcgttctttttcagtctacatttcaagattcggaatgagaagacgaaaaatcgagagtgaaggctgatcggctcttttaccaacaattgatgtcttgtctcacgttgcacatcagtctggaggaatcggaaaagcaaccgccatcctcttcgccaaggtatattcccctatctttgttcatcatccgactcatctctgtccgctgaagtcagaagcctgatgcactccctccttcatcatccacctcgtataatctataggcaggtgccaacttagttcttctcgcccgccgaaagactgagctcgaagctgtcaaagctctttgtgaagcagccaacaaagaggccggttcgggcaaaggaggaaacgtcaccatcgtcgaatgtgatatctcgaataggagcgctgttgatgctgccttagcagccgatggagtaaaagagtgggctgagaacgtagaagtgtatgttcatgttttgcttttgcttcttttgccgctgcttcttctccttcttcttcttcttcaccacagttgtgttccgaataggtcgctcatcctacttccatttctctttcggtcgaacatcttgtcatgtgcgccaaatgggattacagtctcgttaacaatgcaggcctagtgaaaggcgtagagaaggttggggatattgccgatgaagacatcgatggtccgtctctattgctattcctcttccctctttcattcctcttccatgttctctaaaccgaccagtggatcttgttcttgcttgacagtcatgttttctaccaacgttattggtctcatccatctcacccagaagatcgtcaagtcgatgaaagccaggcagactggacatgtgattaaccttggatccgttgctggtagagaggcttatgctggtggaggttcgtcttgctctcctttctcgaacgtcttttcttttccattttgcattattgggaacactgatgttgatgtaacattgtatgacataccttattccttcagcaatctattgcgctacaaaggttcgttctcaaatgaatcttctcaaacagggatattttttatctgtgtttattcctttcctctggctgatcgcatgctgttcttatctaaatcaaatagcacgcgttaagagcattctcatcatcgctgatgaaagaattagtgggcactccaatcaggatctctgaagttcagcctggaatggtcgaaactggttcgttgatttccttgctcgctctctcatctttccttcttgtctttacgcgcctcgtagaagcacttaacaaaagaatttatctggggacggggctgcttgatctatagatttctcggtcacaaggttcagaggcgataaggaccaagccaacaacgtgtacaaagggacgaaacctttggttgctgaagatatcgctgaggagtacgtccatcttcttcatcttccttgcgcgagccagagaaaagtcttggaattgaataattaagcctaaccatcatttatctcgacacgttcggtaatcaaggatcgtctgggtcgctcttcgaccaaaacacgttcagatcgccgagctcttcgtcttcccctcctgccaggtacgtcctcacctttatattatccctataaagatccttgggatgctagacactcacttcagagattggttgttgttgttgttgttgttgttgtaatctttgtctcaggcgggtcccggaatcgtccaccgagagtaaagaaagaattatttacggattcaactcattacctcgttaccttcctgttccccccttctctttttgttttctctacaccaaagtgtgatctgtgtgagatttaaatgatcctaagacacatcgagtgtcggtcgtatgtgatgattgacgtatggaacgcttattcatgtatataataagtttcgttgagcttcattagtctgcgctcaaacggaaacatccaagggctgattgtagaaatgacgcatgaacggttcgaccctgagcagaagaatgtttatcgacggatgcgttgtgttctgtttcgacgagcgatgttatgtcgttagcatagcttaaggatagcatgaagctatagaaagataccgaatccgattggaaaggaaggaaggcaaaaggagaaagggaaccatgaagagaaaacgaaccactctgttttgatcgccccccagggcaaagaacccactgtcagattctttccaacccagagtcctcacaaatactctcttccttctctcctctgcttcttccctttccgcttccttatcctttcctattgttgtggtggtggttgtcgtcgtcgtcgtcacaggtgtctctgttgacgaggaagacggccgagatgttgaactttgcacggaaggtcgccacgaacgttcgaggtcttccattcgagagggagaaaggacgagtttatgttgcgcggccgagagacctgataggttgttagctgtgtgataaaagtcagctttcctttcaaagaagggaagccaaatgattgaggaagaaagaaaaacgccattcggtttggaacgtatgagtaaagatagagtttcaagagaagaggagaaacgcgcactttggaggtttgtcagcaagaccacccttggaatgttgagccaacaaaaggatatactcctgtaaagctctcctatcaaacaactctatttggtctagactagataggtctctaccggcaccgacggcgagttcttgctcaagaactgcgaacgaacctccaacccaccaaccgtagcatccatccaccagtttgtttgacctccctttgaagccaccaccatctgctgccgaggcctgcatcatcacgctccatctcagtagcgcgtcaagatccaccccgagatcgaggtttggctggacggaacgaagtaaatggagagagaggagagcgcatgatgtgtatcctccatgagcttcgcctaggggagtcgagaatatagagtcctggacgctacccagaccgggagggagaaatttggaggtgaaacaggaagaaattgaggatgggctggcagagaaaccgccttcgaacgtctggcaagaagcgatgaactggccggtgttgtgaacgagttcaggagttaacagatccagcaacgtagccgtgaccaagagacagtatacacctctgaacgatttcaatgagaacgcggtcgtcagcctcattccctgacgatatgcaggaaaaggaaatgaaaattgaaccataccgaacatcgacctctccgccatcacacacagtgaaccctccattgggtcgtttcattcgcataaagaagttgtagatcgcctgccggtcaatttgatcccaccctttacccaatatggctaaagaacagacagaggcgtatgtcggaagcaggtgaggggcttggctgatattacctccaaagcctcctgaagggtgctgacatgccagaatggtattcacccctctagagcgagggaagaacggagaacatgtcagctcaggagtcaattaaacagataaatcatgcagacgtttcagaacgtcaaaactgcttacctctctctggtaacttcgtcaagggcgataccaagaatatcaaaggaatgaagaatccaatagaccatccagggacgactagcatcgagggaaacatatgctgcaggaagcccaaagagattccttgcaagaaactgtacatggttctgcttcgctaagggcggtctgagtatgcgaattgttacattaagggttcagcaaccttgaaggtgaatagaggatgaagatagaggagagacacgaacggggatccatcaaagccgagagttgacttgtgaagatcgatgagcgtgctaagaaacgcctctgtattaagctgaacatcgctcgtctctgtttgcacgccgtctgtctggaagctgactgggttgctagtgagagctgacatggagagatggaagtgatgatctagatatacgatggggatgttgaaagtgatggtctagacatacgccatattctatgcggtctaagataacgagtgttggaagtttatttgttcctctatcgtttccgtatttttctaatctttgtcattccgtatatagatagctagtttatctcttttctacttctttttctcttaaccatatcacttgcaccttgtgctggtgtgattgtttgacctttaacattctagaacaactttactttgtatatctttgactactagaaagtaatctcaactgatgatggtcgatgcatggtccttctggacttaggtgtcctcagaccacaaatcaccaaaatcccatgggtcatgggtctgttttgtcctcgtcgatggggcaactttagcggtaagagcaacaacagcagtggaaaacactagcattctcgctcccttgttctcctcctggtgaaggcctaggtggagtatgttgtgcaacgcattgacatccctgtcccactaagtctgagagtaagcagagagcaagcagaaagaacagaagaaaccgattagtacttgacacactatcttgagacatccaacacaccagacccaccagactgacatttcgacgccccttgggcgcccacgctttgtttcctcctaagacctcaccatggcacttggaacgcactctcgatgtccaggaattcctggactttgcgagcctggaggggcgggaaggctttcagcttggcaaacagcatcttcacagggcctgaggcatccccacgaagggatgatgaaaaggtgccatctctaaacgcgataaaggtgcgtgaacgttctgctgccagacgaagtgtcagcttgtggtgcgcttgttctcggccgacgtgcgtattccagcagagacgtctcgaccgtcggatagcgaagaatgtcaagatccattagtatgactgggaattcgaggtaagaggaacgcaaatctcatcgagaatggcagttctgaacagagaaacatctgaagaaagaagctgaggggagcaagatggtctgcagtgtcagtaagacagtttacccaatgaacatgagcataaggaacacttgctatagagagctgttgacacttccgcatggttcttcatctacagccgatgtttctgacggcctctgtccatccccgcgaggtgcttccaaagcttaaagaaatattgatcactgcatgcctcacccaagcagatcaccgttgtccagagatatatccaacccccttgtagtcgtcagtcatcgagagaagcgtccgacgaccagggtcgagacccacgacctcgtcctctggctgcacaccccacggaacgtattttgctcgatgacgatccttaccttcgcccttccatctacatccgtagtcgtcgatgccaagtggaggcgacgtagacctcagtactccggcggaaatttcaatggcgtctgtgatgagcgaccgggtgaaaaggcgacattgggtttcgcctctacagacctgagaagaccgcttccaccaagtgtcggagtcagcccgaagggactcctttgtcaccccgcgcatgtgccagactcatatctcctgacctaagctgtgcactaaggtcgtggagaatctagatgtctacaaagacgtaggagtatcggtgggacgaggtgggcaggaatgagaagaggcagatgctatgcccccgacgacgagtagttcgtctcgccgctgcatcttggaagctatgtaggctcgaacatgatgattacacagcgcgaagagcgtagataggaccaccacgaggccttgacaaccttgcctgtcagagacagacttcctaagatgttatctgagagaaaagtgatacagtactcgcaaacgagcctccatcaccgtgcgctgaagaggaaggaagggttcagaagccaggatggggccatcaagcttgtgacaacttgtaatggtttctcttcttcctcttttctttcttcctcctcttcttttcgtcagacaagggggaggggacagctgctctcacagatgatgagagaaggcagggcgataagaacgatcaagtatatcagtcatcgtttcagtttttcttcgaaagataattcattcatctttatctgactattgttgaggcggctctgatgtcttctccgacgtttgtctccagcagccaccaggatacgagccgagaagtccgatccgacatttcaaggacagcatggttctgacagaacataatccacgacaaagccttggcatcgatgactatgtctagacatctatgacgatagcgagtcggccagtccgtgttggcagtcagctgcatcatcgccatggccagagagaccaattacctcgagctgatgctcaacagggaacggggtgtctcggatgtgatcgattcttgattccgtataattgccccttggtgcggattctccacgcctgttgaagaaaatagtctgaaaatacaggcgtatcgtcgaggaaaggtctgggatgggggctccatccgagcagagcgccgggatatgcagattaatcagacgcgacgtgtcgaatgatgttcttctcagcccagcaatggcggactcgatcgggcccgcaaggggaccgaaggcgagtaacgagctaaacccgatcctcaccgacagtgttacaagagggaccgctggagcaacgcgaatcattactttctgggatggaagacaaaacgggcatatgtgattggatcgccttgagttgccaacttgatcgcaggctgaacatttaatagtatcatcagtcgtagtaattgctagggaagatctcgtccgagcctgagccgtttccttgcggttcatatcgaatgcaagtggaatgaaacttctcaaggcagctaacgagtgcactaacaagaacagggattgttgcgcggaagagtgtctctgtcgccccgacttttctgtgtactacgatctgttggaattagcgcctccttctttacagaaggtctcctgtgatgggtttgactggttgtagaccattacgaacaacctcgtgaacgctctacagctcatagcctacggacaaagatatgaacggacagagaggtcatatctgatcgaggcgcctgcagctaacctcggtaatgttcatctagacgttcgataccaggtatacaacatgaacaccaaagtagtacagtcaacccagcacgaactccatcatcttcagtacgaactgatcctgcctgatcccgaatgatttggaaaagaataaaactaatgtatcaatgaatgattgacataatatggagaaacattaataatcagcttatcggattttaattttcctctcggtcaatgccgtcagctcccgaactatcgacgaaccatcccactggatccgtttaaattcacaactgccgtccctgtctcggtgccgatgcgatcggaggttgtggagctgtacgatctggagcctgagatcgggagaccacgcctcgccgagttctaaagcgaccttgatcgccctcgacggtgagcgggctcaattgggaagctcaatttgccaacgatcttgcgcctgtgaacatagacgccggcgaatgatataaagacctcacggctccggtgatttcatctcctggccttttactttagccggccaggacgaactgcctaaaaaagcgtatgtccgccgcttaggtaatcgtttacccctccactttctatctgagcaatgtgttcttctcccgctctctccatacatcgttttcgttgatctcgcttcttttcttggttctacttttcctcttttcctttctacagttccttttattctttctctttcgtcttcttctttgtaggcatctctttggttcatccttccgttagtgtccgtttgcccgttagtgtccgtttgcaaggatactcatatccatcgcgttctctaccacagcgtccgcctgtcaaccaagcaggttcatacatcactcgtctggtctagatccagcatcaatctttctggtttgaatcgttttggaaccgacgtaatcgttttggaaccgacgtagtcgatcgtaaagatctggacagcagctcttttcgcgtccttcttgttcttcctcatactcggttcgcctggcaacagaacatccatccatctttcttctttctttctctcttcgcgtttgacacacgatggaccactcggatgtatctgattcggcaaaaaaacggatgtccaagtttggactggcatgtttgaagtggtcagtactctttcagcccgtatccacttctattgtggtcgtcagaacgacaagcacgtacacatacacacgtctagctccaagattggcgaaggctgttcccgctcgtcagcactagctgcattttgctcccggtttcatccatgtgaactgcgttcactggtcttacctgcctcttttgctttcattctcaaacgtgtccatccggtcgttccttgtgatcatcctctttaatcagtcggtcacgcaaaatcaaatgcgactctcgaaagcctgtttgtgaaaactgtgagaagaaagggttcgaatgtgtttttgacgagactccgtacgtactacctctgcgttctctaattcttttcttcagactcctactcaaacgtgctgccttcttatttgtttctcccattcaattttctcatctgaatgtcgcaggaaaactcgaggaccagacaagaatccaggtcgaaagcgtcgaacggcagcgcaaatgcacgccgaggccaaacttctccggggacaaggtctttccgaaacttccaagaagtcttccgccaaggctgcctcgtccttatcctcgatagaaaagaaccaggctttcagcaatcaattcaaccacagcgccgagttttcttctcaacaacaaatccccacctttctatcacccaagattgatgagtcgtcgagtgatggccgtcggtctacttcgtctaatgatatgctctctgcctcatctagttcaggtctcttaatcgacagctcccatgttcttgcatccaatccaagccatccgtctaaccacgtcgccgacctcagacggccaggtcctcccttcgcctcagggtttccatcgcaatcggcagatgctgacgaagggtctagtgacccttcgtccttacctattaaatttcaccatcaacatcaacagactcgtcatcatcaccgtcaccaacaacaaaatcactacatccatccatcagcaatagcatcttcatatacttacggcgcccctcctttgtctttacctcccccccagatgttctcccatccttctggtacttactattcgtcgcaggatccatccatgaatgcgcgtctatcctatcctgatcaatcaaacaacgagacatctcaactagcagagtctcacagcccaatgcgtcagccctctcaggcaacctctgtccatctcgcacttgtgagccctgtgccgagtaacagtaatcaaaatatgacctcctcccaaaacaattcctatcagcttggatacgataatcctagaacacagtaccagcgataccagcagcagaacgatctgcagcagatgcaagcatcttcgataaatccgtcccattctggacacgtctaccaatatccatcttctgctcctgctagtggagagtctcaattgtcttccggctaccagcactacaatcaacagagggcattatatcaacagagccgacaatcaatgtaccaagctccaacggtatcatcttcttttccgccttattatcaaccaagactacctttgacatccacaccgactcctgtgtatgaccaggcccaacatatggaatactatcctcccctccatcaacaacagcaaccagatttctctcaccaggcttaccagtcttctccccgattgttggggaagcgtcgatcggaggaggccttcgatcaagttcctgaacagagtgctgcctctcaggtcgaacccgtacgaaccaacgatatcctgaagcaacccgatcgaccaccaatgtcctcaagaagaacgagagaagacggacagtacatgttagagctggaattatcgggaaaagaaaaaatcgaaggtccgtctgggaacaatcttgatagctgggctctccaaagagcgacggccgacagattggtattgaacgtatgtcttcttcttttcggggggtttgtttctttcatttcttttttgcctttctctttccacgccgtttttggactggcttgccatcggatctctgtttttgcgggtaatcctgacagctcacaaatgatctttttgtgattgctgtcttttcccacttccttcctgtctccttccgggcttttcttctttgcgctcttctgtttcgccttttttttttttcttctcttcttcctggtctctctttcctctttgtttcttcgtctatccatcttgttttcctcttttcttttgagggggtttgttccttttcacttattaacggtaggatttactctcacccggggacccgtggatgcctagtcttgagttaagtgggatttctggcgtacgcacctttttattttcgtgtactctttgttgaatccgtgtctcacggacggtcaaaattacttttcggcatgatagaacgccatcggagcacccttgttcgtattgttcccatcctttctgcttttgatccggaaaacgtgcctgcgtacacttttcttacgtcctgtctctcttctctctgaatttttatctttgtgtttcacttcgggtgctcagctcaatacaatataccaacctgccgtttgatttcaaagggtcatctttgtcaccaacgatgatcaaatcgccctctatcgaatattcgaaaaagatttggtgggactgcttactctcccgctatggccaaagtcgcccggaggcatatgcagctatcattaaagaaattctgtaagcttttctcccttcttctttgctgtatcggttcatcaagcggtctgacgtttggttatctgtctctttatagaacgctatttcggataagtactcattggattgcgttcttcaacgtcccaaggtttcttgccatccttcacaacccggagcaaagacaatgtcttcgtgagcaagaccatccttttatatgttgccttttcgtttctacgttgtgcgccgtttctgaacaagctttatgtgttacatgtgctcctgatctcgacagagccatcgctcgtatatgcaatgttagccctcgccacccagctcacctcatgggacgggccaggcggtcgagaacttgacggaaggttgttaggtctgaagttgaatgatcatgcccataacagtttttggcaaagttggaactctggattcatcaagtgtgtttttttttctgtccctacttcacacggtatacaaatgttgtgttgtattgatttcgttgcttggatttcttgtctggaaaagtgttgacctcgcgaaggccgctttcctcatgtcactttatgaggtatcgtctcaccctttgtacactagaacccgagcatcacaaagcctagtgcaagtcctcctcgcctatttctgatacgtaacaaaatggggttgttctctaatcttgttttccttgatatagattactcgatgccgtcatccgggtactaaacttgaccgcgatggatgccgacaaccctcgagcgtcgagatttcagcctgatgagattccaaggataccggcagatgcaaggcgggtttcgcctgctgattacgatgagctttgtttgcatgctgagcaaagcatagtaaactgttcattctggggtgcgtagatgttcgatttctgagtatcaaggatcacgacaatagagattcttcgtcagaggctgacatcctcgtcaatcgtccacagccgcctgtcctcgatggagcaaaccaggttcaacctacgttgatcacgtcgagatcgaaaaagaagaagcccgccggttgtgttggagttcctcggccttagctgccagtgcttctacatacggtcataacgtttggaagacctacaataatttatcgatcgccaacacagcgaattacgcgctattgtttcctggagaactcttgacagaagaagcggatcggataggaaaatcctccatttgggcactttatcatacctcgagtttggtaagcgctctgatcttcaccttttggtacttggagcagtcggacagttcgatctaatgcccagcaatttcttcatcagatatggcatttctccattcgcctgcacaacgactcgagcgtctcgccaaaggagaagcaaaagatatttggttggtcaagattgtttgaagtaatatcactggtatccatacgcatattaattttctccaaccaaactgcatgcagccaaaatctgggaggccacagaagagacagaatcctactttggtgcagtcatatcagataatcttgtctacgaaggacagacctggcatgccaaagtcggaagcgtatgtgttgttttaagtccccgttcgcccatcttggtttagtttctaaacctttttcttctcttttttcttgatcggttttcagttggcctatgtttggcaatccatagactggctagcgacgtctcggtttctgatctacgacgcgctggtcgaaacgatgaatgcaaggtgggctatattttcttttctcgcccttccttccgtctgttaatttacttaccagtatatatcttagcgaacatatcccgaattatccagtcgatgccgctcgtcggtggcttagggtccaagctagtgtcgcaaaaatggtctgtccaggtagggctttctcgacagacttgactcaacgttcagtcacgatggtcgaacatcggccgttttggatctggtggcttatccaacagttagcaaggtttgtccttttctcctttcttgtggatcatatgttatcaggatctgacagcaagttcggtgtacaggatgatcagtatgtacgaacgagatccatcactcgtcgacattttagacattgctagagggagcttcacgcccatactagactatcttgttaatctctatccatccaaaggttcgttcaattcgggtggtcttgctagcggtgcttgtcttctttctctactcacatcgtttgtctctatttgcttgttgtgcaatatatagttctcgcccaaaccctgtcaagccgaatcttttcccgactgaattctcttaacgaacgagctagtcattcctacgctgtcgctttcccagcctcgaccgctttcggtccgagatttcctcaattgagttctccgttgtcagatgtttcctcatgtggaggcatagaacagtcaacgactgctcttccgcttcttgacgaagatgttaaaccttgagccaattcagtggtcttttttctctcctttaccattttcttttctatttctctgtgccctaaattatctgcttctccaaacatgctcttcgatctgttgtatcatcagttccgtacacctttttattttatttcccggtcactactaaggtttccttgttcagctcttgggcgatgtgtttcccatctggcaaagcatgctattttccctctgtgtttcgctttcgttctttctcctacgttctgcctgaacttttccctgtagtctgatgttttttgctccttcttatcctgtcatttctcttttttgcattctgcaacggtcttgctgggaaataaacgctacagtcaaccgtgtttatttatcgtctcttcatctttcatcaagcgctatattcctccgtcgtttgttcacccttggtttcaacaaaatactcttttctttcttcttttctctttttaaaattgatcgaccacttggggtatttaccattactcagttttaaagatgaatcaagataaaatggcttgtcggtggtttcaaaacaaacgtgatctcgggctcgcttccaccaagaatcccaggctgatctgcagaggaatagaaactgattgagctttctgtgaaaacgaagtaaggagatggagagcgaagataggatgggaggtgtcttccatgttcgaccgtgtggtgcgaacgcaggtgtgtcattacaatgactttaaagtctgttccagggtctgtcgagtaagggaagggtttgtttctctaaaaaggcaaggaccagctcgttgctctcatccatatccctcagcgagcgaaagagtccaattcctctctccggttcttcgaggcaggttacttgctcgatgaccgaaattaaaatgaatcgtccatcgcatcctatccgacatatagactctcctccctactttgaactatgacattctttgctcgacaacctgcaaccctccatacttctgagcagtttttttcaccgcctgtcgaaataagaagaagaaaccccatcaagacgtcagtatgaagaaaactgcttagatcgtgttagatagcaagatggggtgaaggccaactcgatgaaggacgaacttagtgctgagcgttcttgtggtatccttgagaagaacagagatcaatcatccatgcaacagaaggatgaggtaaaccaagttagtgtctttgaacggaaagtaaaggggcggttggtcttaagccaatgagaagagacgaacggagatggtctgtttatgaagatatcaacaaatgcaagtgaattagcaaaaacacaaaatctagatagctccacgcattacagactagacagaaaacagtaggacttactgaagtattggatagtgtatccgaggacgaaaagaccaccaacgagggcaacgatgggctttctagatggttgtgcatcaccgattgaaggccgacatcatatcaaaaaggggaaagagagataatcagttttcatacgctcgttaacacagccagataggagtgttatccttcacgcagccagcttgaggataatatcagatgatattggtctgcgggaccggaaaactaggtcgatgaacactctgactgccgtcgctccgcatcctacgcatcggtcacgtcctttctatacgacagcattggtcgagcgacatatccatccattccactaatccatttctaactagcttcaggccatccaattgagagagaggacgcttggaaaggagaggagaaggtaagaaaagatgaacggacccggtagcgttctttccgttgacgaatttagaaagtccagtgtattgctgggcgttgggagctcgtcccttaggaagcttagtgtagaactcgatgactcgatccatgctggcggtggttcctcctccagactggattttgttttacaggtttttgtttaaatatccagaatgatgagaagccagtgatgccggggacgagttgaacgagcgagattgttagccaaggaaagcagcaaaaaaagatggaaaaaagtatctaatcgaccgaaatcaaaacgactcggacgtaccacggaagaaggagtggcgatcttgggggggataagggaagagaccatctttgttgattctgttcgcaagaaaaggaaagtgaacggaagtaaacgaaaagaaagatgggttggagggaagaaagagagggaggaggagagaacgaaaagaaaagtgatgtaaccaatgtgtgtaaccgatgcttatgtaagcacaaatcatcacacattggctaccccagaccccggaccttgtctcgctctcttcgttcaaggttgatctcaccttccatcttctggatctctatcgaccttcttctgatctctcttactctctttcatcaatcatgcggtctacgttggctttgaatgtcagtatgcttgatctggcttctgcctggtctccgttttgttggttctcagcgcctagggctcatggttagatttctgattgattaggctggcaccaagcgttatcccttcccaagacgagtctggtctccctttggtaagagctgtctgccgttgtgtctatttcaatggaaggattttactgagatatgtgttatttcatcttggtgtaccttcctgttcacaggaggatggtggggaggaaacaagaactggaaaaggaatactgccatcgttggtgcaggctacgttggcttgatgttctttgttgtcatgccttactcattcgcacatgaggttcgtgtctatcttctcgagacaatcgatcctgttctcttctgaaacataagctgatttcttgaatatgggcgttggaatgataaatgatagtggcggtatgttcccccatcgcggcctatcccgtcaatgctggttcgtttcttttccttacgactgatatccttccactgaactacatacgaggtcactctaacaaatctattcatctacgctcatcacgatcagttcgccaagcagtacaaagatgatccttacggagaaaagatgtttgaaggtcaggaggcatacgttcctcggaagcatcactaagcattcgctgatgaccagacggcgaaggagagaccggtcgtacagggtaatcccggttgatgtattctaaatcgttgtatcctccgtgtcaatgatgagcggacaagagtaggaatgtagggtttatatctgcgacaacaagctttccgcttgatgaatggttgttggcctatgagagatggtctaatactctatctgatttgatctcgaaggggtcgtctttccagacaccaagccaaagtcttctgtctgtctgtactcggtttgtttgctacaacaatgacatatcaaggagaacaggctaatttacaaatatatccaacaaacctttcatcgtcggctttcgatcggctcaagcgacatcatccataaatatatcggcagagccgtgccgaacctgtccgtggcttccacacgagatcaaagtgtgggatacaacatccatccatccaaagaatcaagtacagaccgggtttctataggacgttctctccttcaccgctcttcatcctagccgtccacatacagccaggttgaacgttgtgtcttcaataattgagaaaactagcccatggagaagcgtgacgactcaccggaggtctccgatcaaccaaatcctgaggcgaaaagtgcaccacctcctctcgatctagaagctcaacgcgccaatgtagacgtacctcttcctcaaacagatagtcatgctaatgaaaagaaatcagtatacccaaaatgggtagatgatccagaaaatccattgaactggccaaccagtaagaaatggagagtttgcctcatcgtctctgtcacgggtttactttcaacattatccagctctatggttgcaccagcaggccatcaaatcgctgtcagtgtggggagtgggaatgttgggaaaagggtagagacgctacttacagttatctatgtgctcggtttaggatttgtgagccttctctttcgtttctcagcctattttgttttcgttctccgagcacggagtcgcgtgtgcttcattcaacggacttgaaatctctctgcgttcaacagggtccatttatcttctctccgatagcagaattgtttggcagacaagtctcgtacatcctttcgacggttccatatgcgcttctgaccgcatcgtgcatcgttgctccgaagtatatcctatgtctttctcattctttttactatcaaacgttttgcaagaggccgaggactaattcagtgatttgacagcctgtattctcttatcatccttcggttcttttgtgggatctgcgggtcatcaggttcgtctcaattatatcttgggatctgttgagctgattgttcaaccaagcgcttggtctcatatgcttttactggtggtttatgtgtttgataatcgttgatttataggtccgacgctgggcgtagccactgtgtcggatgtgttttctcctgctcagagaggaaaaccaatatctatctatgcacgtaagtatgtcttcttgtgaccattatacacgtgtctagccttactgaaaacgcgaccaattcatgtacatagttggtcctatggcaggtgcgtctatcaacgtatctttgtgttttgtcttcctctttctctttggtcaatactgagaaattagacggtgtatacctcccatttttaggtcctgtgatgggatccatgttcggtggatggctgtctttagtaggatacaggttggttaatccttttatacgcctcttgcttcacaaggctgattcttttgtctttcgcgcatctcattcgtgataatcataggtggatttttggcacgttgacaatcatgaccaccctcaattgtgttgcgattgtgctatttatggaggaaacctatgcaacgtacgttgtccttctcttccaagcgtctcgcgcgcattcttccgacccatagctttgatcagccgatagtatcgcttctggttgttagcgtggctaaatctcgactgtgttagcattcgccattcaccctttcttctcttggttctgtcttgatgtagtacggttaaattcaagcttgaacatagacgaaaaactcttcaagccaaatcggctgtagggtcctcgtcttcctcgactgtatgcgaagaagatttgaatagaaaaatcgctttcaaagaaaagcatgcatggattgcttcactggtctctcaggcaaactaccgattggtatttcttagggcttttagtatgtttccaatcgtttcctcgcgtcgctcgattggtcgatattgctcaggaagacatggctgctgacagtcttcttacttgtctcgatgttctgggtcatagctcgcccattcaggttcttgttcaccaaccctgtactggccatctttgctttgtattactcatacatctatggtccgtgtttcttgcatatcctccgtccggctggtccacaccaagaacacacattaatctctccgttttactctcctgtgtatacatcgtgataggtgtcatatatctcctcatcatagctctacctatcctattctccgcgtcggacgctctgcctggcctattcagttacggctggtcatccgctacttttcctttagcgtttctcagtttgggtacgtgagccctctcgagctggtttggttattcagctgaaaggccgtatgtgagaagatatattctgaccatggcttccggaaatatgaatctatcgacacaatcaggtttgggatttttctcggcagcattcctggcagctactatgcaggcaagcacatttcatgttcgttctcgtacaaaaggaggcataattcttaccgccccgtgtggtgttgcttgttttagaatcgtatatatgctaaactttgcaagcgatacggagataacggacaacctgagtaccgagtgcgtttcttctgagaaagatatactttgtctcaagattttgtttctgaccagttgctttgtcctttatcgttatctttcttaagcttgtccttactcagataggaatgattttgtaggtattctccttttgtctctatcgaaaagtagtagtcgtctgacacatacgtttctgctcatttcgacagcttccctatcggctggttcatttttgtgagtatcgatttctcaggctgaatgtcacatatcttctcaacttatgatggtgaaccttgtaatcatacaggcatggacggcgcacagtggggcgtactttatctgtccgatgataggactggcgcttggtggatttggcttgatgttggcgtttaattccattcaaaattttgttggtaagtggatccgttggatctgaagctctgcgcaagcatgtgtcaccccaagatttgactgatcaacctcgcttcttattttgtcaatgaaatcagttgatctcacatcgccctattctgcggctggtacagcgggtatgtttcttccgatctctttatctttaaaccaacctccctatctgatcataccttgttttatcctcttaccattctgatagctatctcatttagtcggtcgatcgtcgcatgcgtcctgcctgtctttggcccggacctcttccaagcactcggctggaactggggaggttctctcctggcgttcctgtcgatgctcgttatgttcgcgcctctaatcatgttcttgtatggtaaacagctcagagagcggttccaacttcgaggttgatattgtagaattatagaatattgttgtgtcatgtttgttatatcagcgaacctccctgttcaaatctgaggctgatgttcaagctgaagttgacgttgagatcgatctgccccagcaatggggataaactaaattcacaacccatggaatcttggtggtttgtggtctgagggcacccaagtccattagggccatatatcgaccatcataggttgaggtaactactctcaccaagcccagagtttgacaagtattcaaatattctattcgttagggttgcatcaacctctcccaccgcttggatccgtcatcaccttctccattcccaaatcatctatgtagatccactgggccacataaccatggcagcccctcctcaagccaatcatttcctggccagattagttccgtcctctaacaggctgcttctctatggtgctacatcgaccgctctcgccgcctctgtcctgctcaatgccgcacagaccagatcgtccttctacgcggccgctgttgggatcgcaaagagtaatggctctgtgatggtaagtagccgtttctattggttctgatgtttacatgggatgagagggaaagagaggagggaagaagaagtatcgaatggcatcaggatgtctttgaaacgccgccaatggctgaatcttcatcatcttacccttgtttgggaattggactggatcacacgtcatcacggtcaggtccttgccaacttttgcctcttcgtgtcgctcatgataggcataggattccaacgcctattctttggaagactcaggcccatcgaagtcgaggtgagtgatggatcatgacatcttgatcgtctatctctattcgagaactaactatgcgtttcttgttgggaactatctttcagcacttgtacgatcggtcatggtacttcttgacagagtccttgttagctttagccatgttccggtaagtttattcgaaataagaggctcttcggagactagttgttgagctgcttgtcgtctgttttgtctgtcttagagaggatttcgatactacattcgttcttctatttggcggattactcttcctcaagtgtttccattggatagctgcagatagggtcgaatgggttagttgatattgctcttttgcattcgtttctttttggtcaatactcatcatagaatgcgtatttgtaaacagatggatcagctcccgcctcctggaccacctctcctattccatatacgactcgtcgctctactcggacctttcctgtttatgctcgatacgttacttctgatgtacgcgattagctctatcttcacctatggactcagcggaaaactcttatttgtcaatgagtttgccgttctcctgaccaactgggcgaatatcgtcggccggtataatgtcaatctgtgggatcaatggaagtctcgaaggatcagacgagatcgcgaaagagctcgactggccgctgtggcaagaggtgaggagaacgccgaagacgaagatgatggtgacgaggatgagacgtgggaggggaagagtatggtcgtgttttatatcgatctcgtcactggtatgtccaacacaaccttttctgcgtcctagaccagtgtatcctgactgttgtgattcatatgattgcgtttctcccttcaaacagacttcatcaagcttcttacttacttgacattcttcgtcctgatccttacatactacggacttcctttcaacattcttcgagatgtctacatgactatgcgatctttcgtcgcaaggattcggactctctttcagtacagagcggccacccgaaatatggaggcccgatatccggatgccactagagaagaaatggacaggatggatgacaaagtgtgtatcatctgcagggaagagatggtttggcagcctccggccggccaagaagatcaagcccaagacccgactgaaaccggagcggcagtccctcctagaagaaggcgggttcgaagagatggagagaggccaaagaaactagggtgtggacatgtgttccacttgaactgtctcaaaagctggttagaaagacaacaaaattgtccgacctggtgagtctttctcttaagatgcataggagcggaatgttgagagcagatattgatcctttttgcgaacccggtttgataaattcagccgacgtacggtcctgaaccaaactccggtggtgccagccgcccctggagcggtacctgctctagctggcgcacaaccaactccaatcgctcctccaaatatacttcctcgatggcctcacccaactcaaccacatcttcatcagcatccacacgctcctacgccgacccaaccagctcccgctcaacacccccttcctcctaacggcgagggtggtctatttgctggtccggttccacctcctcgtttcgcgcatcaaccccatcctgctgcttatgcaggatacccccctttacgcgttccacatctgcaagctcatcctcagactatgatacccggattaaccggtgttgtacctggccctgatggacgacgaccattggcaggatttgaggtggccggattcggttggggcatgggagttagatttggagcacaagtcggaaatcctgctgcaggtcaactgagaagagttgtcgaagaacaaccagcgccagtaacgccccaacctcctgctcaaactcagcctcaagaagggtggaatcgaacagcatcagctccttctgcggcgactgcgcccactctcgtcactcctttacctgccgatgtcccttcgatatctgccagcacttccgatgcgccagtagatcccccttctgacggctcatctaaccccgaaggagtcactacttccggttcggatgagcagacgatgactccgagggagatagctgctcaagcggcacttcgtagatccgctaggttgaatccatccctttcgaccccacccaaggagacatgcacgacggtggtcggggaacagagcgttatagatgagccagagctctcacatgtgccttctatccctctcgaaacaacttcttatctcccttcagtagaagggtccagctcaaccaccatccctctttcttcgccatctgaagcgactacgcctggctcggctaagtcttatcttcctcaacaacaacagcatcaccgtcaacagggacccactctgacgcctctacatccaacaccctcgctgagctatctagacagctctctgcgcttcccgttcttctctaatccatcccggatcaatgaacctcctccttctcgtcccacaggaactttggagcttccagagaggctcacagaggatgagttggaccggatggatagacttactagggaggctattcaggatcgactgtccttcattggcagaattgatcaggttctgactggactcagagaggagctcggcagagtagaagaaagattggcgaggccgagatttgagtccagaaacgatccagagagcggcagggagatgggggcaagagaaatccctttgccaagagatttggacgatgagttgtgaaaatcccggcgttgacagtcgccgatggaatgatattcctgttcctcttgttttttctcgctattcatctggtagtcttctggggcgattgataccgaaattaaaacatgtgctgtcggttgtgtctctaaagtggtgaacctgatagtttgccgtgcatatggattgatgaatatgaatatgaatatgataagatgtagagaacagattgacgattgatgattgatgagattgatagatgttttacagataaatgagaacgacaatgatatgatatgaagatgaaacgataccatgcagcctactgagatatacatcatttttttgattcctcttgagagtatcctggtcttataagttatcccttcttaactcttctctcaacctcgtcgggactggacgacattttacgtttgctgttcggagagaagaccataggaaatgaagaggctccctattttttatcgtatgaaagtgtgaggctttaacagatttaagtatttcttcgatgtaacttgggtaccacagacgaagagaagagtttggatgaagaaagatacgaacagaaccaggaatcgtctcactccttctattagacctgtcatctctatccgactcgagcctcatccgtttgaacgctgcacccttccctatatccctagagtcatccacttgctctctgtcgataatttctagcgcggaagatcgtttagacgcccgcggcgaagacatcaaaaatgggcttggttctggaggctgagatggtaggcggaatgactgagttgatatcgttttactgttatttctgctgataggggatgcgggacctgatggtggagagaacagattgtgaaaagatgatggggctctcgtccggggagatgatagcgggtggttggaatgaaatctcgtttcagacgatggggatagaatatttttgggagagaaaggtcctgagtgtgtctgatccgaccgaggcgaggagcgaaaagaaacggacaaccgtatcagctgggttgaatgaaaatcaagacgagagagaagacagtcgaggaaacgcactgagaggctctcaggagctggagtgtttcggccaggtagccgggcgattgacctggcctcctccgccgcctcaacgttcatctcttcttcaccttcctcctgtactatatctcttctactatccggctgatctgacccaagacaagccgtgatcgccaggactttctgcttatgtaggcgagcttgagtttccatcaacacacgctgatcgtcccattctttctctttcttacgttgctcgagaaggcttttgacgagttgctcacggaggtcattgacctccgtctccgctcttttcaattgaagctcgagctcctgagtatttcacaagagatatgcgcgcgcaagatataaacagagaaatagaaaatcgatcagttaaacgatacagaacaggctaaagaagaagaagaacatacatgaacccggttggagctagtttgcctctcatcagactcgatcccctgctttttgagtaagctggcaatctttcgcttggccccatctaacgacaagtttgcatcttgcatgtaatttttcgcttctatttctgaagcacgagcttgatgaagttctttggccaaattttgtagatcagtctgatgagagtgtcccacaaaagtccgatgtattcggtgttggcgtcaatccttgcgagtccgaaccaacaatggaacagagtgaggacgtacgtctttccgttggatctcagaagccattgctagcttttctgcgttgaggacttcgaaaacactctgaaatgacggtttgttttaacaaaagggtagtgaagccgggtagaagtaagaagacgatgagaagtgatatctctctcattgtctcggcgcaagataggatggatatataataaaaactttcttgacgaaccttggcttgttctatcattttattgtgctcagctatctgctgggaaagctgctcgatagacctgaggtactcctgttctttgatcgaggtcaatgaagtcctacacttgtcaccccgctttccccatgatggaaagcgccggtaccaagaatttattagaggatagaacacgttgtcactttgtgaatttgatgacagaaagagtattaggaaagtgcactagtacgaacgctaaggtttgcgatgtcatcctcgtactctttgctcttctccgtccacattcgttccatggcttcgaagccctcctgcttgtgctgatagagcactgaggcacgcaagaatcgatttgagtacgacaatgtttcaggatatcataaagtcagtgaatctacataaaacgaccacttacaccgttcagtctctattattcggacgtcttcggcatgtcgatttgccaagaaagtagctgtctcgttagcgatacgactgtgggtaccacatatcgaaacgggtcgatgtagtcagtaacggagtcaagtgtattacctatcaggtctaaagcttacgccttttcatcgaacagcgcgcttttcagctttatctgttactcaaaattgagacccagtcgttctttgtaagatattttaacataaacaaaatgcgacaaacgaacaagactttacccacttcgcttcgagcctcgatcaattctcgctgacacctatttagagcggctgcctgaccacctgtagcagacgactcgtatctttccttccaagtgtcagcaagcttgatagcatctgctttctgttgtctgacctgggagaaacaaagcgagcgatcaaccgataggcagtaagtgagtatctcccgctctgataccatggctttcttcagggtggcatatacaccgagtagttacgacaaagtgaatgaccaacctctgcgatctcggctcgatgtttttgatcgatctttactttctcatccaactgacgtttgatctgggtctctagaaaacgaatgcgttctgcttgctcagactgtgtactctgtatgtctgtctccatctggatgtatgctgagtgaagtttctacagaagcagcagataaaataaaacgacgcgtagaaagtgacgtattgggtgggtgtgagagttggtgtaacaatgtaatcattatatcacgtgactgcaccgagcgtttaatcaacctagatggttacatcggcgtaaagccgacggctacgcttggccccgtcggcttccatcctcatcgccatcaccatcatcattgtacccatacgatctgaaatcgaacaacacacgtacatacacacacacacgcacacacacacatatatatatataca

SEQ ID NO: 419 - DNA, 56220 bp, Xanthophyllomyces dendrorhous
  misc_feature (30187)..(30196): n is a, c, g, or t
cacacatatatatatatacatccaagcacatatcccatgatactgggacattattacgaaatcttgggtcttagttccagttcggtcgggcgtgtggagagtgagtgcatatacagtcttgacatacgtcaacctctcttcagcttgcctatcgattctccctccaaggggagatcaaagtttgtattacgttcagaacgctcaggctgacatctgctcttcatgaatcgtttgtgcccaagtcaagaaagcgtatcttcggaaatgcttggaggtttgttccattccgtatggactagctctttcaggggaaggtttcacagccgagattggtcggtctgattggaccgcgccggctgcaatcaagtctgattcgcttctttcatctatgcgcttttttctcttgtgaacctggtttttcaataggttcatcctgataaaaatccaagggacccagccggggcggaaaagctgttcaaagaagtgtgttgatttcacgtcgttgtcgttttggtcgtgtgctgatgtggcctgatctttgttctgttacgttgatccgtttgggcgccatcttcctaggtcaaggcggcctacgatatattatccgatcagctgaaaaaacaagaggtatgcagttctcccttgtgcgacgtgtgttcaatcgtttccggtctcccctgatggatgtgccgtgtcgttttcgatcagtacgaccgaacgatcaaccacggtggctctcctttttactccttctttgaatcgaactttcaatctcatgggccgcgctaccatccgaaacctttttcgtcctctcgatatactccctatacaagacccggccctcgtcctcatccaccaccacctacctcgtcctcatctagctcttcaacttcatcctcctcatggacatcattctcatccgcatcagactcttcgcctaatcctgcttcgaccgctactgctgctgctgctgacagcccggtggacccaacaccaaaatcgaaaccaggaccgaaagtggagaccgacccggtgaaaaccgcagcgttcgaagcgtttatgaaccaacttcgacaagaacgaagagaagaggtatcaaagacgaaacgtgaggacgctcagaatgagggtcattcgaggacactccaactctcaggtttgccagtgtccgctactgagaaggacgtccggtttgcattccggtcgtcagaggataacattgagaaggtcagtcctgcggtttgttctgtgtgggctgtggacgtgtgtaggcggacaggtttggtcgttgttatcttgcctcggatctgacgtcttgttttgtgttcaaccctgtcgatccgattcagataacggtctacccaggcaaacatctagccatcgtcgtctttctctcacacctgacggcctccgacacgatatgttccaaaccggagatccgaatacatggtagagtcgtcactgtcgcttggagtagagataacgggacgttcgtcagaaaacgcacggtcgacggctcgtttgtctctgtcaatatcgatggggatgtcggtgggggtacgggtagagccgactcgccggatctggctttagaagatcggacgggcaagaacgaagaggtctacttttggtattagagcttttccttttctagcctatttcgttttcgtcttttcttctgcgtccggtgtgttcattcactctcactttatcacataatcgcactcactcatatatatacacccatacattcatacgctaattgtataacacttattcttgacttgaacagcaagaaagattcacatgtactcttttttttcttctgtatttgtatgtgcatttcatcttgtctagctcggcaagaaagatgagaaaacaaagtatcaaacaccctggagcatgctccaaaagggtcaagatgagggaatgttatctcctcgaaagaaagaagaaaaaaggcgaaagcgaagaaagaagaatggagggatggaggggtggtatagacatctagtcgcctccaacgcttttagtgtgattggaaaaaggaactcgggaagagtgaaggaaatgagggtcggagaaagagattgaccagcaaatgctattctatagctaaaaagacaatgaagagtgatcttctctaattttctgagaaaggggaaaggaaaaaaaagtacatccgcacacaaagagaaatggaaaaaatgtctcagtacggttatatcgttgggaagagaagagggggaccagggaaaggtaaagctcacctagtacacagaccatgaaacccaaaagaatgaaggaaaaaatttgcttgaaaaagagcgattttcatggtttacaagagtggaagaaggaacgagggaaggagaccggtagaggagcaagagatgaggcgcttaagcggatgcctctgccaaggcctgctcaaaggtgaggaaatcctcgccgtcgtattcgacgtcctcctcggcctcgacctcggcctcgccgtctcgtcggatggctcgagacttggtcttcttggtagattctttaatgaagagggaaacagaagaacgttctagatcgagtttggttggaagggagagagagagagagaaaggaggaaagaaacttacggtagccccaggttccgtagatgacaccgagatccttgtcggccaaggacccgaagagaccctcggagagatccaactgtcccttggagcaagacgggcactcgtcctggatcgaagcactgacggtctttccgccgtacttgacccagatcttcttaccgcagacggcgctggggtatcctccaccccaggcggcatagtcggcagagttcaaagcaacggtgtaagcgctgttggcgttccagtttccacaggctccgagtccaacggaggtatcgctgagagagagcaagtgcgagggagttgctgtagtcagcatttgttctgctacccgagtagagaacgaagagaagagacactcactagtaggtgaatcgggaaccacctcgcttctcgacgtccacaggagcggcgagagcaagaagaggaagggccaaggcggcagagagaacggtggagaagagcatctttagttatttgtttgtgagtgagtgggtgtgtgaagggagtgagtagagtgggtgagtgagtgagtgaggaaggaaggaaggtagtatccaagagaatgagagaactgaagagatgaagaaagaaagagagagaacatcagctcgacgaaagacagtcttataggattctttcaacaaaaggctacacgaggacgagaacacaaaaaaaaactagggtcaaccgttcaatattctagacgaggtcatacatcagcctcggtcggatcagaaccctgaaagctaagaagaaccagcccgggggttgttgtcggaaagacgatcaagagatcaagtcagcagtgttcgtctgccttggccttaatttccaccgataaccctcgaaccctaaagtcgggggtgggtgaggtgaaatatattccgattgttaatacgtcagtgagtgtgagtgcggtctatgaggtgtgagtgagtgcgggtaagtacgctgttggctccgacccgctcaaacatcagagtgtctattgtacgtcaggtctcgtcagacaagagaacaaaggcgaaggaggagggaaaaaaaagggtgggccgaaaagaagagaagaaaacgaaagaaaagaaaaaaaagaaccgatcgcccgttaggtctagaacttgttccttttttcttttaatttcaccggctacaagttctcgtcctggtgccttttctgagagcgtctccccgatttttttgatccatccgtccgttcattcattcgttctaatgagtccacatggtttgagtgtcgcacagaacgggcccatgcacgttcccctcctctttccatacgactcggttaactccggtctttttttcttttcttttttctctttctcttttccttgttatgtcattttggcgatccgatcccccttctttggccgtccattcgtgatgaccgggtagtcactgggcagtagatcgagttttctatttcatttaattctttttaattctttttttggtgaaaagaagaagagatgttcattctattagaggagaaaaaaaaagaaagaacaataaaagacgacagacaaggacagatgaagaaagatggtcaaaagtagtatagcaagaagagaagaacaacaaacatcagaggaaaaaagatggacatctagagattaaggttcactggttctattatagaccaaacggtcttcttgtcctccttactttgctcttcccttctccctctctctctctctctattttgacttcttggcctcctcttgctcagccgccactttcaaaacattcatcggcgcgctctcctttccgtcagaagcgacctcgtctcccagtcgaacgttctttggcttggactcgccggacctggccaataaagccttctcggcagccagtccctcagcctccgtcttgacgttctccgcagcctcgaccttggctcgctccgaagccttagcagcggccactcgctttcggtaagcagtgtacttgtcatcagtgcccaaaaggtgatcccaccatcggaaagaagtagagtagttctgtagatcagatatcgaatgtacattagcatacatgttttctttccttcactaaagtcgtattcggcaaataaactcacgttcacaaacgccatgtgatggtagtcgtggtgctcagctccggaccagaacggaatccagtgtcgaggaccccaggggaaatctttagattgaaaaggtagaaaacaaggaaaaggagaaaacaagaaccaaaccgatccaatccaaaccaaacgcgccacaaatcagctaagctgaactctagtgaaagccaggaagaaacgtgactgaccatatccagaatgagcctcgacagcttggaacaacttaaagatgacccagacgtagacagtgaagatgtgaagcgttgtgtcaaatccgagcgacttgaggatcgtctgagaggcaacagcaaacaaaaggggtcctccgacagttccggctcccaagatcaacacctcgatcgggtgggcatactgtagaaaaggaaagacacaaatcaatcctctatccgttcagaccacgcttcagcattctcgacagtcaaccaatcttcttacctcagcagccaatccaaagggagcactgaactcatggtgaagcttgtggatgtgcttgtagagcataggtgtgtgaagccatcgatgcgcaaagtactggaaagaaagaagagggaaggtcatatagagtttagcatacagtcatccagccaacaacccgatcggacaagatatcatactcagaactcacatggaaagtatcctcaaacacgaaaaagatggcgacttgccaggccatcgtagtccacgaagggaaaggaacagagtgggtcgacattccaaagtactcagccatcgggtggaaaccccagatctgatagaaagatgccaaaagtcagccttccgaccatcacggaaataaaaagaaaagacatcacaagcccgcgccggcacacgtacctgaggcagttcaaccgtgaagtgagagagaaggacaagcttggtgcagtcccactgttgctttgcagtaggcactttaccctgtcggtgcaaattgtttgatcactctagtcagtcggatgtgatgaggatctttgtaggcaccggctagtctaaatccttacaggctggagcttccactttctaaagtagggaatttgatcaatgatcaccaaagggagacatcgaccaaagtaaacgacctagagagaagaaaggatgaacaaaagtattaatattgagatgagcgatatcgtgcaacttgatctgacaataaagaagaaactaacctcgtgaaggacgaaactcatgattccggtggcaagcacagggtttccgatgtacaggtaccatcgaactataaaatcagaccgacaagcagaagaaacgatggcacaaatcagagcctgtacatcaatgaatgcgccagcaaaagacacagacagacgaactcaccccaaagctgctccaagatgtttagatcggccatattaacagaagggtacaagcttgaggctgaacctgcaaggtcagcaggaagggttgtgtttttcaatgcggaagttataaactccatggtccaatcaagagggggatgtgtccagattcagatgaaggaggggatgatgaccgggcgtgagattgctttgatgtggtataggttatctgtatagaatagttgatgcaagtggcgtgtaaatgagtgtggttgagtgttcggatggaggcgcttgtgtttttctttttttttttctttctttttttttgatcggtatcgtctaaagagacaaggacaggaaaaatcgttcgatcttggtcacacgcctcgatcgttacgtaatatttacataatcagatacacgttcataaccctaataatacctctgatggttacacacgcacgcgttaccattcgttgtttctctcacgctagcgagaaagcgtgagagaacttctcttcttcctcctcctactccctcccctccttctcattcaacaatccagctcgtttggatcgagggtatcgtctactttctggttgattgatcaatctctccatagtgcagtcgaacatccacacaaaaagctacacatatatacacacacgagatctcaaacctcatcgtctggaaagaagcccgactgtgaaactcgatttggcagcagatctctctcctctctcttttcccagtccttctttcgccacgctctcgcttgatccactcttccgtataacatcctcatcatgcctctcggacacggattctcttactcctcggcgcctgtcaagacaatttctgagatccaatttggtatcctttcaccagaggagatcgttcgtcatttccgtgctattttttcgtttttcgtttcacgcgtcgtcgtggcccttctttggcctctagatcaatgatctccttctcacatcatgccctttctttttctcactggaatctatgatgcttgtatctgtgctcctcttcttttagaaagcctattcggtagctttgattgagtatccagaagtcatcgatgagatcacccagaagcagaagcgaggtgggctgatggatcccaagatgggaactatcgaccgaaacttcaagtgtgagacttgtggtgaaggcatgagcgaatgccccggtcactttggacacatcgaactcgcaaagcctgtgtttcatatcggtgagtctcttggattaatctcaaaagggacatgtatcagagccacgacagttggtgtggctgagggacagacgatgcagagagcaggcagaacgtcaggacgattgactcttttgggatgacgaacgagcagcgtggatatacattaatgtccttgttacgtactaattttgttggattgaatggctcctttgtaatcgttcaggattcatgatcaaggtcaagaagattctcgagtgcatctgtgtcaactgcggaaagctcaaggtcgacctcgtatgtgtttttcttcttcgcttccttctggcctatggtggcaaaaaaaaggaaaagtcatttgggcaaaggacgaaacaggatggtaccaactagaacattgtttttctgctcttacctttctttgtgacaaccaacagcgagatcctactgtccgtcaggtcgttcgtcgggttcctgccaaagatcggctcaagcacatctgggagaaagcaaaggccaagacggtttgtgacactgacgaggtcccggaggagggcaaggaaggagccgagaacgcgttggaagccgtgcccgggcatggagggtgtggacatgtccagccgctgatcagaaaggagggactcaaactgtttgtggtgtacaagaagcagaaagaagaagaggacgatgaggtaggtgtcctgccgtttcttacatgtgtctcatgtgcaaagagtatatgaaccagataggtctcatcatattcctgaaaataaactccctgttatcacaggacatcaaaatgctccaaccggacaagaggccgttcaccgcctcagaggtgtacaacctgctccgaaagatatcttcagaggatctccaaacgatgggactctccgagtcgtttgccaggccggactggatgattttgacggtactcccggtgcctccgccacctgtgcgaccgtcaatctcggtcgatggaggtgcgatgagaagtgaggatgatttgacgtacaagctatccgaaatcttgaaagcaaacatgcaggtccgcacaagagaacaggagggtgcacccccacatgtcattgccgagtttgagcaactccttcaggtctgtatcatccttttgccctctcttttccgatgtttaatactacggggggtctgactgtggtggacgatggcatatgtctttttgttctttctgtccttgatgtgtgtagtatcacgtggccacctatatggataacgatatagccggtattcctcaagcactccagaagtctggccgtccagtaaaagctattcgagcccgactgaagggaaaggaaggtcgattaagaggaaacttgatgggaaagcgagtcgacttttcagctcgtacagttatcacaggagatccaaatctgcagcttgatcaagttggagtaccaaaaagtattgctatgacgctgacgtacccggaacgaggtttgtatcagcaatctttcttcactactaccaagtataccggaacagcttggctgaaaatgaaatccttggcttacttgtgttgcgaaataaaagttacaccttacaacatttcgtatctccaggatctcgttaacaatggacctcagactcatcctggagcacgatatgtcgttcgtgacactggagagcgaatcgatctgagacacaacaagaacaatgcgtgttcgcttcaattcggttggatggtcgagagacatctcagggataatgagtatgtcctcctgagagtgacaaaccgactcggtgatcaagaaacgtgctgacagagaagggcttgctcttccgttctctctcagctttatcttgttcaatcgacagccatccttacacaaaatgtccatgatgtgtcacagagtaaaagtcatgccttactcgacattcagattgaacctttctgtgagtggactcctgcgtgtatctgtctatgcgcaagcgaccaggcaaaaagactcatcattatcccttcttgtttgataaataggtgtaagcgttctttcatggcttaggctttgctctaccggatatctaacccatctgccctcttcatcactacagtacatccccctacaacgcagatttcgatggagacgagatgaacttacagtaagtagttgctactcatctcgaaacccggataatgcactgacaacactcttttttccaaatctttctagcgttcctcaaagtgaggaaactcgtgcagagctaagtcaaatcgcttgggttccccgtcaggtttgtccattctactcgtccctatcagctacttctagcttgtgctgacggcactgcatcttcatttttccattagattatttctccgcaagccaacaagcctgttatgggtattgtgcaagatactcttctcggtatccgaaagtttactctccgagactgcttcctggagtggaagcaagttcaaaatattctcctctggttgccaaactgggacggaatcgttcctacgcctgctctcatcaagcctaaacctctttggacaggaaaacagatcttgagtatgacgcttcctaaggggattaacattgccaagcgagcggatgagccatcaccgatccatcccaccgatgaggaggtcatcgtcgaaaacggagagattctctgcggaattatcgtcaaaaagatggccggagcgtctgcaaacggtttcatcgatgtcatcttccgagagaagggtcccgaggccgctagagattggatctcgaacgtccagcttgttgtcaactatttcttgttccactctggattctctgttggaatcggagacaccattgccgacaagcacgttatgggtcagatctctgatgcgcttaaaaaggcaaaggatggagttcttaacttgattagttggggagaaatggacgcgatcaagcgacagccgggaatgaccattcgagagacgttcgaggctgaagcaaccaagttgttgaatgaagctcgagattttgcaggaaaggttggtcaaaagtcgctcaaggatgacaacaacgtgaaacagatggtggtttccggatccaaaggttctttcatcaacatctcccaaatgtcagccttggtcggacagcagattgtggagggtaaacgtattccattcggtttccggcatcgtactttggtaagtgttgtttttgtcgtagtaaaagacagggtgacttgtgaagaagccttgcctgatgaaacgccgatctattttatgtttctcattttctctcctcagcctcatttcgcaaaggatgactatggaacagagtctcgaggtttcgtagagaactcgtaccttcgaggtctcaccccagctgaattcttcttccacgctatgggaggtagagaaggtttgatcgatacggccattaagaccgccgagacaggatatatccaacgtcgacttgtcaaggctcttgaggatgtcaaggtttgctacgacggaactgtccggaacgccggtggcgatatcctgcaattcgtctatggagaggatggtatggatgccgcgtttatggagaatcagacgttgcacggtaaccgactggacgatcaggcgttccaagacaagtacaggattgacttacttgatcctcgattcaagattcctaacggtgttcttcaggtcggtatcgacgtgtcctctccagatttgcaaatctcactagatgaagagtgggcacagctcagagaggaccgtagaatgcttcgaacgttcatcatgaaggacaacgtttcatcccttcccctgcctgtcaacatctctagaatcattcaaaacggtcagcagatcttccatcttgataaccgaaaaccaagcgatctttctcctcaatatatcgtggacgccatccgagcgttgaccgagcgcttgatcgtcatccacggtgaagatgatctcgccaaagaggctcagtacaacgcaacgcttcttttcagcatcttgcttcgaagcaatctggcttctagggtggtgctcatcgagcatcgccttaaccgagagacgtttgattgggtctgtggagaggttgaggctaagttcaatcagtcgctcgttaatgccggagagatgtgtggtgtgttggccgcacagtcgatcggagagcctgctacgcagatgacgttgaacacgttccattacgccggagtgtcgtctaagaacgtcacccttggagttcctcgattgaaggaagtcatgaacgtcgccaccaacatcaaaaccccatccctcaccgtgttcctcacggatgagatgagacgcacgatcgacacggccaagatggtccagaccgagttggagcatgctactctccgaaccgtcactgccgccgtcgaagtcatctttgatccgaaccctcaggctacggtgatcgaggatgataaagagttcgtcgagggtttctttgccatgcccgatgagggtacggaagagaagctcgaccgaatgtctccttgggtgcttcgtctcgagcttgaccgagcaaagatgcttgataaggatctcgagattgattatgtggcctcgaagatctcggacaagttccaggacgatctgcacgtaatctactctgaccagaactctgagaaacttgtgattcgatgccgaacgattagcgacgaggctgacaaggatgacccggaggtggccgcgaatgaggatacgttcctgaagacgcttgaggccgagctgttggataagatcgatctgagaggaatcccaggtatccagcgagtgttcatgacgaacaaggatgacaagcttcaggtggtgagcgagcgaggtcaatgggaaaaggttaaggagtggtaccttgagacagatggatcgaacttcaagcgagtccttgctgtggatggagttgacgctgagcgaacgtactcgaacaattgtaccgagatttacgaaacgctaggagttgaggccggccgagccgctttgtactctgagcttcacctcgtcatttccttcggaggttcctatgtcaattaccgacatctctctcttctttgcgatctgatgactcagcgaggaaaactcatgtcgattactcgacacggtatcaatcgaaccgatgctggagccctgtctaggtgttcgttcgaggagaccgtggagatcctcatggaggccgccgcgatcggtgatgcggatgactgcatgggggtggcggagaatgtgttgctcggacaagtggctcatatgggaaccggaatgtttgatgtctcactcgatatggagatgcttaaggatgtcattgtcgatcataggttgcctgtacaggctatgttggccgctcgagagggcggtatgacgcctggattgaatggtggaatgactccagtggactcatcatcgccgatgggtgcgtttaatcacgtatctaacgacgtggcgttctcgcctatcattcactcgggtagtatggacgatgcggcctcgttcgagtacatgggttacggacagagtccgatgggcgcaggcggtctaggtggtatgagtcctcacggatactcgccatcctccccgtcatactccccgacctctccattcatgccgacatctcctttccattctgccacttctcctttcgccacatcacccttccattcgacctccggcatgggaacttctccgggttacagtccggcttccccattgtacagtcctgcctctccatctttcagcccggcctcgccatctttcagtcctgcctcgccttcgttcagtccggcttcgccgtcattttcgcctgcatccccgtcgttcagtccggcatcgccgagctatagcccaacgagtccgcggtactcacccgcttcccctgccttcaacgccaccagtccttcatactcgcctgcttcccctcggttctcgcctgtatcacctgccggtccgtcgcgaatgtcaccgacgtcacctgcgtattccccggcttctccggcatactcacccacttctccgacgtactcgcctgcgtcgccttcattcagcccggcttcgccttcgtactcgcctgcctctccgtcgttctcgcccgcgtcgcctgcgttttcacctgcgtctcctaagccggctggatcgaccagtgggggagcaggttcaagccagcagccgtcttggaagaaagcgagaggatcgggaaaccaagcgtcgcctagctggagaagatgagagcacagaataaagttttgtctcatattcagttctgttccctcatatcttttcttctatagtcggcaacatctgttgctcgtttttgccctctgtctttcttatcccgatgaatgggttacaactaaaaggaactcgtgattcgctattgaatgaataagatgccgtctctgtacaaaacatacgagggaaaactttgttcaaccttgaggtccaagcatccgaatactcttgtgctgctgatgtctgtaaaacacttgagtgttcggtttactatgtagaaagagataggaacaacgtagaatgagatatgcctctaaatttgcatatatgcactgacacaggtcaaccgctccaatacccattttttgccttgctcgttttgtcggccggttgctgttccgaccagccagctctctcgttcgatcgatcttctttccattcctccctgcttggactggacaccgttgtcagctagaaaagaaacgtttggttgaaagtactatctgattgtgtcttcatgtaggtttctttcttgttttgtctcgttgtggtagagcgttcgattagagtacgcggaagctgactcttcactttattttcttcctctgtctctttcttttctgggtttcctatcttgaacatcgattctctgcttcccgttctgcaatctctttaacggacaaagcatgcctatctacggaaaaacaaaatatctcccaaatccgatcccgtatcggctgtaccctaagattcgaaacccagtgaatctgccgcttcttcctcgatcgaccgtaccgaaccacgctatcgtcgaacccaagacgtatgtccaggctcgaacagaatccctcgcttactctcccgccaagatgctggccgccagacaggctagcagtccggagacgttccctcctaatttgagaatacagaactgggttgactctagggaggcttgggggaacgtgccaagggcgaaccgaaaacttcttatgggtatcgcaagaaggcattaaaccatgggaccatcaggcttgagaggaaagaaacaggagaggaggacatagcatcaaacatctatctttcaatcattcaaccatcatcaccgtcgtcgtcgtcatcatcgttcaatctatttcatcaagtagttctatcgttctcccttccattaccgtcgagcttctgttttcatctcccccttctttctcgtgttatcaaaaataagcactctggcatggatctatctctattatcttgcttctctctcctgctgatctggcttgtgattgtgtcttttcctctttttttcgctatcttttctgtcgtcttggaagatgaagagcgcgagaaggagacttgtattcttaatgatcttttccgaaatagccacaaacgaaacagaatcaaaccattctcttatcaacctttggctagctatacagacaagaaaccctattcgagagaaatacataacaataaacacaaaagtagaaacgaaagaaggaaggttgatagaagaaaaagagattcccaacagcgtgaaaaaggtcgcgtgttcgttttcttcactctcgccttcctttttggactctgaccggcaaccatcgaaccccgttgactatccctcaccggcctctctatccgttctatcttttcaataccttcttttagtcagcttggtgtatactcgtttgcatcgtttacagatatacattcagatgattccttcgttccctcgtcggttggtgtcttcgacctcaaacatcatgtcaaactcggcagttgccgtctcttcttcctcttcttctagcaaagcagcagtcgctactagacgacttcatcaaaccgccacccatctatctaaagggcccgagagggtttatcagactctcatgaaggtccgttatgtctttcttcatcttcttctcttgcttcgcttctccatctccttcctctttgcaaccgttctcttctctttctttcctttttttccccgttggttcttcttcagtgctaactcttccatctttgcctgatctttgtctcttcttctggcttcttccgtccgctctcgtcctcctatctctctttccttactctcgccgaccctccctgcatccaacaggaatccaacgcccaggctaccgatccaaacgcttcggttctcttcaccgagtcgacatgcactcgaagctaccacctcaatcgacctaagcagcttaatgcgctcaatctagagatggtcgaatcaatcaccaatcgggttgatgactggagttctagtaggatttctaaggttctcgtcggtcatggcaagggcggaaaagcattctgtgctggaggagacatcaaacgtatgctcgcttttctcttctttcaaaagtttttttctctttctacctgttctttctctctcgagccctactatctttcacctatctctcttcatcatcatccgtgaaggagatggttgaaaaagacgggtcttgtcggatcctctggatatcattggaagcttactgatcatatcctacacgtcattttcccttacagatatcgccaaattggtcgcttctaccaaccctacagacaagtggcaggccatgaagttcttcaaagaagaattcgagcttgattggaagctcgcctgtttctctgttggctctcaggcttgggatggctcgaaagcttacgttgccataatggacggtctcaccatgggtggaggagccggtcttagttacggagccgtcatcagggttgccaccgagaacacacagttcggtgagtctttatgcccttcttctttctttcttgaatagttcttcatattgatagttcttctgtgcgttctcgctcttctttgctctaccctcccctaatctctcttttttgaaacttgtcatgatctccatcgcatcagctatgcccgaaactttgatcggatatactccggacgttggggcgactcactacctttctctcctagacggaaaaatcggcagataccttgccctcacgggtgagacaatcaccggtcgagcgtgttacgatctgggacttgccactcactacgtcggttcccacaacataccttccctgattgaacggctggatgcggtcgaggacatcgataccaacggaggcgttgacggcttggtttccattgttgaggatttcgagctccgaatacacgaacggatccccaagggctcggtccctggactggacgtcggtggttggaaacggggggatcctaactctgggacccggttggtgggcgacatccgagttgcccttgacgacgcgtttgcccaggacaccgtcccagagatcatcgaaagactccagacatacatcaagaaggacgccgatgacgcttcggtgtttcaggcagagaggcaggttagcgactgggcaaaggagacggttgaggtccttggtgagagaagtccggtatcgctcatggtaaccttggtaggaatgcaaaacgcggaggaggagatcaagtcggtggcaaaggagctcgctcgggaggtcgataggtaccacaaggttcctccgaacgaggccctcaggctggctttcgagcgagaatacaagacggtcgagagctttgttgtgagtgttccgtttcctggattgcttttggatccacttgcatgtctgaatcaacctgaccgatcatacttacgttcacaaacataatcagtatgagtcctcgcctgacttcccaaagggtgtcatcaagaagctcgtggagaagctcagccctgaatgggatcgagaggtcgatccggccactctccagtccaattttttccctaaaccaaaagcaccgttcaagaacgccaatacgagccctcttgaacttgctcctccgacccacggatttgacaagcatcacttccgatcgtatggtctaccttccgaagttgaggtcagggctatcgtcaagggtgaagtcgagggtgacttccagcccagaaccagttccaagtctagagctggaggttcaaagtcgagcggagatctcgctttgaacaggcacatggtcctcgagtggttcaacaaagatagactgggtgtaaaagacagggtgacggagatcctgaacagaaagacttataaagtgggcgagggcgagtggctggcctggagtgattaaagtacagagtgggcttgataggacggaacgtgagaaggggtggcgaggaggatatagagactctcctttcttcctctcctcttccttctttgctttcttcgggccaataatatattgaacctttgtttgtgtctattttgtgtctgtcgagcacggaacaagagaagagagatgatggacgagaccgaaacaatcggaaagtcaacgaagcggaagagcaaagataatattctgaaagccatttatatcgggagttccaaagattcgcttagtcaaaggttcctccatctgcttgatagcaaacggtcaagagaaaatcgagaagaagggagggaagatgggtttgtgtcagcttcatcattatcaaaaagctaactgacaatagagtgggctgaaagaaaaagaggaaaaaagaagatgaacgactgaccgtctccgccatcgtcgcctcccccatcttcatcctcgccattatcgaagtaattgtctccgtctggtttccgagaagggaaaaaatccgaaagaagaaaaagggaagtgtgatcagtcaacatcaactgaacttttactactttgagacagaagaaagaaagacaaagaaaatgaaatccacgtacaatcatcatctccttcgtccacatcataatcatcctcttcttcacccgttccgttcccatcatcgcttccttcagcctggtcaaaaaaggcataaagacgatgggcaggcataagcggacagatgaacacgacgaagacacaaagggaaacagcagatcagacatagcgcatgtacgtgcgggtacgttcaaagaaaaaaacatcaagatgcgcacattttcatcatcgtcttcgccagagacgatgtcgtccaaattgagtttcttgcgcttggccgctcttttcgtcacgttcactgttttttttagtgacagatcatttgaaagagagagagagatatggtcaatgatattgtcgtatcaaacacaagttgaagggtatgacttccaaatctcaaacagttagtcggtcggttggtgcagtaagaaaatggagacgtacgttttgatttggggttgaagtagctttcatataacacctggggaaagaattctttcggtgggtaatcggacggttgaagagccgtgctctttgcttggacgggtttgtatttatcggtgtaccgttcaatgtctttgtcgtttagcgagtgaggagaggatgaggtcagcgtgttgtatcgaagtgaaatcaagacgagcttccaacaagatgaaatggagaaagctcaccgtcaactttcttaggttctttcaggtattccctgcttagactcatgtcccaaccaaaccgaacctgagcgttaaccatagcgcgttcagacagggaaggttctgggagcgtcggaaatgggtgaggatattgctagataaacaggtcaggaggatacagagggacaaccgtggcagaaaggtatgagagaggtatctgatttgttagttcagccgtactaacgcaacaaagggtttagaagatcggatggatgacgcacaggaaacagttcttcagactggccagctccggcggatgagatctcggcgtatgtcattcccatctgtgagcaataatcagtttgttatgtttagcacgtaagaaatccaaacataattagaccatggcggatgacacatgaaagaagatgtatgagtgcggtctgtgttgagctttagagagacatgacgaacgtaccaagttcaaaccttcacctggcccgcctctgccgccggctccaccccttcctccgcctcttccacccctaaaagacatttttgattgctcggtgagaggtacaggctgcaagatgcctgtctggagggttgaaggatgccttgtagcagctgatgaagtctgtcggtttcgcctattctgttggttgtttctgtgttctgtactgggcttaccgggaaattaggagagccagggtcggagcattgatgatgactaagcatgatgcacgtgatcccagagggcagggccggtcccacggactccgcagaatttcgctcacattcagtcaagcctgagcgactgctaatgtgcaagagacgatcccatcaacgatcaccaacgaaatgtcgactccgttgacacaagaggagctcgtgtctctcaagcagtggttgatcaaggagctcgagccgatgtttgtcttctttgtttcttgtcttgctactactatcgtcgacgtacacgttcgatctgaccgctggttcgactctaactcgttcgtcctctgggttggaaatgatcagatccgatgcggacaccgatattctctcggattatgtcctcgctttgatcaagacggactcatccgagtcagagatggagaaggtgagagacagagagcgctgtggcgatccttactaggttagacggcgactgacacgcgctctgaaattccttcatataccactctcgtaggaaatcacggatcaacttcgagactttcttgacagtcgtcagtcgtctctttcaacctactaggctacagcgctagtgcactgactcgcacctccacgcttttaccttccttctcctggcccactcgcacagacacggactcttttgtagcttcctttttcagtgccttgcgctcaaaatccttcgtttcggtatccgtagtccagtcgggtttaccagctaaacactcgttcctgccttctgagtcgtcgggctctcgtaaacgatctcgatcaccttcatcttctactcagcaacaggtttcttcgtctaaaacttcccgcctgtccacccctggcgctggaccagagttggatgttccaactggtcctcgatctatgcaaaatgccgatggcttcgtctctggcaaccagccgagcgcaggagggcgacctggtcagagcttccaaccttactttccttctgttgattctcaatatcaaccgcaacaacaccagcatcattttggctcgatgaacgcgttccctcacccaaacgcctggctcggtggcaacgcgaatcctcaagctcaatttgagtttcaacagcgagccgggttctttatgcctggcttcaacggacctatgcctggaatgggtgggtttggtacgttaggaccaaaccaaggaggaatgcaaagctccgtgcctggctcagaagatccatcaaatctaaaccagttcggcggacaagatcagagtggtcagatgacaggcatgccgatgggtatgggaatggatccaaatttctttgttcctcatgcaaacgactcttctcggggtggctacatgtctcgtggtcatggacgcggagggtcgttcacgcacggagctgggggacaaggaggacgccagcggtctaacaacaaggatgcttcctcccaccctccgaaggaccgaaacggagtgacccttgtcgtgtcggacatcccggcccagcacttatcccttcctgccatcaagacgttctttgccaagttcggaacggtcacaaacatcgcgatcgaccagcgatcttctcgggcgcttgtcagctttgcctcgaacgaggaagcctacaaagcttggaagagcgaggaagccgtgttcggtagtcgatttgtcaaagtgctttggcatcgaccgatcgagggtcagggtgggaaaggcaaagaagccctcgagaagagtaaagctgctgtagacaagctggaaggcactcctggcacatcgtccactatgacggatgagcactcattagcggccatctcatcatcagcaccttcatcctcatcgacggcagcaacggccggtctatctaaagctgagacgttggcaaaacaacggcttctagaatcccagatcgctcaacaaaaggtcttgatggccagactgacgagcggttctctgagtcctgaagagaaagctgcgctgagcgcccagttccacaagctgtcagacgaaatgaaagcgggtacgggttcgttaccggtggctgtagcttcgtcatcaacgacgaacgctgcaggtaacaggacggcagtcttcggtcctcctcctcctgcgtcttcaggaagagagggaaatggaaaggagcaggagaaggaaggagaaactagagagctctcaggctcgggcgagggaagcagaaaggacgacgacgaaccgatggcttccggagctacagaagaagaaataaacacggacatgctgaagcgaaaattggctatgctcaaagcagaggccgctcttctcggtgtagatcctaacgacccgaccgcctctccagccccttatgcggcatatccacctgcccgtggtcgaggcagaggtagaggtattagaggtcgcggcggcgccggtagaggagcgtatcggggagggttcaacagttatacttcgactggttctccggcaaagtcgatgaagcttgacttgagaaccaagcggttggcgatcgttggacagggcttaggagctgatgaggaaggcaaggcggctgtggagaggtggtatgatgtaagtcttctttcgttcctctgtcttcatcaactttcttcaggcgcatatcaggagtactaaccaaatccctcttttcggggagagacgtgtagacgattggtggggttgaatcaacaacatcggacgatggatcagatcggttgattatctctttcaagtctcgtgcgctcgccgagaaggtgcgtagtctcatttgcccactcttcttatcttttcccatatgtcaacttatacttttttcctcgcgctttgctttcttctgaattcaggctctcgctaaaggaacgaacatcacagatctgtctctcccaatcaacatctcgtggttcaacactcctccgagtttacccatatccaagcctaccgctgctcctgacggtcctacaactggctccgatccctcttcaggttcaggtccaggtcctgggtctagtgtaggcgctgctatagagtcaaccccatcagacttcagatctcgggagagagatgcttgggatgcagacgaagatgaatgaaggctggaagaaatgatcttcagagtatgtgtgtgtataagagggaggaagggaacatatccatgtattgatacttttcgttttatgcggaatcaacatcctgctcgcaagtagaagaaaagaggccataagagaaaaaagaaaaaagagcacatatgatacgtcagagatgcagagagttgtttgtatcaggcagatttgtgaacgccaaggatagggatctcgacgatctggtctgatccggggtacgcaggaaggtcgagctcaaaatcattcgcgatatccctttgttcgaattccgttataagacgttttgatgagttttctgaacctgataagaccaaagcaaacaagatgaaaggacaaagtgaaggatacgcacggaggaacaaatctccctcctagataatggaccttcccgttgaagaacttgacgccttccttgggcgcagtgagtgaaagaagggtatgaggttgaaacgttggtacgtgatcaatcggtccatttgtcacatcccagccctgtttttttcccatcaaattggaccctgtttcgtaagctatcagacagacaggcgaagaaaaaaggaagtaaatgaggaagaggacgtgcagaaggaatgtcgacagagatgatcggaagttttgtctgagatagaagagggaggatttccgtgaaaggttctctcaacggaggcttaaatgagaatcctgatttgaacacgatcaagacaaacgaatcttataagaccaacggcatccggaacagattgaacgagacaagacaattaaagaccgaaccaaagatcgcatctagaatgacagagtgggtgtttagcgcatgtttgaactcgtcgaccgagcttacgaatgggatgtggaggttcatgcattgcttcttcaggctttcgtagaacgcgttcttccctggcttgggcaggtatactgtgggcctatatccaaagtggactgagagagcgatttgtagaccataagatcctcagccagagcaaacaaaggagggaacaaagaagaatagagaggcgcattagaacgaacagagatgccgggcggcgacgagaccatctccgccttggtttccaggtccacaagcgactagcaccgtcttttccgagggaaacgatcgggcaagagcggtagcttgaatgagtcaagagtctatcgtcagttatctgcgaggatcaaggagcgacatgatcttgagctgtatcgttggatcgcctacgaaccacaagccaacccggctaattccatcagttgactttatcagatcaagagaatgagcgcggtcagtcttctctgtttccgttctgacagtcgtattcagatcgggtcagctcaatcattagaaggacacactcgagagagaatccgccggcttcggacatgagccgtttatcgatctgatgttcaaagcaagcgtgaggtgtgcgtgtgtgagatcagagctgagaacctcgtagcctacacggatgagatttgattagaaagcagaaaaaaaatagatcgcaaacatgccaacctcctgtgctacactaggcgatatatacttcatccttcagagatgtccaacagaactcaaattgatgacaacgttgctgacgatggtgatgatggtcgtctacaagaagccaacggaacttctgtggggaacgatgacgatttgggatttaaccctaacattcgcattttacctgcactcttcattttctcactcttcccggccgatcaaccaaccatccatcatccaccttgttgtctgtactcctatcacacacaaacatacacacacacacatacgcaacatgatctctagctccttcttccgatcggtcgctcgctccactcaggcagcctccctcgcacgcccgttctccaggtcaatccccgctctcggacctccgcttcgaccgcactcacctaccgagtccgctctgagagacaagttgatggaccgacttgaggccgaggagtgcgatgtggaagatacatcgggtacgtcttgtgttcctctctctcttctccgtgtgcaatatagtctcaggcagaggaggggagctagccgattggtacaatcctgaaacgtgcccccatggttcaaaatgaaactgaccaatccccttttgctcaatttttttcttattccttttctccttgttcttgcttcgcttgtcctgctcttctcttcctgggacatatgtgtgtgcgcgttcatgggcttgacttaatcaggtggctgtggaacgttctacgctatcaacgtcgcttccccagcattcatcggaatctctaaggtcaagcagcaccgactggtgaatgagattctgaaggaggagatcgccggtatccacggtctcacggttagtattggctttcttccactgctctctactcgctcgttccgttccgttcgctcatgcttctctctatctctctacagttgtcgacaaaaccgtgcgatcctgtatccaagtaacagatttaataagaccgtcaatcctattatttcttcataataaaaattgtatataatgtttcctatatcgtaagcacagtcggcctgcctgctctttcaacactttatgagtacgctccgcctttggcatgtccgaacctggatcccaaaccctgagcgtccaggatcttggccgtccggtccttgtcgtccatcagctttccaccgacggacatgtgtagatcccgatcccagatcggaggaggaccaccgtccttgcctttctttttcgcgtcctcgacggatttgccgtggatatcaagcagagaactacctcggtgttttttctttttgcaagattaattcgtatccggttgtaaagaaaacaaggtcggtcacacgacagaacgcaagaacagaagagtgaacaaatctctgggcacatacgttgtggtagtcgatctcggcctgaagctccgcgtcccgaatctttcgtcttctgatctcgtcagcctcttcgtcgttcggcactcgcacagagttttccgctcgcttcctctttcctgatacctcatccgccagtcgttgtttacgctgtttgtgatcaaatggatcgcagttgtatctagtcagagagagggactcggagcgcaacattagagactttagagaatcttgttctgctcacttcggcaggagtctcggtccagagactttgatcttccttcttgataggagcagcagacgtccgactgaacgccgtttgtcctctcggtattttggttggatccagatctggttggaacgggaaagtaaaccgtgcgatgtatatcagagtccatcaatagggttgatccatcgttcatccactggtatggtcatctgtagaatggatatggagagcagacatagagggacaaactcgataggaaatcactggcctcgggaggtttcaacatccattcctcccgtttcatttcttttggcttggccgcttcctgcagatatcaattagatacatatgttaagctattgttcttacaagaaagggatgaaaaaaaagaagaaaaaaaaaggaggaagaagaagaagaagtaggagagttacaagaaaaagaaagacaaacctctctctgttcagcccaccttcgttgtctctcctcgaagtctcttaacgcagatgatccatcatcttgtgctccctctggaacaggaaccggaccgacgagatcatcgtcgctatcgtcatcatatccgtagctctgagctgacgtggagggaggcgaaggagcctgatagtttgacggaggaagcgtcggaccgactctcggttgaggcttggagactgaaggtcctgcttgacgtcgcgcttgaaggtgaggaggtaaagctggaccgatcgagccgctctcctcgtcgtcgtcgtcgccagaatcttctttgttggatccaggctgtacaggttgctgtgttcgagctagcgaaggcggaagagagggtccaatagaagaggaggcggatgaggaaacagccggacgagaagggagtgacggtccgtaagcatcgtcttcgtcttcctcgtcgtcgggtgagtccggtcgaggtagttggagatgtggagggagagaaggtccgataggcatattgataatcaaacgctacaacagccagcgtttacactaaagcctgatagatcaagggaggcagcagagacaagaacgaaggtagatggtatgattgatggtgaggacgaggacgatgatgatgatggtcaaaagttgaaagaacagaaacgggattctcattatttgatcgatcaaccttcatcatctaacatcaactcgctgtccttcttcttctctcctcatcctgttcgttgaagtctatcccatacattctggtagaccatgtcgtccaaacaagaatatctcgcttcaaagtatgtccaagttgtcttctgcttcttcttaaggcttttccgataatgccaccatcactgatctgttcgttctctttacgcctttactcgaccaacccgtcggatgatcaacgaaccaaatggaatagatacatgtctggtcctaaagcagatgcaatcctcgctcgatcagaagacaaaaagctcaagaaaaagaagcgaaagcgagcggatgagccaaatggaggaggggacacgtcgttgagaagtgggaacttgatgattgaggatgaagacggtccggctggctgggcgccggtagctggtgatcatccatccgatgatgaacgccccagtaagtctcgtcttcttctcgcctttctttctgtgtttctctcttggtctttgcaagaaagaacagagtgatgactacaacgacggaaagaaggcgaagcgacttggaactgactttggaacgaaaacaatctatatctgttgcgttctcctgattctaaacgaacacattgtacgttctgaaaagccgtccagacatctacgagcaacttcaagtcagcaaaccgatcgggttggacagcagtccgaaccggcgaaaccccttcgccgccatcccctccacctcaagatattccggctgatgaacaacccgtggtgttagctgataccgaatctgttccctctgctcctgcccctcgacgaggaggactgatgacggctgcagagatgcgagccgaagaagcagaggtagaagcggccaagcaggccgctcaacaggccgccgaggccagacagaccgaagaggacagagaggcggagagacgatcgagagagacggtctatcgagattcgacaggacaaaagattgatctaaagaaggaaaaggcagaagaacggagaagggcaaaggagagagaggagaaggaggcggcaaagatggaatggggaaaaggaattgtccaacggggcgagaaagaggagagagcgagaagggagcaggaagaaaagagtagagacctcgctaggtgagggcatatccttcatctttttctttgctattctgactattctgactatggaggacatcccatgttgaccaaaccctcctggcttgatcgtgtaaagatatgcaaacgatgcgtcccttaatgctgagcagaaagagactgccagatggaatgatccagccgctaatttcctcacggttcgtccgctccctctccttctccttctcctctttgttccctcgtctgtctcgcttgggagggctgtctctaatcgagcttcgtccgccttttgtttcttcttgatacagaacaaacgatcgacaggcaagacatatccgaaatgtaaattcgcaggaacgcctaatcgatttgggattcctccaggttaccgatgggatggtgtcggttcgtgcacctttcctttgtctcttctctcttgccatgtctcgtactctcgaactcactttctctcctgtccaacggatgatacaatctggattggtagaccgaggcacagggtttgaaacaaaatacttccaagcacaaaactcgaagaaacgaagagagacggaagcgtacgcttggtcggttgatgatatgtaatctctcgccccggtcttatctctggaagaacgattgacgtgaaggatctcgggagaactaaacgaacgccctattaccaaatccagagacaactcataagatagggaagacacaacgacaaaaagactcggagataaacctacagaaaggtgcctatcagagaaaggaagagagaaagaaagagcgagaggaagaaagagagaagagagggtgaggcctcaaagccacagaagatgtatacaactttctgtttcaaagctactttattgattgtatcctaaattttttgttactataacagactactcattcgatatgtaagtttcgtaaaggattcatcatcataagaggaggagttacctttgattcccatgttatcctctctctcagcccgaaccaaccgaaaatacccagactaaaaaaattgaaagaagaagaacgatataaaagaagaggaaagatggatcattcaagcattctagaatcgtcggttgttgttgttgttgttgttgttgttattgttgttgttgaagaactaagaagcatcaagaatagattgggataaaattgtcagttcaagacaaacaaattggacggatcgctcgcgaggagtaagaatgaacggaatacaaaccgtgtttcgaccaagagctttgtcctgcttagcctctgcgaaaagaaagggcaaggatagaagaagaagaagaagagggagaggccagaggtcagcaggagataaagaacgagaaagacgagcataggtatacgcactctcttcgagtcgcctgaggacactggaagcctcctcgaaatcggagcaaccgtctggggataacaaggaaggatagagggttaactaagccagccatttgatacgaaacaagaaaagggcaagagcaagagacatacggaggaatccaggctcgtggaaagctcggtccatgttctcgctcaagatttccttgctagagggaaaaaatttaaagtgagggtgaagatgaaggtgaagacgaaggtgggagaggagaggttaattctgaaaggtcatctgcaagcagaaaggagaaccaaaggacgaacaactcgggagcctcccaagccttgttaataaggtatcctcgaacggtggagatcgcgtaggactttccaagactaaaataataacgcaagacaagaagaaaaaagaagaagagaggttctgttagcgaccgtccatattttcccctctcaaattgtgaaaatatcgacgtcaagggctgatctgatgcttcttcagataggttgaccatcagcctcgggaagcggagaggaaaataaaaagacaaggatgaaaacaccggcatgtgcccttccacatcctttcagagtgaaccagaaaaggagctacaatctaccgacaaagacaacacatatacaaacacaccaacacacacacacacacacnnnnnnnnnnacacacacaccaatacagaaccgacagaaaacacacacgaaagaaacactcactcaagcttctcggtgatctccccgggaaggataccactcgagaacatctcggctgccttctcgattcggttaagcctatcaagcttggcctgggcaaacttggggtccacagacccggaccgtcgctcctgaccggcaaatcggacgagaacgggagcggcctgaacgggagctctgactctgagagcgggaaggagagagctgagagaaagcatgatggatggatagatgttctatacaatgctggtggttgttagatcgacggtggggatttctacacggcaagagacgagacccgtgttgtccgtagcaggaggtgtaaccaaatgtaaccaacgcctgccaggtgtcaggaatacgggttaagtatcacgtgttctcttacgtgggttacccctacaggctattcgttccctccatcccttatgcctcttcgcccattttccatcatgctctagtttgcatggttcatgcttcatctttttagttctcgtgatctcgagcctctctaggctcgtcatatgtatatctttagtggcagaccaaatgcgcgaggggtcctgatataaaacggggacgccctcgcgccttcttggataagagttttcctcaagctgagattcttgttgaaacctcttatccaaagtatattgttaatagtttggtctgcttcagatatattaatcgccagagcctaagtgtcaccccgcgaaccaagtgattacacttggttaccttcttaacaaccgagccttacaccaggttcgcccttggttacggccatcgctcaacgcccatcggctggcctggctcgctccgttgggtgtgatgagccaccaaccatcagacatcagccgtcggattctcactctctcactctgtatacatcacaaatggtcgcgttctcactcgcagcagctgcttctaggtcggtcggtccggccaggaagacgttcggtcaggctcacaggtcaatcgcccagtcgatcgctagaaagagcgaccatctcttcgtcgtacgtcctatttttttttccttgttcctctgccttctttttccttccttctttcctttatttctctcgttctcttctacgggtagacagcggtcgttctgtctgctgatcttgaactgcttaatcgtatattctaaatgtagcatcgagataccgactacaacaatgcctcggtacgttccgattcccgtctggagccccctctctccgcgatcaccgttctgaccaatacgcagcgtttcgttttgattgaccatccttctcctttctgttcggacaatcttacatccagatcccatttgaattctctgccgagaaccagaagacggtcaaagagatcatcgctcgttaccctccgcaatacaaaaagtttgtttgcgcttcttctcttctcgttttcccatcgtctactgacacttggcttgtttcttcgaccaatcaacaatcgacaggggagcatgtattcctttgctcgatctcggacagaggcagaacggaggatggactagtctaagcgtgatgaatcgtaggccgccttgctcatctttgtccgggttccttcttcttttgactgaagatctttcctttcttctgcttccaattggacagacgtcgccgagcttttggagcttagacctatgcgagtatacgaggtcgccacgttctataccatgttcaaccggttcgtccgttcatttttccttgagtccctacctcgactgacttctctcactccttttggtttcttcgaaaataaaaacgaaaaaaaagatctccgatcggcaagaactttgtccagttgtgcacgactactccatgcatgctcggtggttgcggctcaacctccatcctcgagaccatccaaggtcacctcaagatccagcccggccagactactccggatggaaagtttacactcgtcgaggtcgaatgtctcggtgcttgttcgaacgcgccaatgatggccgtcggcgatgacttttacgtacggccctctcttctcgttacctcttccgcattcaccatcatctcagacttcaagcagaaactgaccaggtagtccttctttcgtcttcttcttcttcttctttaccacgaaaacaggaggacctaaccccagagacaaccatcaaggtcttggaatcgttcgcaaacggccagactcctgcgcctgggcctcaatctggtaggaagcagagtgagaactcggccggactgaccgcgttgacggagaaggtacgtctggctctctccctcaatcccgtcccacccgggtgatgactgatcttcgattatcgtcatctgctgaacagccttacggacccggtcaacattgtcaacccgagttcgcataaacctacccattatcttcttgcctcctcctcctcctcctcctttttccttgttctctttgttttatcatttgtaagacctgatcttttatcggcttcctccctcccccgttgtactttccttcttattctattttcatgttttattttcatgttgtcttcttactttaactttccttttcgctttcctcttcttgccacattgtttctgttgccctctatccttttcttaatcttcttacgcaatgataatagggaaaacatcatcgttcgatatcgaaaacagaccaggctattcctaaatcagagtgacaagaaaggtcaagagggggtggtccaaggaagaagggtgtataaggtttacataaatatatctaggtcgataagtgggtatatagattttgatggattagacagctcttagctatctttgaaagagaattcagaaaacagaggaaattgctggcctacacgatagagcagaacaaaaaagtcaatcgggaaacctctttttctcaaagataatagtcgtaagacacatacaaattagcagccgcagtccttgctcttgggctcggcaagctacaatgaacagatcaagctccgggacgatcagcttctaagcgcaaaaaacaagcaagagcaggtggacgtacttggaagaatccagagctgttcaacaaagtcttgacgtccacagagacgtcagcctgagcattgaggttggcatcaacattggcattgatgtcagcatcaacatcagcgtcgacatcagcggagaggccaaggttgacgtcagcgttggcttgaagagcaacgaagatggtggcggatacgtcgaggacgccggcggcggtagtaccagtgggaacagcagtggaagcgacatcacaagcggaagaaggagtggcgacagcggctttggtggcaggagcggcaggagcggctgggacaaggtatccgcactgaagtaggcggtgggaagaaacaccatcagcgatgaagagcgtgcatcacagagtcagaatttggaacaaacttttcctttgttttgagtgttgtctcctgtgggaaggatcgcagcgttaacattggcatgggcgaagagatccaaagagcctgaaatgtcaagctgagcacgagagaaaatagaagatcagattggattgattcgaaatagagcaaaggatgagactacatacgtgagcgtatcctaggccctgcaaataggtctggacctgagcctggtcgtcgacccaagctcccgtatccacatcctttgaaaataacggaacgaatgttagagaaatagaaggccattacccatatgttgcataaaagaaaacacaactcacaaagtaaccaaagttgtactgagcaggaggagcccattgcttgtcggggcactggtaggctaacgtattatctggagtcttaaacaacccatcgacggacaattgagcctttatgttggcagagatgtcatcgctgtcgagaacattcttcaagacatcttcaagcccatcaagaccatcaagacctcgagccgaagcacgacttcgtcgaacataggtcatgcctcctccgtgggactacccggtgtataacgatagaagtcagttgacatagctcaattctgtaccctctatacaggcaagcatgaactcactcctccgtatccacctccagaaacgtgaactcgatgatcatcgtcgacattgacggaacccccaccataggcggaccctcctccagccgcaccctgtgaattcataaccgataaaaggcacacatgagctaggttccgtatgggtctaagatgacagtcactcacagagtaggaagaaggagcccggacgtgaacaccagcgccgacctaaatgggggaaagaagagaagagaacaaccagacaaggggtcaatgcctatgtaagtgtctattccagagcactcaactcactttagcgccgagaccagcaccaccaacagcggcaccagccttgagaccaatcttcgaagagaaaaaaaaagttgtcgtaacaacaacacatcgttaaagaaaagggtcttcaccagaacatgttgaaagaacacacttacgacggcagcagaagcctgggaagcagaaacaagggcggcgagacccaaaacgatgacgggagtagagatcatgttgtttagttaaaatgtaaaggtaatcaaagaagacggaggggattctctaaggctgatgagcggaagtaggagaagaagaggatgaggaagatgaggagaggaagaagaagaagaacaaaccaacaaacaaaagaccaacctttatacattctcaaccagctgaaagtgaagcaaagagaacgaagaatgtcacaaaagaacaggcacacccacacaccaaacaaagggtcaggtcaggcacagggaacttccgggatcggacggtcaacataacagcgccctccatcgatcgagagtcagtcttcgttcagcagggcatggctgttgattgttctcgatctattcaggacgtacatccagatcagcctgggcagtgatagcttctccgatcatccagggcgtcagtgagaagatcatcggatgcaccaaggactgtcaggttgggaacagacggacagaacacacaagtcatctacattcaagtcccctttgctacagtgaacccaggaggaatacgcaaacaagagaaaccctagaagtatagacgagatggacaaaaatattcgagggtaggattcaaaggagatcaagggaaaatagaagagaaggagaacgttggcagacggaacataaaccggtttacatagcgtacctgttttgagagagaacaagccacaaataaaagttgagcgactatatttcaacaaacctgaggcacagatacgtacttcctggtccactctcgagcagtagcctcgtaacgagcccgatcggtcttgtacgtatgagcaatcctatttttaagaaaggacaaaagtgtgttagatttgaagaaaggagcaggtgtcaactctcagattgaaggatagcgtactcgggaaccaaaggatcatcagggttggggtccgtcaacatggagcaaatcgaaagcaacactgcatacgaggacgaacatacacgcaaacacacacaaatgattcagacttttatagatgaagcgttgcaaagaactgaaaattgaacaaacctttcgagatggtcaaagcgggactccattgatctcgaagaatatcgagacagatggatccgttggagttgatgttcgggtggctgagaaacaaataagcaaggtaagtgaagtacctatatgcagaaggcttctaagataaatttgaacatactaaatcttagtggtgaaagccaccttggggggcttgaaagggtaatctatagacacaaaggccaaaccaaccaatgaagttgaacatcatcccaaccaagagcgatacttgaggtaagaacaagagtggctgaccagtagggaaggataattggctgtaacaaaggtcatgttcgttaagtttgatctagaggattactaaagtacacatgccacttacaggaagaagacaccaccggcgtagggggagtcaccctaagaacacagcgggatagaacgatggagtgtcaggtttgaaaacaccatcgggacaatcaacaagtaccatgtttccatactaatctctacaaaacgttgaatacattacttacagggcccatgatagtggcctgccacgagaacatgttatctccggtaggtccagcagagcacgacgagggtggatctcgtccgagatcaattaattcctaagaggttgaagaggcatcgagaggaagagagaaacatgataagcatttgcaagcgacagcctgaaacgaacaacagaaggcgaagcgtccgaaggataaggggaaagaagagatgggggtttgagcctccagtccaatgtacaccgacacagcctatcatactccgtcgggaacacctagtctacagttcttgatctctttcaagaatcgtctcggtctttctggagcagttggttttgatacagcagcagaaggaaacgcaaaagataggatacaaagcatgtctaaaaagacgtcccccaatgaaacaaacaatttctactctacaggcgtcacacatcagaaatccgagctcaccttgttaattcgcttgagagccatgtctgcaaatctacaagcggaagataaaattcgagaataacaagaacgataccgttacggacacaaggcaagtggcgaaagagtgatggaaaagaattatcgattccgggtcaggcgagcaggcaaagttcgacggatggagagaaaaatcccggtggggtgaaaatagtgagaacaaatggcaggtaagaattttcttccatgcggtcagtcaaacctagcatacaaagatgtatataacgaagtccaaactggaagagaagggactgaaggcgtacctgtacgatgtgaagtagtggtggttaggaggaaagccttcgtcagctaagagttttgcttgtgcttgagtctactttagcttcgcttagtcagctgggtttctactcgattctctgcccttctttttgtctcctcacttcgttctttgttacaataattcaaagctaatactagttcaggtagttgggttctctcagaacttcattacatttgtgaaaatacagatatgcctctgattttgtatagcgatcaccaatagatatccttataatttactctaccttgttggcttgctgtaacttctcagctttctcagcctcattgagcgcaaactcgaaccactgcttgagcacctcagtctcctccatacctacactgattcggatcaagtttctctccactccgaagctctctgcccagtccaattctagatagtgagccaagataacatatggggacgctaaagtgaagtttgttcccagactagggccttttgcgcaaggcagcgaattaaagaatgcctttgctgcaacatcactagtaagcgtcaccgagaagagaccaccgaaccgaccggtctggtcaacatcggtaggcaggattggtcgtcgacattgagagtactccgtagcggatgaccatttgggatagtagacatccttgatgaccgagctcggaggatgagacggatcgaccagggaccgtgaacggaggagatcacaaagaatctcagtgttggcgttaatgaggtggattctggatcggaagtctcgggagtttcgttccatgaaaatagcatcttcacccaagtaggtatcttcatagttggcgtcaaggacagctcgtaagtccgtgtaatgcttggactgggagttgagtaccaaactgatacacgaagttgcagaaaatgagccgttgtcacataaccgctcatgcaaaagatttgaaagatgcaaagaatgagagaacttggagagaagagacaaaccttccacccatgacgttgacatcaccactgaatatcttggtcagactactgacaacgatatccgcccactccaatacctccacattcacaaagtttccgatagtctcatcgacaacgatgtaaaatccatactcatcggccaactttcgaatggctcgaagatcgggtgatcggagaagagggttaccaggaaattcgcagaagagtgcttgaatcggtcgaggattctcgggcgttcgagactcagccaaaagagttgccaaggattctatatcctcagatgaaccttttccgaagaaatggcttccaggcccgaacttctggagcaccttgagagtgtctgtgtaggggaagcttcaagtgtagaaaaacaaacaaacaaacaaacaaacaaacagatgaacgattaacacccaggaatgcatagatatgtgagacgacttcaacgacgaacccaaagcagacactttttttttcgtcgccaggcctcgtcctcatagatgtcaaatgagcattataaatggcgctcattccggtggaaaacaaccagacatcatcctccgagacttttctaccctccacctcctctcccttaaagccacctgcgatccttcgtctcagcgcttgtttggcaagcgcagccgacgcaagaggtaggtttcgtccgtatcgttgctcgacgtacaccgaatggtcagcagtcagatcctcatgggcagtgaccagggatgacgatgaagataccccggtggttggaagtgtgggagtagaggcacctcctctagaatagtgtctgtttcgagagtaggaaattggccggacaggagcttgctgcgtagagttgagcgcggcaggaactggaagagtcattttgagttgatcccccgaaccaccgttcacgagtttgacctcgcttaccggcgctgtgttctctcctagcgagatcagacacctttctgcccgcctggagctaattccctctccggtgtgttgccagaaagacttcgcaagtgggaaaatggcttcagggaagagaataatctgaagttcaatacaactactgtcttccgacgtagctgaggtgagatcggctgggttgctccctcggctttggtcctgagcgcagatgacaaaatcgacgattcgagtagcgatcggctcgggagagtgttgacagaggaaggagcggcattgctgagcaatgctaggatgaggaagaagaagacagagctcattgggctgaccgaacttcttcaggcagattgaggcaagctgatgtgatcccaaacattcggtgtcagctctttagtgcagaagatgccatccacttgagaagaaagacattggctgaccttttgaatgctcttgtgaatgaagaatctagggtatccggtttgcatcgcttctttgatccacggctcaccctcctcgtacgcaacgttatcctcccacgtcggaagcgagaccgaaacagcatgaggcaggtcgcgcgggatgggacacccaaccggaatctgactcttttgagcagtgatataagacatatgaagcaatatcgtgtactttttatgcgagtgaaacagcagtagattgtattatgtatgttgaggaaaaaagagaggactgaataaatgattatggggtgtaaagatgatggcgactttccctgatgtcggttattcgaaatagatgattatcttgttcgccacaatcatcattccatgtcgtcacgtgaatcaaagctatgccgcacggctgcgtaaccacgatcggcagacacggcatccagctcgacggagaatgagcgagcttcacgttctattcaatcccaccacctattgtttcatcatctattctcttcttcccaccttcatcaccatcaaacatgtctgccggtctcatcaatctcgctagcaggctcgccggtaagtttttgtgctaggttttgcaaaataaagaacctataagggaagcaattgatatgtgacctgatttattcatccttcttcctccactatttcttcctttttcttctttctctattctgatcgaaatctctagttcctgccatctttggagctgccatcgtccagtcctcaatttacgatgtgcctggaggctacagagccgtcatgttcgacagattctcgggagtcaagaatgaggtgcgtcgaccttcttcttttgcagatgcgatcatacatggttgcgatcatcagcgtcacgtgaggctgatgggagatcgagagggcgaaggggaacgcatcgacaaccacatgtctctatatttgcttactttatcaattaccttttgttctatgcgacaggccactggagaggggactcacttcatgattccttggttacagcgagctatcttgtatgatgttcgaatcaagccccgagttcgtgacgctgccgttgatctaactgttatgtgtacacatgctgaatctatcaataccttttatccagaacatcaacacgactactgggtccaagggtaagacatctgctccgctcctttctgattgactccaatgtatccatagagctgaccgatctcctccctcaagacttgcaaatggtgtctataacacttcgaattctctcccgacctgatgtcgatcatcttcccaaaatctaccaaaacctcggacaggattatgatgagcgtgtgcttccttccattgggaatgaggttctcaaggccattgttgctcagcataatgctgccgagcttatcgaagagagggagcttgtgagtggttatctatttatttattttggatgcagtaccagtacaaccggcatgtgagctgatgctctataaaccttcatacaggtctctgctcgaatccgagccgatctactgaagagagcggctgagttcaacatcaagctagaggatgtttccatcgtgagtgcttttgtctctgtagtttgactgcagccttgctttctctatcagagtaccactgagcaatacttcataatcctcctcagacccacatgaccttcggtaaagaattcactactgccgtcgagcaaaagcagattgctcagcaagatgctgagcgtgcaaagttcattgttgagatggtacgtacaacactggccgtttcttctttctttgtcttgtagacaacttatcaattactcgccttactctctctataaactatctttaaggccgagcacgagcgacaggccggtgttattcgagccgaaggagaggccgaggctgcgaccaccatcggtcgatctctcgataaggccggagcggctttcgtcaaccttcgacgaatcgaaaccgccagggaagttgccactacacttgcttcttctaggaacgtgacctaccttccttcgagtaatggcaacatgttgctgaatgtaaacgctcagtaaacggctttgcctggacggagcgagtgaacggaataacttcagaaaaatcttgttgcatgtataatcaatgaatcatacctatctagtctcatcacagctctaccctcagcacacatatataaaccaagctctctatgagatatcttccaatggacagactgattgcgtttgatcaaccttgccgagcatcatagaaagtggggtgtgtggttatgtaaccggactgtaacctttttttacccagcagaaaaagttccagcagactttcccttcgctcgtccaactccccgccacgacttcttccgatacccacccatcttccatctttgcctctcaaccagactcatccaagtctttctctctttctctcttctcttctctctctctctcttctctttctctctctcctctctctttctctatctcctttctcttctctctatctccgttcttttcatccacctttcttgtctgcttttgtccagcgaaaaagcactcgacctatctcttctttcgcaaggtgagttttgcatcctgatcccattcctcaggttcaacatccgtcgtataacctatccggatcatgacggatccgactgaaactgattttgaaatctgtttcttcatgactctgttgttttcatcctgtcttgttcgaaatcttacctcttgtggtatttttttccttgccgtttgctggatctctcaaaccgaccgcgattttcttgtctgctgccatatcaatatcaatcgctatctcctttgttacctggctcatggatcctgatggtattcctttaatcgacacccagcagtcacccttttccttgatatctttcccaccctttcggatcgatttctgccttcacaatggacgcccagcagcagcaacagccccagcccgctttcgacgccaacgcccctgctaacgtcgagggagaggctcccgtacgttcaccttacccttttgtattatcatatgagcaacccgttctttggtgtttcacaattgactcgaatcacaccttcgcttcaaaaactcgaccgtctaccttggggcgtttttttctttgtacacacagcggtaagctttttcttttttgttcgccgcgtatattcctctcgcttcttttttccccttggaccaatctgtcagtttgaaagcttacattaagcaaacctctgcactgtttcctttgtcagacgagctcatctctacgtcggaaacctttcccctcgagttactggtgagtacgcctcattgtaattgcgtttaatatgctcaggatgtggaaaggatgctgatgtgcgttactttttcttgctcttccagagtacatgcttaccgagattttcgccgtcgctggacctgtccagaatgtcaagatcatccctgacagaaactaccagcacggtggtctcaactacggtttcgttgagtagtgagtgttcacgcgattctttttttatatttcattgttatcatcatcacagtcgatgacaggtgttgaccctgatctcatctcatcaaagcatggatatgcgagccgctgagactgctctccagaccctcaacggccgaaagatcttcgacactgagatcaaagtcaactgggcttaccagggacagcagaacaaggaggtcagtgctcctgaacgccttgggccgtttggattcaagctgaacgcatatatcgtatgtctcttctcttttgccacaatgtaggatactcagggccacttccacgtctttgttggagatctttcccctgaggtcaacgacgagatcctcaacaaggccttcggtgctttcggaaccctctctgacgctcgagtcatgtgggatatgagctccggtaagtttatcgttgtgtcgtgcctattcattaagagtgagacactgacgttatctgccgtccatacaggcaagagccgaggttacggtttccttgctttccgagacaagaccgatgccgaacaggctatcgccaccatgaacggagagtggctcggatcccgagctattcgagtcaactgggccaaccaggtttgtcctctgtcaatgattatgtcatcgacattgggcccttgtcgctgaactcgacaatgatttcgactttcttgggcacagaaaactcagaccggaggtcaggctggagccggcgggcagaaccagcagccccgaatgggtggtgctggaggtgctcccgcccccatcaacttccagggtggacccctcagctacgaggttgtagttggacagacccccgctttcaacaccaccgtctacgttggaaacttgattccatacaccacccaagccgatcttatccctctcttccaggttcgtttccttcgagcttggctgattgtttgtttcgacgcataggatgatactgatattctagccgatgattttgacttcagggctacggttacattgttgagatcaggatgcaggctgatcgaggattcgctttcgtcaagcttgactctcacgagaatgctgccatggctatcgttcagctccagggccagcttgttcacggccgacccgtcaagtgtagctggggtaaggacaggtgagcattcgcttcatactttaatctgagcatgtgtatgtcatgacattaacaacgccttggttcgtaggatgcccggtgagggaggagctcagcccggagctggtgctatgggtggacagcccggaggaggtattcctcagtacggcatgcagcctccccagatgtacggcatgcctcccaacgcctatggacagtatcccttcgctggctaccccgcttacggacagcagcccggagctcccgctgcgggagctatccccggacagggtgagcaggctcaggaccctgccactcttgccgctcagcaggcttactaccaacaggctctggctgctcagtccatgcaggcccccgctgctgccggaggagcacagtccggttggggagatttctacaaccaggccggtgctgctccccagaactagattagtggtttgttagggtatgatgcgtagatcctcttctttgcttgagagggtcaaccctacgtctcgtttcaatattctccaatttctttaatctatcgtttctgtttgactcttactatgttcctgttttctctcgatcttccctcgttctcgtttttttggggtcctggcatgttctttttctccttcccctctactgatctggttttccggctcccctgcatcctatgggttgatctaaatttctttttgctcagtttctttttatctcttctcacaatctataaaaccattttgattgttcattcctctgtgcctcatcttgtgtggactgaccattgtacatctagcaagcaaaagtgatgaagtatttctctatcagctgaattacattgtcgagatcagcagacgtcatcatgacatacagccagttcagttcagcccattgagcgtctcttatcttcacccaatcttcctttctatcttatatccctccgctctgttcagcatagttccttctctcgctcattcataccactagagaaccgaaataaacatgacatcttccttgaacggcagctgcttctgccaacagactcggtacacactccatccgacgtcgcttaccgatgggtcaacaaacttgacgatgtctgcctattgccattgcacaggctgccaacgaatgaatggaacgccgttcgtacataccactcactggaaagaacaagcgatctcgttcgaaggagccgagcctgcaaggtatgaacagaaggaaggaaagttcaagctgagatgcgagaagtgtgggagtccgataggtacatggtcgtccaagacagatgagtgagtcattcaatggtataatctcggtacttacgaactccttctttttgctcatgcgcactgtctatgactccgcgcaactttagatattccatttggccgtccaccctcaaccgagatcgctctgggaagcctatcggcctggatctcatgaaacccactggccatatcttctacgatacacgcgtgatcgatatagatgatggtctgcctaagtgggatgagtacgagatcaaagcggaaggcaagctcgagaaatgaacctgtgatgagctttgagggcagttactgaaagaaaaggggagaggacgaagctttctcatttgtggaatgttgatagatgctatgtgacattgatgatgttatgtgacattaatgatgatgttcattctgtcggttcttcaggacatgtatcgtcgttagcgtcattgaagttggacgcagagagactggacacgttcgtttacttcaaagtgcagactcttaagaatcttggtttcactaaaatgatacatcttgttccaagagcatgtatttgggcttctgtactctgcccatcttgtcggatcgatggatggtagagaggagcgaaatctggagcgacgactaggtcgaaagaaaataagaggagcagtgaccacatatcacgaactaccaactctcaccctctctacacgatcaataccgatacacatatggctctcgaaatagaatcaagcactctggctagaaactctctcaagcttatcaaagactatcagggttcgtgaccaatcatccgacgaacacagtggtgcaaatcaagggatgatgtcaggggcgaagagctgatcgtattcacactcttccgacaagaagacatgaatggaacttcttatgagactctatctgcacctcccacgcctcttcagtttagcaaaattgtccaacttgggcggccggtcgtcatcaaaggtgagaggacgatagacgcttttctagattgcgtttctgacgccggactggatcatcgacagggtacggtcggtcgatccctgcttttggaaaatggtcggcctcttacctctcagacaccatgggcgagcaattgatcagcgtggccgtaactcctgatgggtaagttatctcgactaccctgccagtcttcggttccggaagacttagctcaataattgtctgttagaaacgcagatgctttgtatgaccatccgcctgaggatcttgaacattcaaccgcctactttgttgagcctcacgcggagaaaatgactatgcagtctttcctgaacaaactgagtgagctcgacaatatccgtatccctcaaaagtatcctcagacctcaatagtattgatcccccctcttccttctgcaatcttctgttgactcagcatcgccctcgaataccacggagattgtctatctgcaatcgcagaacggaaatctttataacccttacagcgaggacacggagtacgccgctttacttgatgatgtccctcaggatgttccatgggcaaacgaggccttgggttagttgcttagcccatcgtatcttctatttgtctcatcacacggttggctgtacatcatgctgaaggaggtatcctgtattcacttttgacgaaggtcaagagcatccggatgcaacaaacatctggatcggcacctccgcaagcgctacttctttgcacaaagacccttacgagaatatctatgccgtcatcagaggctcgaaaacatttacagtcttgcctccgactgaaggattgttagtaggaagtaggtcgatcttacaactaaaactgttccggatcgtcatatcttattgactggattttactctgacgaatttgtagccaaactatatccgcacgccaagtggcatcggtctagcgagtcttcctccctgtctcttttgccttcgtcaccagttcaagatgacaaacaaaccggtcaaattccgtgggcgtcggtgaatccgactcttcctccttcgacggcgcctactccgttattcagacatgcccgtcctatgtctatcaatgtcgatgaaggggacgcactctatcttccctcgggctggtggcactatgtcacccagaccgagggcgacgaaggattctgtgcagcggtgaattggtggtttgactctgatttcactggcgaaagatgggtgatgagaacgtttctagaacgagccggaagagaactaaattggatcgaggacggagctgtggatagcgacgaggaggaggaggaggaggaagaggatgttgaagatatatgattttcctgtgaccgattctatctggttgtcttcttgctctagagagacatcgaacggcttgctgttctgccatgcctaagcgtacatagtccccaatatgaacacatcctgagtccagatcaaagctcgacattctaaccggccagacgttgctattcaaagatcagtctgtttgcttacataagccaacagcgtctgacgcaacgacttggcttgttcgcccacggtgtccctacctgattcgaatcctccatcatcaccattatcattatcgccacatatggcagaagtacgtgtagacctatggtatattagcctgttatctcttgtctgacgtgtgatgcttctgttgtcattgaaataggactactccttccttggagatctcgccctcgaggccgttctcgccgaagtcggagaaggagctgaagggttgagcaacgtcggactgggtggatcgaaacgagctctgggcaaagacgatatctacaacgacaactgggaagatgatgaggacaacttgggtgcgggaaagggaaaggattgggagaaggaaatcgatgaagagatgaaaacgtccgtatgctaccagacttcatgcttgtttccatgtatgttctctttgaacctaacagtttgggattctcttacacacatacagccaaccggatacctatgcctttccctctacttcttcgacagacaaatactaccttcagggtctagccatgctcaataaaactaattcgaacgccatctcaaccgcatccccttcggcctcgccatcctcttcggcggtatcgtcaccagcaccggcagcgacagccagtctgatggatgtaaagtcagaaccagtggaggtttccttgccgcctgtatcacctatcaaacctcctgtacgggtggagagaacgatcgaggagatgtttcctgatttcagaaagggagagactctaaactttgtcgatatgttctcaaatccaagtagattcgctaaaatccccaaaggaaagccgaagaagagatatcgggaacacagttcgtagtctcttcgagtattgtttctctctatgtttcgctaccatccgcgtcttgctcagctgtttctttgattttctagtcaagccgctctctcctcctagagtggggtttcccagtctgttggaatcaccgcctgcccctcgcgtcaagacattaagtagaatccttccaaagccacccaatctggatgctgaaaacgtctgggaagacacagaaggagttgaggacgatgagttgttagagaaggctcgagctgtgagtgtacctctctactcatgattttatcacagccaaactttgataatccatctgatacacagtatgtattctttgccagcgggtgcattcgtgcacagattggtattgggacattggggtgaatgatccccgaagctatgacatggtaaacatgatggaatgggaaacccaaatcatgtttgatagttccggaccgtgagtcacattctttccctcgcatcgcgtcctcaacattctgtgtggctaaccatgtctggttggctatgcgctagacctctcaacaagcgacgccggccggacacgcttacgcctttcaatcgggagttggatgaaggaagctgggctaatcttatcatgttcgatagcacaaaatcacctcggccagagttcttaagacctatagaagaagaggagagtgtggacggtcagtaggagattttgtctcttgattattcagttccgtctgactgaaattttatgttaaactgcctacaaaagcaacaaacgtcgtcaagaagccgtcctctccaaaacaggttgtctctgcacgactggcgccaacaaacctcgatccgtataatatctccaacgaccatcactatgagggtatgaagcatcgagttcgacagacatttgggtcgattattgtccagcactcttaccccgctctcaagctccaactaccctacgtaagactatctttaacgaattatgccagtactatcttttgatttacgtttgttcaacaaattgatctacacagtacaagacatgcatatcgaagaacgacgctcggtcttggcatcgtcctgctctgcagttcccatccaacataaaactgactttcgagccggtcaagagtgcaaaaacgtttaaagacaaggtcggcagaaagcttgggaagggtggagatatcgcagagggcttaagaaaacctggagacttgactctgaaggacacgagttctttcgtcctctgggagttttcggtatgtttctcttcgatgttcaatatggcttatatgattactggaacagccattcgattttatgttgcataggaggagcaccctcctatcatgtcaggtttcggaatgggtagtgtgcttgtcaattactatcgtaaaaccgatgataacgacgaatttgttcctagggttagttttgttgcctgactttatatcgatagaatttctaatttctcaactgctaaaccgtgccttgttgagactcaaagttggatttaggagaaccgtttgtgctggacccgaaggacgagccaccgtatagtacatttgcacccatcgagcacggtcaaacacaaccaacactctacaacaacctcatcaaagcacctttgtttcgtcataacgccgagcctacggatttccttgtcattcggtgagttcataccgggttctacaacggtttgtcgtgatccctgtctaacgtttcgagcgatctttccgtcctgatagaaacaccgttaaaggagaaccaaaatactacatccgagagatcaaaaacctcttcgttataggacagactatcccttccgttcagattcctggtccacatgctcgattggtttctggaacggccaagcatcgaactcaccaagtagctttccgactcctgcagaaggctaagggaaatcgaatgaagctctctcgtctgatgaagtacttcccggatacgcacgagcttcagatgagacagcgtttaaaggtgtgtacttgtcttgatatcaccagctgaaaaaaaaaaacttgatgctaactcccgttgtgttcttggtttcttgattctctgaaaaggatttcttggaattccatcgaaggggacctcatcaacaaagttggcgtctcaagactggtataaagttccccgatccgacagagctcatcaagatggttgctcctgaatccgtcatgatgattgaatcgatgcaagtcggtctccgtgtcctccaagatgcaggttatggcgtttcggaaaaagaagagaaggatgaggatgaggcaaagatggacaccgagcaaaagctggctccgtggattatgactaagacctacgttcactctcagagagacaaggcttgggttcagctatatggagagggagatccaacaggtcgaggagaaggttttagtttcatccgtgtctcgatgaaggacatattcttgcgagaaggagaaactgtagaggatagaaaaggtacgtgatacagtcttgcaaggaatcgttgaggactacatgatctgacatatatatatatatccttgtagccttcgttgcatcccttccaaaagggcaacaaaagcaaggtcatgtcgttcaagaacgagtcttccgagaagaagcaaaacggatctgggatcttcaacactcgtccctgagcaatcctattcctccggaactctcggatgacgaggctgacggtcaaggtcagaatcgacgccgtagtatttctagtaaacctccagctgtaggaaatcgggacgacgaaggctacccttacggtggttcatcaccagcacagtactccccgttcccaggtgcctctagaggaagatcgccctcggcgatgagtagagcttcctctgtcgaccgtgatgatgcaataagtgttggcagcaagggctatggggcaggaggaggagggaaagcattgaagatcaagaggctggttcgttcattctatctaaagtagtacaatcaatgtttctggcattcgctgatacacagagttctttggttcttcttcctccctttcaatcttttatagattaaaggagagtggaagactgagatcgtgcgagacatcaacgtcatcaacgcctatgttcggaagcgacagcttatcgaggagaaggagaccgctgcagaagccgtcatgccgacaggtgatgtggagagagataagagaatgaagcgattgtgagtgtttcaacaagaccccactttgtttctgagctgttcttattccttctgacgctcttttttcgacacctccgatccagtattcaagacgagttggacaagctcaagaagaaccagactcgacgaatcaatcgaaagaaggctttggccggagacgagaacggaaataccaagcaaacaacctcagttcgccgatttcttctttcgtattcgatttcacctttttgcatattgttgaccatgttgtggcggttgtctggtgatctctctaacagagaaaatgtgccaactgtggtgtcatcggacatatgagtatgttttctcctttccttcttccttctttaaagaagaatgagatttaagctgtcatctctccggttatcaatctgaccactcttcttgttccaaacttcgtcttttagaaaccaaccgaaagtgtcctcgatgggcagagttcaaccaaactcaagaagccgaaccccagagctcgttatccgcgtctggcctaccactcggtatctcttctgctgttgatcatctgcctagctccttgtcagtcaacgtccctttctcctttttctttctgtctcgtgtattataacggagatacatcagtgctgactagtttcttttgtctcttttcttctcttttctttgcttcttacagctttgcgatccctgaagctgagctcccgaaattgaaactcaatctgggaaaaaagaaatagcctccgatatcctgggcatctatctttttgcgtcttttcctttccattctgcctactcggacgtgcgtaagaagaacaagaaacagggtcggagcagagagacaggatgggaaggactaagggggagaaatagtatctcgatatatgtacatacgtcaacgaagagaaagaggtcctgatggatgtatttctcttgtcacttacactctctttctttcttttcttacatcactcgaggtgattgtttctgtttgctccattctccaggagaacaaagtaaggggggggggaggatgtgacagaaacttgaattgtaacatagtgcatagatagaacattcagagggacccatctcgtaagcttacgagctcctcaacgagcttggtcgaggacatactctgaaagcatcctcaagaaaggcgtgcatgaggaggagtagagaaagaagagtgaaacgtgcagggatgtagagaaaggccttaactaacacggccgacagagaccgtgtctgtccaacttttccttgtttcgaaccaatcaaaagatagatgggctcatctagtagagtttatgatgttcaaagcttgtcgcagaaggcaatctatcgtccctcttgcgctttcgtcgattttggctagagatgttcacactatggagccaaaaaagacgatgtcgtcgtgtttgctattgttgctaacattgtttaaggagatagaaacattcataaaagacaactctgacacctcgaaacacattcgacaactcttctcttaagcagccaactccttagcctgggcagcagccttggccttgacatcagcgatgtcaccaaccatgtagaaagcagactcagggaggtggtcgcaggctccggaaagaagctccttaaaggactccaaagtagtcttcaagggaacaagctttccctcgataccagtgaagacctgagcgacagcgaaaggctgcgacatgaatcgctggatctttcgggctcgctcgacggtcaacttgtcctcctcagacaactcatccataccaagaatggcaatgatatcctggagggacttgtagtcctggaggatcttctgggtcttggtggcgatgtcgtagtgctcctgtccgacaattcgggggtcgagcattcgggacttagaatcaaggggatcgacagcggggtagatacccaactcagcgatacctcgagacaacacagtggtggcgtccaagtgggcgaaggtggtggcgggggcaggatcggtcactgtttagttggaaagagtgaaagttagcgaggcggaaagatggcttgtagatcagaaaacaggacgaacaatcatcagcaggcacgtagacggcctggacggaagtgatggatcccttcttggtggtggtaattcgctcctgcatacctcccatatcggtggaaagagtgggctggtatccgacggcggagggaattcgaccaagcaaggcagacacctcagaaccggcctgggtgaatctgttatgggtagagaaaagagaggaagattgtcagtgacaagaaaagggaaacccctcgaaaaacgaggagaagaaaaaggataaagatgaacgtaccggaaaatgttgtcgatgaaaagcaagacatcctgtccttcctcgtctcggaagtactcggcgatggtcaaaccagtcaaagcgactcgggctcgagcacccgggggctcgttcatctgtccgaagacaagagcgaccttggagtcaccctcaaggctaaaaaagaaggaagaaaaaaggaagagacaacgaggtcaatcaacgaggtctgtggtaaaaggaataggtgaaactcttacttgatgacaccggtctcgatcatctcgtggtaaagatcgtttccctctcgggttcgctctccgacaccagtgaagacggagtaacctccgtgggccttggcgacgttgttgatgagctcctgaatcaagacggtcttaccgactccggctccaccgaaaagtccgatctttcctcctcgggcgtaaggagcgaggagatcgacgaccttgataccggtctcgagcacctcagcggtggtggactggtcaacgaaagaaggggcatcggcgtggatgggggatcgcttgacaccgacgatggctaagagtgatgtaaaggggatgcaggcattgtcagccaactggtgcaacgatctagcaaatcggtatgaccgacttacgtcctcgctcgtcgacgggctctccaatgacgttcatgattcgaccaagagcaccaggtccaacggggatggtgatgggggctccagtgtcgacgaccttggatcctcgaacctggttggtagaaaatcgatggggtgagtaccatcatctaaagaggataattatctaggggcggagaataacgtacgagaccctcagttccgtccatagcaatggttcggacagtgttctctccgaggtgctgggagacctcaaggacaagtcgtcctccgacgaagtcctggacctcaagggcgttgaggatgggaggaaggttctacatgtggaaagaaaaagaggtttgaatcagtgatctgaaggatggaatcgggtggatcgaaaggagtgaaaaatagatgtaaaaaaaagctcacatcagagtcgaactggacatcgacgacggctccgatgacggtcttgacggcaccgacctgggccttaccctcggtggcgtaggatcggactggaagagaggaacccaaaggtatcagcattgattgagaggaaccgagtgaaggctgaaagttgccagtagatgggttttaacggaacggaggggaaaggaaggagagggaaaaaaagtggagaggaaaaaaaaacacgacccatccatctgatcccatctccagtacagatggatgagatggaagatacgtctccgtgatctggtactgtctctaattgatccaacgcccttgccttcgtccttcaacttttttttcgccgcctacctgagcaatctcaccaccgacgaatccgatctctccgtggcccatcgctgtcttttttctcgcatcaacgaccaccactctcgattggtttgcaaaaaaaagacagtagcaggccgacggaggatatatgacaacaagtgcctaaaggcaacggaagagaaagaagaaaaggaagaaagaactacactaaccggcctgggtgacgggaccctgtcgtcgggcaatcatcggggtggtgaaagcggggacggtaggcctgacgaacctgggagcggcggcgagggtagaaaggagagccttctgagcctgcttggccttagcggcctgcttagaaaggcggatggcgcctcgagtggggtgcatggtgagtgtgtgtgagatgaacggggggaggttggtgagggtgaaggttcgacggaagggagatgaaaaagagtaggcaagagaaaaggcagaaaaaaaagggcgagagggcgttacattttttaattacgtaagctgttcctggtcctggtcctggccctgttcctggccctggtttttttctagttctgttcttagccttgttcctaaccctagccagccagccaggaagctaacctcggttcctaac

SEQ ID NO: 420 - DNA, 47133 bp, Xanthophyllomyces dendrorhous
ctctggcggtccacgcgcacatagctatctctgtcctgccatcggcatggcccatcgaatggatgtatgtccgctgggtgtacagctcattcattaagattaaacaagtaagagagaaagacagagacagacggagacaggcagagacagagatagagaaagataaaggatagaggaacagatagattatataatgagctacgggatagaggaaaaataaaatgaaatagaaaacaaaccctttccacaaagtctttcactgtatttggttacttctactttccctttcaaacatgatgcacccacccgttgagccccgtccttcgcatcgtcgcttcctcttcttcctctagagatcgttggcctcggaagaagagacaccattggtggcaagcaaccgggtggaccgtctgggcgaactcgtgctcgatctatcacgccgaccgtcctttcggaccgaggctgtcaacgaccgtcgaggactcccggatgatcttgacaccggagatgcgttcagcttggtcgggctctccttcttgacctcgtccgattcagcagcgcttcggccttgtcggaccagatcgatggatgacgctgaaggtgacacgggtgacaacagtgatgagtccggaacgtcggaggtgtcgtacgtagtagaatagtatcgtgctccctgtagtgtagccgttttttatataaaatccccgttcattgtctcagcataccatcacatatacaagtcacggacacgaatgaagaaggagagaatatagctgacctgcatgatcagtacgccggtcaaggcgacagcggtaatggcgtgactagcggcaagatctcggatggcgacgatgagctccggtcgagtctcgaggtatttggaagggagtggtgacggaatagatcgcgggatctgctggtagcctattcgaagagagggggagatgagaatgaaaaggtcagatcgacgtatgtattcgccagacattgacatgtatgcacaagaacaactaatcaagaccgatacatacttgggttgatggactcgatgtgagtgaagagcacatagacaaacaagactgaggagaacaagacagaacatcagcccatcattgtaagagaccgaccaaaaacaaagacagagaaagagatctcacaaagactagccccatcaaacaagaattcaccgcttcggcctctaccaccgacacccttccatccaagaaggactctaacagtgatcgcggtcactgcgatgaagcatgcagacgaccaggtatagaatacgatgggtggggcggagacgaagctagagtagtaggttaacgctgccagcaaagcttcgttcgtcactggggatctgattacaagcgagcggacgaatttatagataaagcggatgggtgagcactctttcttctttctttcttgcctttataaaacattggcggtacacatgaaagccagaacaatagacagaagaagaattagagacgaagcccggagctcacctccataacgtccccccatccgcaatccaatggacagatgtcgtgcctacatcgattatacaacaaggacatcagagaccatgtcatcgcttgagatcgtcttggttcatcgtagacgcatcgatatatatacttacctaaaaggaaggcggtggatgtaatgatacacgtcgtccaggataccatatttgagcaagcgttgaattctctacttttagatagtcgccgtcgatgatcatcacgtggagcatcgggttgaaagaggtaggcatgccattaatacgactgatccaatgctataaatccactgaaacaaccacatacacaatagattctcaacagaggatgttttcaccacgagatccttccaatgatggtcctaccgaatgtcttctcaaacgaaaaagatagcggagggaaaaggaaagcactcgattgggaatgagcacccaaagagatcttactgcgcatacgagggtaagatagctgttagggttaaatttacatgcgattcccagaggtttcttcttgcctcttcaattgcatcggccactttatccgagtcagcgcggatgaacgtaatttcttatgatccctttttttttttgaccatctttaacatacaatcactcactcactcattcgtttacacacacacacacacacacacacacatagcatgtcatcgtcgcaacagaaaattaaggtcggaatcttgggagccaccggaacggtcggacagaggttcatcaccctcctcgcctcacacccgttcttcgagatccacgccctaggagcctctccccggtcggccggtcaggcttaccctaaggctaccaagtggaagcagtcggttcctatccctgaggctgtcaagcagatgaccgtgaggaagtgtgacccggaggacggcttccaggagtgcaagatcatcttttctggtcttgatgctgacgccgccggagatatcggttcgttgcgcctttctctatctgtctctttttttcttttcttttttccttccttccctgttcttcctacgtcattctcacaagttccttggttttccaattcctcctcctacagaacaagccttccgaaaggccgagtttgctgtcttttcaaacgcaaagaactacagacaggatccgcttgtccccctcatcgttcccaccgtcaacccttcgcatatccaggtcatccctgcccagcaggcttccttgtcgccacctcttcagaagggtttcattgtcactaacgccaactgctccaccaccggtctcgtcgttcccttgaaggcgctcgaagatgcgttcggacctcttgacaaatgcatggtgaccaccatgcaggcaatctccggcggtggataccctggtgttccttccatggacatcctcgacaacgtcgtcccttacattggaggtgaggaggagaagatcgagtgggaagcttccaagatccttggaggagtccttcctgaaggcaaagggttcgatctccactcggagagcccccttaaggtcagcgcctcgtgcaaccgagtcgccgttctcgatggtcacacgttagtttctccttttattcctgaaatttctgtgcgttgcacagtgtttccttttagctgacaaccatgacctgatactccttttcttcacatctctccgcccggcgatccttcttcaacagcgagtgtgtgtctgtgtcgttcaagaatcgacctgcgcccagcccggaagccgtcgcggaggccatgaggtcgtacagctgtctcacccagtctctcggtccgtccaaggtcccgtcggctgctcctactcctttggtcgtgctcgaggagcaagatcgaccccagcctcgacttgacaggaaccttcacgacggagcgaccgtggtcgttggccgaatcagagagtgccctgtgctggacatcaagtttgtctgcctcagcgacaacgtccgaatcggagctgctacctcttccatcatcaacgccgagttggtcagtggctaaatcttctttaaaatcttcatttccattgatgtcttgatccaagtatactcactcgatccatctccttgcctctgttctctttaggccgtcgcccagggtgttgtctctttggagtaagaagagtacgagaaccgacaaggaaaagctcatgtaaaaagaccaaagttttccgaggagaacatccagacagaaatgaatatagaatgaaccatggttgtaaagagaacgaagagtcatgagaacatgctggacgattccgcagtcgaccagataagctaaatctttggaggcccgcataaaaagtgaattacattcgggacagtcaaatagcaacggcggcagcagcagcagcaacagcagcagcaacagcagcaacagcaacgacgacggtagccaccactgctcggacagatacaacacagttcgatccgtagaccatactctcctaagctccgaatacatccatctcaaacgaaggacgcttgggaaaacgttgccttcagaaatctcctccttgcccagatggcaacatctctgattccttcccggatcgcaaaggtccaagcagagaccccgttgttgttcgactcgttcttccttcttgtccttcggctcatcttcttctttgcctgtcgaaagtttcttaagagaacactgagtcctgcgctgagaagagtgagcaagccagagtacttgattcccacatcgagcgacactgtctgttcggccaacgatgatgaaggttcgtaaggctctcgaattgtctaggtctgtcacagcacagtacactctccggctctttgtttgactctccttggtgcatatgatctctccacacggcttcttctcttccccatagacttgaccacaccctttctcactcccgaaccgacaaggcatccgtcaaccaccagcttggctacgcttccctactcccccagggatggatacgctcgtcaagattccaacttagacctctcaacggaaacattcatgctctcggtaaagtctccctcgccgaccggcggagggcgcgggagattccccaggagcgttgctcatgttgaaaacgaggacgatgcttcaatgaaggaggtcaccggaaagaggtcggctcatcacggaggtctcgccaggtgagacttgtttcccgtcatgtggatcacgccttaaccttcccgtccatgctcgacacatgctgacgttgagccatgtcgattctgaacgagctagaacgatattctcatgctgcttctcagagagttgtatgcttctatgcttggtcttcatgcaatcagttggatttctccatccgaggtatgtttcgcgcacttgtatttactctaaaagtcaatagtccactctctgacgtgtatgaccctcttcggcaaaccatgtagatcacgcaagatcaactggaacatctccatcaactttcttctcgttctcttgcttctagccatcccgttctttcaatccatgcttctcactcgatatcgtcgatcaggttagtcccggatcatatgttttccgctcgcccatccatcccttttttctcctcaccctcacctttcggttcccgtatactatctgcacgaaaaacaccagcaaacacatcgagtagaccgacaaagagaggcctgagtagacggtatatccttgcaatggttcccttctcgggctgtctattcctttttgcctgtattcctgttccggctggaatgaaagaacaaggaacaggtgagttctctctgttttgcttgccttcgaatccggcagaacaagcccttcttctagctctcaatactcaagcgcgctcgtcattctgtgcttggtgtgacaggcctgttcaactttgcgatcatgagagcatctgtccttggtgttctcatcctgggtggactttctgggttcggatcgatcacaacggctttgagctttttggaaaacatgagtcgtggccactggttcgtcctctcctctccacgtcatttttttttgtttccgggagggtatcatctttcgacatccttatctctctctattggacttgaaacaacaacaaacaaaacgaacaggcaagcgatcagctccgaagatctgttgaacgctgagcgatctctctatcatgttagaagagatctctcaatcaaaaaagaagagcttcgaaggaccggggccaaccaggttcgtctgttattgatcgtcttgcatgctactcaggccccgaacagagcattctaataattcatcgaggcattgtgtatgggcataggtggatcctgggtggttgagacgcacattaaaaacgattgctggaggttcggatggtgcgttggctgagttcatcacccttacgagaaatcgatcactaggatggagagaacaacgccgctgatgtccttctctcttgtagaaagatcgtctttgaacaaggagattgccgggctagagatgatggagatacagatctcaaaaaatttgggcgcgatgaaaatccgaaaggtagtattcctctttccttgatcagacggcgtatctccaccggatacaggttaacagtttgcgcttctttttcttattatttgtgtggatctcaatccagtcaacgatggagttttcatctactctatatggaagagtctggaacagtataggttgtgagtctagcgtgcttcgtttcgcgagtagaaattgcgtcagtagaccataggctaaccgacaacgacaaaaccggtcatactttgtgtacggtacagatttatttgctgcttgtgagctggcatgcccctcttcttcttcttcttcttcttcttatatttcagttggagcgagatatgggctgttttgaccaacagaacgttatcttcgatatcgggattagactgcgtctgtcgaatcatcatggcgatcgtgaatctgtttatcctccctcaaatctttctttccgatccctcgttgtcgttgtcaagtccccttgccaactcgaccagatccgcatccatcctgccgtcaacgatgggcaccatgccccataattcgtcttcaactttgctttcttcctcatcctcctcagcttcatccaaccttcatcagaaccacacatccgattggatctcttacttgatcgccctcgcattgagtcatctcccgttcgaggtggacgtgccgctctggtcgagacagatctcgttgggtctcgtgggagtgatcatcttgtcaagcattcagtatgtgatgaggtcgatatcgagagcgttaaagttgggcagcgcgagtgtaggcggagtcgttttattattggggttggctcaactcatggtccgtttgtttattctgatcatttattattataaataatgatacgtcgtgcgatcgcttactgttgtgtcctatccgtttccgtcctgaggggacaacagacgctctacttgttgtcgctactgatccaactccgaacatcattacctccaccggacgaggacgatccagacccagagaacagtctgctcgtttcatccttgccacctttcgtggcgttcaacagtctgtttgatctgacgtatctgatatcggctctgttgacgttggtcatcagctgggtggatagtaaagtgaacagagcggacggtggggtagatgtctggaggatgggggaagtttagatttggggttctttgtctttgtttcattataaatctcatcttaatcatccgtccatctgtttggggaggctgaatctataacaatgatcagcttcctctatctctctcttcttccttattcacatgtattgcctcagaggggtcacacagaatcttgaacaaaacagaaaagatatatatatgtatgtgtgtatgtgcatatgcgtcagatactccctaagtccctgtgagactgacgatctcgtcatcgttatagactgagtacaatgcaagagtcatagatcagtcgtcagcgttcacacgattggatggcaagaagaaaagggagaagaagaaagggttcgttgcttcccggctggctccctgcgaactcctgacacgatggacgaagagagataacatctggaaataaaaacgaacctgcagccagaccggaccggtcttccttgatgagataattgattccgtctgtttctactatcccacgccatccgggtggactcgaggagaacggccctccttcgacatactgttcaaaagtgcccatagatgcatccgagaaagatctttataaggtttgactctgtgccggaaggagaaggagaacaaagggaaggaagagaagaaagagaagaaagagaagaaagagaggagagaggcatctgttacctgggcaggaatgacctgaaccttttcaacgacgccagtggagacttcagaattatctggaccggtcaattggtccgagttagacgagtctcgacgtttttctcgggtgcaaggagtggacacctgttgaggtttggtcgacggaatagttcgtggtgatgttgatgacgagcagggttgatgatgtgactcttccggctgtgaagggtgagggtagaagaggactcggtcgcctacattgtatttcgaaaacacaggagggcttgtagaaattttgtacattgacctgagtctgaaagataaagagataagaagatgaagagatggatgatggatcaggaaggagatggtaggttctaaaacgttagcagagagatagatgcagagcgaaacaaaagagacgaccacccagagggagtgagatggagaacgacgttgaccgagtgaggtgggtggggtgggttaggtgagtgggtgagtgggtgagtgggcgagtgggcgagtgagcaaacaacagatccaaggaagtgagcgggtaagtgcatctcagagaaagaacggaaggagaaagtcttctgatcaaaagagttaagtctggcgttagggtgtgtgagtaagtgggcggagaagatgtttcattcatgtatggtgcatcgttagcggcgacgacgaggttaacaacagcatcagcatcagcaccatcagcaacggcaccgtcaccgtcaccatcaccggcaacattgggtttagcaggtttagtgagtgttagcattcaacacggtcgagtccgccgggtggggcagttaaatgagtcttacgtaattgtatcacgtgtcatcggatgacgcgacagaacgcgacctgacgcgttcaggcacagttcatttacgcgtcacaccgttccatcacgcgacgcgtcgtcacacgcgtttcgccacgcacatcggtgaacatacgtctcctctttttttctctctctctttctatcttccacctcgttcagctcactcgtcttccgtcatacattcctagttgtcatacccacttgatctcagccatgtcatcatcagtccttgctaaagatgcagcatggaatttcatctttgcaaaccctcctcccgatccagctaccttccatcctgttctccaggtcatcaacatcaaacgggtcgcccctatgggtgagcagtcagaccgttatcggctgatcctctcggacgcaaactactacatccagggaatgcttgccactcagttcaaccagatgatcgacgatggctcccttcagagatattcgatcatcaagctcaccaactttgccatcaacatggtccattctcgaaggttcgtcccaaacatcccatcgtacttttccttccacctgagatgtacgataacacttgctgaaccataagaaacctttcgctgtaatcaaacacagacttgtcatcgttctcggaatggaggtcgttcagtctgtggctgagaagcttggagagacggagaacattgaaaaggtcgagaacccgatcggacctgccaacgcaggcgccggcgccgccacgcctgctcctgccgctcctgctcctgccgcccccgctcgagctgcccctgtcactcgaggagggtttactaatgctggcgccgctcgagcaccagccgctcgaccacctcagagcaaagggtccgaccatggacctctctatcctatcgaggctctcagtccttatcagaacaagtacgtccttcgtgttctgaactctgcaagggagtgcgagagaaagattgagacagactattgacctcgtgtttttttttccgggtagatggacgatcaaggctcgagttctccaaaagtcagatgtcaaggtttggtcaaatgctcgtggggagggcaagctgttctcagtcacttttatggatgactctgtaagtcttcaagtttattcacctctcgatataatctcagcttttggcttacagtcatcaactgctatttgatatttccatcaatagggagaaatccgagccactggtttcaacgaggcagtggattcattctacgatctcctccaggagggcaaggtttgtgtctttattcttcccatcacagctgccgacgtccacctagcctggcatacttgctaacacgagcctatactcaggtttattttgtctccaaggccagaatcaacattgccaagaagcagttctccaacgtgaacaatgattatgagatcatgttcgatggaaagactgagatcgagcctgtacgtacaacttccttctcgtctccaagaatcagctggtaattcgttatccggtctaattacgtccctcattttcatcatctatgacaggctggagacgatggcgctgttccccaaatcaagtacagcttcgtcgatctttctgcgctcgaacagatggaaaaggatcagacctgtggtaagcgttctttataggccgaacatgtcatggaaaggattacagatcgcttggcattgaccaacctcttgcttctctttggccggctcttacagatattctggccgttgtcaaggatgttggggaccttacgcaaatcgtcggaaaagcttctcagaagcaggttcgttgacctccacccattcaaatctgtttccttctcccttcggagagcccgtcattccccttaggctggctaacaacctatctccacgtttggtatgatagattgccaaacgagagctcactgtcgttgatcaatccgagtacagctgccgactcactctctggggaaagacggcagagagcttttcggctggcgaccaacctatcatagccttcaagggccttaaagtcggcgacttcggaggtttgtgtctctatcttctgaacattggtgttactttgcagatcacctgctgtgtgatgtttgtgcgcgattctaacttgatcgactgacttgattatataggaagaaccttgtcgatgtttagttcgagtacgatgacggtcaccccagacattcccgaggcccacagtctacgaggatggtgcgcatatttccttctaccctgtcccaagaatgttggtcttcttttcttaccgtcttaccctcctgctgcatttccattttcccctcaggttcgattcccaagacagttcgcgatcgtacaagtcctactctggttccctagtaagcggcgctggcgctggcaccggcagcgtctcttccggtcttcgagatacctacaaaacgatcggcgagatccgtgacgagaacgttgggatgaatgataagccagattatgtgaccattcgagcgacgattatctatgtcaagaaggagaatatctcgtaccctggttgtcccggagagggatgtcagaagaaggttacggatgagggcgatcagtggaggtgtgaaaagtgtcagagaagttaccctgccccagagtatcggttcgttttaggcttctcttgctcccttttactgtaaaaaagcggttcattaagacagtctcgttctctacctttttccctgtctccccttgatgatccgaacagatacatcatgacaatgtctatcgtggaccataccgggcagatgtggctcaccggatttaatgaaatcggagagcttctccttggaatgaacgccactgctctccaagctatcaaggtacatcttcatcttcatcttcttcaactctggaaaccacgtctgacagctcctatctaccttgtcttgacgtccgtcgtgtttgccctgtaggaggaagatgacacacagtatgaagctatcgttaatgccgctgccaacaagacgttcaactttgcctgtgttggcaagatggacacattcggtgtacgtcccctctttgcttcttctggcctaacaattctgacttttttgtgttatacacatattgaatcatacacttttcttgtttgcgctgtcgaatgaataggagcaaacccgagctcgattctcgatcagacaagctgccacgctcgactacaagcgggaagcgaagtcactcatcgaaaagattaaagagtacggcgtggtctgttaaaaaggaaggtataagtcttgaaggaagtctctttttcttctttttctttttcttcagaaatctaaaagtttcatcgatagaccagttttgttccattcggccgttctttccttgagatctaaatgttgtatcataaataatcgtcctctcttctttgtttcctcttctattctattaccttcgataccgcttctccttctctccttcttttctcccgcttccctgctggcctgttcttagttttcaatcaaccatatacacatgcttttcgatattcccaaactatccacgtatgcttcatgagtttttccaaaagaagaaaagggaacagatagaaattgagatgtcattcatccacttaagtacgttcgctctccctcgtttcctctcttgcaccattcctccccggctcgtcgaatctcaggggggcatttcccctttttgatttattcctcatctttcttctcttcctcagcagcgacctgctccaactcttcatccaaatcagccactgcctctggctcgctctccttcgactcgtcgactgggttcaactcggaaggaagcgtctcgctctgagacttgctgatgtccttgacggcaggagtgtggaaaggctctttgagaccgctcactggcttctcaacatcatcgacgtctgctgcggatcgaccttcgagccttcgaatctctttttcggcctaacacgaaaagagggaggagcaagggacggatcaattcatgcaaacgagagagaagagaaggaagaaaaaaaaaggagaagaaaaaaggaagcctaaaggagaaagaaagcaatcgaacaaaaaaaaaactaaccttggcaacgttctccttagtaactcgatcgttgttgacttcgaaccaggtcttttttgtcttcaagtcctcgattgccctgggcacatccgaagtggaagtcggcgcgggaattgaaagctcaaggatggcagcaaggatgtgaaggggcaagttgagcttggcgtccaccttggtcgcagccgaagcatcagccggagcagcagcagcagcggcagtggcggttcccttcttctgttgaccaccgttcttcttcttctttcctccgccgacaaagaatgtctcatcatcacctttcttcttctgaaccaccaagttctcatccacagctactttcctaccctcgagcgctgccacaccttcgatcgtcttcttctcttgaagagctcggctggtcttggcagatgtgtttcccaaaagatagtcaatgatagtctggcagtcttcgatctgagcctggaacgcagaaatcttggcttcatcccgaagtcgagtggctgtctcgagtcgtcgggcatcctcagttgccttgcgctctgccttggctcgctcggcctttcgagctcgctccctttttcaacaagcgcagacatcatcagttcaacgatcaacgtttccctttgcagaaatcatggaaggacactcactcctgaaccttggtccagtaaacatcctgggcgtccttgtaagctgcggccttctcttttctccttccgtgaacctcatccaacttggccgagatttccctcctctcattgtagagcttgttccggctctcgtacaaggcatctccctccttctgcaattcgttgagctctgccttgaggctgtcgaacttttccgaggcggccttgagctcaggatcatcgagcttagccgaaagtccgtctgccgttgccttgagatcgtcgatcgactgctggacatcaccaaacgactcgacggaccgtcgggatcgcttaagctgggaaatctcggctagcttgcgcttctcgttggcgattgttagagctccagactctacttccctctcaagagacctggtaaacgaaaagaaagagaaaaaagcataaaaaaaatacaatttcgaaagaacagcataggatgagctacgctcagtctgaagataaaaatgcactggagagaacgacgaacttgatctgagagtcaacctcatcgacagttcggtacgggagctttgccttggcggcctgcatgtccttgatctacaggttcgaagttgaacaaaacctccagtcagtcagtctcttcgatcgcccatctccgttctacttttgaggtttaaatacccaattgtgacggtcagattgaaagaagaacaagggaagaaaacagatcgcaccttcttgttcatctcatcccgaactttcttgagctcatcaagaatctttcctcgcttgcccttggcctcagcctggacacccttcagactgtcgagctcggccttgagctggtttcgcctggaaggctcagatgaggcgttgggagagttggttgccaagctgatcttgttcttgacctcgttctggaatgaaaagttgaagagttcgaaagacccagagagacaacgcatgaagaggtaaacgaggaagcagtcagcgaatggttctattcaagtagctttttttttctcacccctccgattggagattcaaagacattcttccttagagtcttccttctgacctaacagctacccacgcggctatatctacacttgagaagaaacggctcttctctcggtacaactgaacaagaagcctggaaagaagaaatgaacaagcacacgcacgagttgggtttggagagcatcaatctcggaccgaatagcgtcctgctcagcctggtaggcggcttgatcgggctttacagccatctcctctttcggtcgtcgctctttaggagtggacgtgccggaagcattggtggtggtagtcttttttgacggaggaggagccatgtgggagagactagaaaagaaagaggatataggacgagtgattgttgtagaatcagaggaaagagaaagaagtccaaagatgggacagcgcacggatctcgttgcatctggcgtggttacggccacgtgcatacatacctaggtgattgtcaaaagtgtgggctgtgcagatgcgagggggattactagacacgtaaccgatacaggaacgagcgcagaagcgctagttcaggctcatagactgggactggtgtaggattcaggcgcgaagtagcaaggtatataggtcgaaagtaaaagggctgtgagcaagaacaataggtaggattaacaaaggatgaacaggaaaagatagggataataaaggatttggcgaaaggtccaggcttgtgagaccatgctatctatggcagagggagcctatcttgtatatgattctcagactccgatgatagtgcatagataagtagaccttagggtgcgatagaaacgcctgcgctagaaggctacatacctgcagatgaatgtcttgagtgagcaagagaaacagaaaagaagttgaggtaggagaacgaatcgtaggttacagcaatgtaacactcatattacgcccctgatgccacagcaccgcaatcacgtgtcgtgccatccatcgtcattcctccttcatagccggcctttcttaactttccccttctcctcttattactccatccagcattctaccttcccttaaacctcgatcggcacctaggagttcatccaagatgccttcctatttgatctctcgtttcgcagaccccatgcttggattcgctacaggtatcgttctctacccctttcttctcttctttttctctgccgcctccgctgcctcccttcttctcgtcttgttagatatccgttcttcatccgctcaacccccgacatcttatcccacacaggtttgcttgcgttcacactcaacgagacatctcctcgaacaagtccggcacctggatactcaatgcgcgagttgatcagctggaaaatggacaaagttcgaccggctcgaccgccgaaacttcgcagaaacagtgggacggacgaggtcgatgtggacgcactggcgaagatgcttcaagaggccgagaagatagagaggaaatagctgaagaaaacaaaaacaaaaaggaaatgctttggccatctagctttgatttgtccttcttctttccgtctacttatgcttttccctaccagccgcgtgttgtacttgtatctcctgcctaccactgtgtttataatggatttgctgttgatcatttccgtgtaccgaaggtgatgacacggatgatgttctgcgtacagaaaagacgggttcatatatctacgggtccacacatatggagcgtcaaaaagaatacaacggcaaaatacatcatagagcgaccggcctatatttatagaggtatctgagctccatgtagggatatcaattcaaaaagtgatcatcaagttcactaaacttatgacaagggaaatatacagcaatttacagaagaagggcagactgtgggctccgacatatgttcaaaaagataggctcaagagacataaaagcttagacatcagatacaacaaggtagaaagatgggtaaaatgtactcacgaagaatctcacaggccttcacttatctacgtatcattaatcaaactcactatcggagccatcatcaccatcattatcgttactgctgtcggtgtctccttctctctcaacagaaaagatcgaaaacgtgtaaggtgcacccaaccgcgacagctctgtatcgtctgaggaaggaaccgatagggagccagccgatagagtaggaagctgatccaggcgagtcgatagggtatttctagacggctcgaagatctgtcgaggtgcaggcgaaaacgtgatatcgtactctacgcgcgcgtccatatttccactctcttcgtgttcgttctgctcctcgtcgtcgtcactatcggtatccattggttcggctgcagttccaatatccccgtgtccaactctacccagttctggatcctcttgtggccttatagcctcgataatctctctagccaacatcgcatatctgttcagcacagggtccaacactctctccaccacaacatccggatcttccggatcaaatgggtcgtcctccgaatcatagtcagagtcaacaaatggaataggtggaggccgtccatttgttgacgacgagtcttcaaccaaattgaccgaacgaatatacgagcgcgaatgagaacgtagatgattgagggagtgagagtagtaagccgacagaatggaatgttcctcagaggagggtgaacatggtttgaattcgaggtaagggttctcaggtgaaggggcagaggtgcatgcacacatggcagaagagtccaatgggtccatttggaatgcaatcgaatagaggtatgatcgagtcggtcggcccatcttcaatagggaaagaacaaaagttctctatcacgtatatgcgtgtgtatgcgtctcgggaatgtgtaggaggagcggttgaaatgatctatcttgttccgtttagaaacgtaacaatgggatattcaaggaaaagttctgacacgtgtgcttgaaccatagaatgtgttgaaactagagttcttaccagcaatgagataccgatggtgatggtgatgttgagggatagatcagagttggcgagaggtgaaacagacattttacatctccacaacctcttcaccttcacctctccttcccaatggtaaagctcattttagccatctgtctttcttacgagcaaatactaagccgctataaacaagcacatcgatgatgataggtttgactgaacttgtcggtacacccactcaaaccatgctagtttcgttttccagcgccatcggatagccgagctcctgaggctgtcccttcttcagacaggatacgtccgggcgattctcaagtcttttcaaagtttttgacagccgaggaagaatctcgcttggttgttgcattgttgggagcacaattattctctcgaggacagataccgatgttggttctattctgtactcgtgcagcctttgtccatctcttgaagtgctgaatgtattcgctaagaccacgctgaaaggaccctcttaggacattacaacagttaatgaaacaaccaacagactcttctacggccacggcagttggtgcttcagcttcttccaagcgcaaaccggatcctgcatcatccttcccggcactcatcgttgccttgcaacattccttgaaagatgcattgtcgaatctggcctcggccagttcgcaggacggacgtgtggtccctattcgtccactcgtcctcttctcgtcagggccaagcttgctcatgcctaaatgcgtactgggacttcgtctaccatccctagagaacgatttgaacactgaagaaggtcaaaggacaagggatccgggtctgctagaacgagcgacattaagagaattcttcaagaaagaacttggaaattcaataggtgcgcttcgtttccttcgaatcttatcaatacgtgcgctcaatttatattgtgtttcgggaatatatttgccgtgatcttcatatgactacatgaacaaataaacaaaagctcggactcagacgactgtccttctgcttgctcctcggtcgttctctcaacccggttggctcccacgaactaatatatcccataggctctcttctctcgtcgcggatgaagaacctgtttcatcttccattccaacccgatgcaaacccttaccgaaactgatcgtagagcgattcgcagtcactctgactcagcagggagttgctaccggaaacaggctcgaagtgtcagaacaagatgatattcagaccggcattgagggtgacagtagagactgggtttggttcatgtgggaaggaggcgtggtcgagggatggaaagggtgaccgggcccgatctaagagcaagatttcatgggatttctgttcaaaccgttacgatatcaataaacattcaatgagcacactgaaaccgtgatccattccggacgtttctaagctcccgatgtagaatgtttggtttgatccacgtggattgtttgagaaattgcttttcccggggatttttctttttgaaaaagtcacgtcgagttccggcctaaacccgggtgatgctccggatgagtttccccaatgctctgagtgatttcttcttcttgccatcgtcccaaacgccaatccgaggactggaaacatccatggcccagtcaacatactcgagctcgcttcctttgctaccgtacccggcgtcctctcccaggccaacatcgcctgatggtggctttcgggcatatgccgatgaccaggatgacgccgggccgtcagccacttctagatatcgacctcctctgcactacgcctcgcgttcatcttctcctctagcaaacttctgttatgagagtcttgatctcgtcaggtcttcagcctggtttgggctggcagcggtcggtgtggtattccttcttggagcaggcataggatcttcctttggctcttcatcaagcacagcctcaacaccctctgtatcctcgccgactatgtcgaccccggccaaaagagactacaatccctggattctgcctgggttaatcagaaatagacctatcatctctccagccgaccagcttcggatgggattcgatatctttcctttcggaacatatgactcggttcgttgggagcctatcccgggtaagaacggctcagaaggagagaggacagagagtcttttggaggatttgagaaaggcgcttgatataaatcaggctccagaaggatgggattgggcgcagaataagacgttggtggtctctctttctctcctcctgtgacatgatccatcagctttcgctcacacaatacgacggacacagcattttgggtatcggagactcgttaatgaggaacaatgtcgacacctttacaaaacacgtccgttctctaatgtcttttcttgattcattcaggacgtgcagttgctgacatccctctctcgtgctgatctagattggaaacatgacgataggtaggcaaccacaccaattcacagatcctcaaggatcgaaatggtccggctcccaacaaatgtatctcatacatgttccgcatgtgaatcttacggtgtacgtccttccctatccttcttgatatctgaactcttcttggccagcagttaacacggtagcttgtactgctatgtgtcgcttcttttgtggctcagagcgaactggtttcataatggaatgattgaacatgaagttgtatgttcctttttcttttttaaattcccatatacgttcgtggacccttgaacgttctggactagctaacgcggccttttttccgttgatttggcttgcgccatcttcttttcttctgatcaaataggatggattctttacgaatgagagcacgccccaagttttcgaacaaaagttcaacaatgtcttcctcccaacgctctacgaggaaggagggctgaatggtcgtgttcccgacatgattattttcgagaggtgcgtgtcgaacacgaggaacataagcatgtggctagagttcactagtagtctctgatcagggtcgacaagctgacaccctctgctgtcaatctttgacttcagcctctcatgggatctcgttttgttggctcggctggctaacgacgcaggcgatacacgatatgctgggagaccatttgtacgcccctatttcttggtcttcgaatcacatctttgttttgttgtcgatgccaacatagctttgttctcttctctccaatcttcgactttttatcctaggacgacatcgaactcgattggtacagaggccgaatgattgaagtccttgcgttgctcagaaagacattccccaggacgaagattgttatgcaaactcctcatattgggatcaggtacgcacctcctcatctctgtcctccatggataattcttctgataaaactctacctgtgtcttgcctcctttccagacaacctcagagcgccttcgctccgataagaaagttccaacaagttcgtttcgtcttgactatttgcacatccaaaacttcacactcattgaaatcaatgtgtttgtcttttatcactccatgtacctgctgccactttcaaaagggtcaaatggtctcctcgattgctctcgaaaccgggtatgatctgtttgactggggacgaatcgtgtctacgctcgacaacgagcttaccgatggtgtatgtctatttctgtgttcttttcatcagcgtacctcttcgtgttttgttagttcttcgatttggatagctaaagctttgtcatatgcgacctatagctacatttctcagctggtgtcaactcatggctctgggtgagtcgtccttcctgttctctacggtttcaatgatttttcttggctcatatagctaatgctcgtttgttgaattcctaatgattcgtccatgtcatcaaccgacgcatgcagggagaaatggttcgtcgaactctgctctcttttctctcttctctgagcagacataatcttaccagtgttctccaccttttatcagctgctgtattacctccgaagagcgtcaactcacccacacaataccccgccgatcgactttcaccccccgaggtttactcaggacgagctcatcgagtcgtataaggagccgaagatccaataccctgccgatggaaagatggaccatcggaaacgggctgagttggttgatgctcggaagcgtcaactgaatctggacgccgaactgctaagcaggtgatcaatagctgttcatcggtagtcttcctgaaaccgacatatgtgcccatgtgaatcatgaaactcgttctcttgcttgtgtgcttgattttctctctattttctctctgtgtatgaactgttcatagccatcgttttacatatcatgtttgggatcgtttctttaggctcttttcatctcgttccagtactgcttaatttccttggactcttctcagcttctcttgattcttgattctttcctcttatctcgcaatttctgctctgcacttaaatctatcttgacttctttctataacttgatccctctgtagagattcatgaatgcgtagaatattgtgaataagacgtcagcagagagactgatcgttcttgagtgcccgctgtggcaaacacaggcagatctgggcggaatggaaaaacgcccaaagacgttttcgtcgtctgatctacatttccaccctaacaacatcaacatcaacatcaccatctctgatcatcatctatctctcattcttcctcgctgagcaaacaaataaaagtcctttcaggaagatacctctgaaaagacatgtcggcaactacttcggtgcctttgagctcatctcctccttcgccacacgcacctccggcacaccctccatccaagcgagagatcgaacggagactgagtttgagtgttccagcacctccaaagatgagcagggtgagtgattggctttttgttctgtttacatgatctcatatcgttctgtccagtttgatgtttgaggaccaatcgttctgatctttctctctctctacctttggtattcattatgttcacctcgctggattgacaccttctctactttctcgcgtgcctggattcaccatagaaaaagtcggttgcctcatcctctggagtaccaggtagcccaacagtcgagtcattacctcctctgttgtctcctggactttcatcctcctttcaaacgtccttcatgtcttctccaccttcgggcacgccaatcccgatacaatctcccccggctggccttcaccctgctccaccatcgcataacctgctgtccatcatcgagggccccccgcgcggcgctggtgtgactggtagaacgttctcggattcggagaacgaggccggagatgaggaagaggacgaagaagatgatgaagaggaagggatggaagaggatgaggaaatgagaaagaaggttgaaggagaacgcatcctcaagtcaggatacctggaaaagaaaggagaaaaacgaaaggtgaatacatttcggcagatattgctagacttctcgttcgatgtctgacagagactgttcttttcatgctcgtggggcgaccttatagagctggaagaaacgttggttcgtcttaagaacaggcaggctttcgtactataaggataatcgggtaaggatttgcgtttcaattttggtcactttaaaggcttcgccttgactcactcgggatcactttcatatgtcatctaggagtataaacttctcaaattgattgatcttcgcgagatccactcgacatctcttgtccaactcaagaaacatattgctgccctgggaatcgtgacccagtcccggacattctacgtcaaagcttcatcctcaattgatgctgagaactgggtagaagccatcaatgccgcctgcagggatttaaaacagatggatgagatggagcacgagatgaagactggaatgaatatggcggactcatcaacaggcaatcagaggaaacagtctagaagcggaagtagtggcgtcatggccccgcctattcctattgcgacttcgtcacatcaacggtcaccttcgctgtccggatcatctctcccgacggttggcatccttaaaggtccttctcctgtcttaactgcgagctttcttggccctgtcgtcggtcagcccactcagcccaatggacctccgacgcctcttcggttgaacaccaaccagccatcttggggtgatgtccaaacgccccatgcggggtctctagtgacatcaccgatggagagacaggccgctcaatcccctacaagaatgggcgcgacgtcgtcttctgaagatgaagactttgaggaaccgatgacacctgctcaaggttcgcctgtgatggctccccctactgtcagttcatccagctcagcagtgaatccgaataaggtcattttgaaggcgtatcttatgaagatgggtaagcgaaagaactggagaaagagatggttcgtattgactagtgggagtctgatgtattcgtcaagccacatggtgagcctttctatttaatagaatgaacgaatgtattatcttcccgatctgttcttctgatctgatgtcaattatatgctatctaggacacaaaaccacatcgaatcattccattaatcaaggtcctcgatgcgttggagtacgaaccggttggatcgaaagatagcggggctcgaacggacaagctgtatccaacctcgtcctctaattacgatcttgccggagtagctgaatctctttcgtcctcacctctcaaagcgggtctccatactgctgcttcagctgttggcgttggtagcggcgatcgagcggctcgaaatatcaaccatgcattcaagatcataactccaaagaaagtctttatcgtctgcgcaccatccgaggaggaagagatccagtggcttagcgcattacaagctctcatcgctagacgagtcgccggtaaccaggcggctgccgtgttgggcggaaaactcaactcgcctatccctcctgttcaatccagaagcttgtctccaacgtcgatctcaacagccctaccgtccgctggggcgagttctatcgcacaggcacacatacctacaattctggagcagccgccctcaccaccatcgtcgacgatgatttattctcttccatcaccggcgttaacaacgtcgaccgttggacaaaacgcagggtcgatatcaacatacccgacgagaacaccttcgccctctgccagtcgaagtgccccttccgatttagctcagcaccatctgccgtcgattgcctcgcaaatgtcaggctctgtggttaaacctggatccagggccagagggtcagacgatttggatgaacgtgggcggtcggttgggatgacgagagagcacaacgacgaagcccgcctttgtaagttcttttcttgttgcctcttccttacagcgagctaggtcttgacggctaagatgtgcttcattgtacttgtgttatttctgaagcatcttgagctttgatgaaacaaaataaaataacaaatacccccctcgtcagcttgatatcgatctgatgtgtattctggaagcttcaagtctaataacgcctcggcctcctctaccatgtatattctttagctctttctcatgacttcatgttttcatccctctacttcttttcttcaacgctgcttcatcatccgctactcttgctgtgacggtattgcccgtgtgccgattctccttcctcctctattctgctgtccggtccgcgctttttctccttgttcgtctttgatttatatacctttctgtctatctgtttgcatttctttgccccttccttttttcttcccgccttttcgttgtgcttgcaatcaatctcttttgatatagaagagaaatctctgttgtcttaaactccctcgtcttactgatcgtcgagcaaatcctcccgtgcgccaagacctaaaacaagccaaaggaggctttggtcgttctcacccttttagggactggctactatcgagctgatgatgctaggcgtcgatttcatcccgaacatcttgagataagccgtcatggttgatggactagacgatcagatttgagatactagcggcgcgatgcttggtcttcttgcgtgtgaaagccggtctttcctccctccttttctctctattctttttctcgtcttggatggcttagcagaaggatgatgtcttcttgctcatgtcagtgtcaacgctagttccgccagatagagccggccggtcgggttgaacgccaagaaggatctcatccagtatcgaacctatctttcgattgctcgacattgtttttcggggtcgtttctgggcgagagtagaatcgaggttgttgggtttcatgcccatggtagacaggtggcttcgtttcttacttgttgagcaagacagcttggcaggatcaccattggccttagatggaccaggggaagaggttggactgatcgtcctgaccaacacacagtcgtcctcttttcgttcgttgagtgccgggcgccgtcgagaccggttaactcgatgagagtcagctgttgagttgaccgactggatgtgtaaggagacataagacgattcgtggggagacgggccgagccgagtaggtgttgagtgaagtatcgtttggagaagtgaggggtgggctgaagaagatccaagcgcgggtgacattttccagcgatcgggagaaggtgaggaggagtaaagagagaggtgtcggttcaggatgcgaagataagttgggaagacacaggctgtctgacggagatctgagaaggcagagcagagtcaactttcctcttgccggacaagaaaaaaccaaggagaagagagagagaggaggaggagaaacaactaaccgagataattgagacggtcccattcgacaagccgtttagtcgagcgatccgttacacccttacagccgttcaagctccaggcagcaagtctatacagacctctccgttcctcagttcccggcggctgatactgataatgtgttgatacacaatagtatccatcgttcaaggtaaggtgagttgagaagaaaggactaggaaccaacaggagtcgacgtacaagcgcggatgcgagctggtgaattcccaagtctgttatgtttgtcctaagtaaatgtgagagatacagtagtaaagttcgatagtattaagctcggccagaacaaaggatagaatcagaggaaaaacaaacctctcaatttctaggacagtcaagaacttcaactccttcagggctagcgcgtgagaatctccaaacattgtgtcggataaacatagactagagatcaattcggttgactgggcgttgagtttaagcagagggcaggaggaggggttcgcaagcaggctgttgatgagctctttatacaagatctgggcaactcgatggcgagcggtacttgaccggtaaggatctgaccccggactataagggcgagcgaaaggtgatggctggcaaggtggtttgcctgaggagcaagagtcagcccaaagaggagagttaaggatcccttgaagatgaatacgtcgatactcaacaggtttctagcttgctcatatcagcttccaatagcttcatagaaagagcgccaaactgagaagcgaaacgtgcccaattaccgagcgcgacatggccatctgtcgatgccctcagccggcggatgatgagtgctgccatgccgaaggaaaggtagtcgggcgttaggacctgtggatcgtagcgttccagattctgagcgatcacctgagcggatagatcggttagcgaccgaataggtatagcgacatcttgttcaactatatctaaagctggatcctgacaagaagataccgaaagggaacgtatggtctccatcatggtccgtggttggcggatggttgtcgaaaggtgttgaggattgttttgtcaacatccggcggagaccgacgaagtttccatctgcctctagccttgacaccaatcgtccaaacatgtagagccgaaactgttggcgctctcgatgtcgttgtatttccctgagagagtatagatcgacttgtatatgactccagacccatgcgatcaggcagggaggacactgaccaaagctggagcaagagcacaagcggaagaactatgggcgaaaatataatagagaattccctaatggctttttgacaagatattagagaaaaaatgagaatacgtgccagagcttgtttcctcccgctttcctccgctcatcaccacgaccgacgtcccgagcagacacagactcactctttcggacacacacacacactctttctctctctaccggcatcccttctgtggttaaaggcagtcatgatcttccagatctcacgccggacaatcctcctcacggtcgtcccgttgttcgggatcacctcgttgattctcctctatcaaacaagctcaacaccaaactcggaggcctggtggtcaaatctttcgctccctagttcttgtccgactcccgtcgctacagcccctagcactggtctctctttggccgatcagaagaagatgactgctggtcagacgtgtctccactcggtcgccaccggtgcccttgttgatatcggaagtgaagacgccaaggtttgggagtcgtacaaaatcggtaacagcactggtgctaccaccttcagagacgactgggttagagcaggcagaggtggagaatggcatggaaaggagaccaggttcctcagaggaattcccggctactgtatgcaaccgttcttctctcatggatggcatcacatgctgaccgtcgtttttcttattccgatcacagctatgtttcaaaatctctatgttcagaacggaacgatgagtatgtgtttgttcatctcttgaacttactctttctcaaggcgcctaactttctggtctctatcccatttttatctattcactctcagttgccgtttcgtctgatccgacaacattgccggaagtatctagggttctctcagatatgtccagaggaacgcccgagaacaagttccctgtggcggatgagactagatggctcgtcatctctcccgaagaagccgctgccagatttgatggtggtcattctgccagattaatcggtagcacgatcttcctcaatgatggtccaggagcagaaggctaccttggttcgcatatttctcgcctttctctctcgtttcttttgcttgcggcttgtcagatcgtttgtttacgcgtcaactctcatccttccgtttcactcagcgcactacttgtcagtagacgttgttccttagatctgtccataaaattacgaattgactggtctcaccgttcctacctttcagccatcttgcagcagagttgttctttggcgcatggagagtcctctctgcctctccggccgtcgtcgctgctaacacggcgatgggacttgaattccctcgacgaactattctcgctaaaggaccagattggaaggacgtgccgtaagtctcacagaagagacccttctttttgacctgaggaaagcttgagatgctgatctcataacttttccgccttgtatccttcaacgtccgatagaggactcaacgcgtgagttcttattctccttgtctcgatgtgctttgcttagtgcaatgctcccaaggagaaacacattaaccacatatgaaattcatatatcctggttctgtagctggttcttgacgacaatgttcccaatgatgtccatcgaggacaacattcaatggaccggtaagcctttctatctcttgttttgacagatatcatcgccgagcacacccttctcaaacaccttttatccccattcaacatagaccgagcaatctcgacgaacttgtatttgtttgacgagatcgttattctcgaccgatgggcttcccaccgacacaacccgacggctcaacagtggaacaagatgaacgctggtttgtccgatatctctctctgtcctgctcttcggtctgatctctgaacattgctggcaagcttacttcatttaacattgggttcacgcatcagacgtgttcagagaaattcattccccatccgattggtgggcgcctgtgagagagagcatgatgatgactctcggtatcgagaacatccacgtcaaagagaaagccaccgtcgtttatatcagtcggtctgtactttttttctcttcgttctcccttctttttcttgtcttcattggcttttctctcattcagttttaccttgtatctccttctgacagacaaggagcttctaaaaggcgattgaccgaggcatcccacaacgcgctcgtgaaagagctctcgacactccctatcgatctccacgtcgcccagatggagacgatgtcaaagaaggatcagatggagctcgtctccaaggcagacatcatcctcggcgtccacggaaacggaatgacaaacgaactctggatgaagcccggtggagctgtgatcgagatctttgacgtcggtggtttcaccagggactatcaactacttgccgaacctctcaaacacgagtatttcccgatttggaacgacaaggtttatgcctgggcggacgacgtgcccgggttcaagttatctgacaactttatgggaaccaaccttcaggtatcggcaacgttgatcaaagagttggttgagaagctgttgggaccaggtgggtcggttgacataaatagaaagtgggaaggtggggataccatccctgatgatgcttagaaagtagtttcctttgaatctgtcatctctatttctctatatctttctttctctttgatcgtctgttctctcttgttaccttttcgtttctactcggttctctgtgttggtcctttgtgtcgattgcaacttagaaatcccttggatttttgtttgatcagagtatgtttcgcgctgcgagaatttagaaagacaaccacaaaaggatgacattcatcaagttgacgtacaagaagatttacagaacattgaggaatcgagaagaggtaaaagaacacgataacaaggctacaaaattgggacgggagggaggtaggttgaacacaaaacgagaagaagaatcctgaaacacatgcgcccaagaagacaaaagaaagtgcaaaaagaaaagaagagtacagatacttgtggcaaagaaagtggaatgaatttgtcctttaaatagattgcagtttggaagattcaatgcatttcgctttggattgaccctctacttgtagaatgagatcaggtcgttgacgtcatctttactacccaagaagacaggacatcgctcgtgaatcgacttgggctggatgtcgaggattcgaccagttccagtagttgcaacacctccggcctgttcgatcaacatagccatcgctaaatgacgccaacgtaacagtgaaaagggggaaaagtaaagattagtcaaaagattgaaagaaagggaatcaaagagaatagaacgaacggaaagcctcgtagaggagtctgagcttgccagatttagtctttttatcaccagggtatccgaagatacctccatataggagtgttcgatgcacatcggccacctaatgtagcgcgaacggattcgtttaagtgcgcaaactcatgaagtaggaaggaacagaaagtaagcgcaccatggaaccaatgtatcgggcagaatacggtttctttccactctcctctgaagggtacttgattgagtcgaggtagttcctcgtgggctcatggaagtagagggagtttccctcgttgaacgagtagatctttcctctgtcaggcagcttaatctgtggatagtgcgcccaaaaaacatggacaagagagtgagacagattcaaagataccgcctacgatggagaaagattagcgacatacgttggggtgggtaagaataaactctccgagggaactgtccaaagtgtatccgttgactccctggccggtggtcaagaccaagttggcggaagaaccgtacctggatcgatataggaatacgtcagtcttacgcatttccagaagacgtattgataaccttgttgtaagaagcagaagacaaacattgtgtatccggcagcgaccatctcggaaccaggtcgcaatacatcttcaaccgttcccttggatccctcttgctgtttatcggaagaaatagatttggtagagatcagttctgtgatgttctagttttcttcgtcatgagaacgctgcctattctagcgaaggtaaagctggacgaaccactcggtagattccaaagatagtaccgatgttaacaccggcatcgatgttgctgcttccatcaagaggatcaaacacaacacagtatgttcccttctggttgccctcagggacaatgatggcatcgtctcgctcctcggatacgaggacggcgcactttccggatgcgatcaatgaggagaccatgatgtcgtccgaaactaattttgcatgccagaagggaagggtctctatcagggatgcgctctttatttaccaatagaagaagagcagcgaaggatagggactcacgaatatcgagcttcttctgctcctctccttgcacgttggtagctccggccagaccgactctgcgattcggaagacaagtatattctgatgtcagtattctggaacgaataacagaaacctgacaacgtatactgacaaattgatcagcccagctttccggacgttgctagcgataaactttgaggtaagctggatagcgatcaagagcaacgtcagatctccagatgcggcagttccaaggttctgctgctgagtgagcacatgactacgaagaaacgtaaggagatggatgtcagtcggaagaactctcgagcgatcatcatatgcactctctttgtgctcgcacccgagcaagacgactgatggcaagaacttaccgggtaagcgtcatgatctctgtctggatcggagtatcctgaggagcttgagctttggacatgatggatatgatctgtgtggtctgagtagaaagagatgaggtcaatgatagatgatagatgatagatgtacgtggaggtctgaagcgaaagaacgaaagagagagttgacaggatggatgttccttcttaaacagggccgggtgagtgcggagcgatgcggagctccatcggctttccacggggcatctccaaattatcccggtgctcggcccggccgacccccgggtaaggttcagtttgttatcaccttttatcctaatacagactatacgttttttgtagtgcctgtttgtagtcgttccgtctttctcctttgctcggtgagcgatacggacaccgatcgtagtctcggctcccttgggagggttgagtatcaaacagttctccggtatcaccgtcatcggttgcatcatcactatcacctttcattagtgtgttctccaagatgaggaaaagaagtctaaataagcatcagcggcagtagctgcttggccgggacatgttcatttcatcatgatcagtttgaaaaagaaaggtctgagtaatcgtcctaagtgaatcaacgtattcttgagcagaagaggataggcacaaccacggctgtgcattagagtacaggccgctcgtcctacgtatattcaatatagactagaagaaagatggtattgagatgatcgacaaagatctgattggttttcactttctctactaagactagatatctatcacagaccacgtattcacaaatttcgaccgttcgcggagtatcgataacctatctctaacctatcccaatacccccctcatcccgtgtgttattctactggatttgcgttgaagacagaaaatctcaacttgatagccagactgaattagatcgacacatcagttctatattcgtatttgatacaaagaaaaaagagagaaaaaatgaacatactcgcttcagagtctgatcatgtatacgatcagttgaagtacctggaccatcaaagccgagaaaacttcaccacacgagtcaaccagagggaaagcatataactagccttcaaggcaatatgctttccacacatatctccaactggaagaagaggtttgcctaagcgtaagccgatgagacgacaacgtaagagcaagagcatcatgtcgtccgagaggtcaactcacgaaattcgtctactggcatattcctacgttcatgcccaatacgtagacggatatctacctccatcggatctaggtcgagtcgaagaggctcagttgacgccactcagaaaaacagaccggctccgccaccatcacctattctttctcgccagctccgtttgtcctccttctctatctctgcagatgtcacgtacttccatggaatcatcacctagcaagtttagacccaaaagagagtaataaaacggaagaaagaagtcagcatggcaaccaaacattcaggatctacagtctccctgctggtctgatcgatgagagaaaaaacactcaccatcccaacatctctctcaaacctcggtccctgatcccctgcagtaggcttactctctgtcgtctgatctaggatgatgttttttgtcttgtccgtacagatgaatgttccggtaaatgtccggccatcttgaatagagattcggaaagttttgttaagcgattctcgaagcgcctggatagctggggtgtctggtctatctgatggcatgggttccaagagtttgctgtaaatgtgatctgcagaagaaagggtgtcttcattcaaacctatcaagaagatggagcattccggttgattttgccacatgggtcgttcacgtgtttgaagttcaggctgtcctgtgtagatgctcgtccaacattatccatccgaagtgtatttgatacactcgatacccttcatatctcgttcaatcatagaagagcgcatgtcatctttcgttagtttgaatcttggagatcactatttctcacccgagtatctgttgacatctcaacacatatgcacccatgcgcgcgcgcgccggcttgatacatcaatcctataaagccttttgctcctctagatggcctctctcagagcattcatcaagagattcggccatactctggtgcacccttgatcagccgagaattcatcttcagatcaatctccaagcaagacatcggatgggttgttcaagttctggagatgaacaacgaggaagatgagttggtctgttgggaaggaggatatcgcgtcggaaagccgctggatgaactcgtgagtccgtgtctcgagtgttgcttgatatcgtcaaaatgcaaaactataaaaacagcagaccgatgctgattcactctagttttgggggtaaactctgatggaatctcaacaaccaccgacaatagtcagagaaaattccggattataacgctgccgccttgtgagtttcaatcctggatagagtctggatgtaacgacgcgcccatttaagtcgatccgaggactccgcgtagaagggaatggctgacgttctaagcccttcctgttcaaaatacctttctaaacgttggacgacagctcagaacgaatggcttcgcttatacgagccgggtatgtgcatttgactggccttcacctttctaaagagaatacattcgaggtctgtcggttctgtctccgtcatattcgcctcgccctgtgggcgtcaaactgacaagaagtgtacatgaaccaagtagctccgtatatcagaccctcagagaggctttagagactttgtgatagacctcaatcgaaaactttctggagtatcagccattgctttcgaattcttagccgatgtaagctttcgcaatcgagcacggtatcacgaaagcaagagaacacatcgattgagtgtctttgtttgatgtataaaatttgaactgacctctttccatgtgggatatgttagtcaatccgtttcctctctcagcttgggccaaaatcctgtgtcaacggttgcgcgccagatatcttaacgaagcccatgatccgttctagtcctacgccagagagtatgtactcatattttctctagatcttcgagctgatacaattttcaaatctcttatcaataccttgatgtttcaatcttagtttcctccattccaacatcccctacacaatacaagatactccaggaagagctagtgaggtcaaaagcgaccattgctagatatcagcagtcaatcgccgagagctcaggcatggtggcaagcgcaggaattgattcaaggacgcgcaaaccgctcaagagagctcaacagttggtagctcatcctcattctaaaaggtatcgtattgatgtatcaaacacaagacttttcattcaagtttcctctgaatacaaaccagcccacttatcgaatcaaatcaactttgtatttatttagatccagggccttaccaccgccttcgtcatcgtccgctaggagtaatcccagttctaaatcaagccaacaagtctttcagccatttgatacagacactagtgaagatatcgatattgaggttgatagttcacgtgccataggtagttcgcgcaagcgcgcgtcaagagtcaagagagaagaggatgaaaatctctcatccgcgatatatacatctaggtcgcacgtaatcaagacgtctcgggcgttacctaaagcaagtcatccagcgtttgattcggccggctccagcgctgatgatagcgacacgatcttcggaaaaccagcccagacatccagcaagatactcaccccttctgtgaaacgaccttgctttggttcgttttctttagattctcttttttcttcaaattaattcagtctttgttcttctgtctccacaacggaaacttgactaaccggtaggctgtcttttctcgttctcactggacgacaaaagatgaaacaaagcggacgaaatcaatggaagctcgaaagatcaaaccgggcgcttcagacgatagttgtacagaaggttcagattcggaacagacgatacctacctcgtcgctcttgatccgttcgtcttttttttttccttttctcaccttctctacttgcaatgaagaaaaagagagattcttgtcgattggttcgtgatcttcatagatagatgtaaggctgactatatcattttctcttgatttatgtgatcgcactcgctctcagctactcaaacgtcagacttcgatcctcagtcaatagcccagacctcggataaagtgttgctgtcgagcgcagagcattcgtgagttgtgtttttgtgatttgccctctactgaagagataataggatttggatctgatacctcaggtcaacgtttggtttcatcgtggtaacacattaggcggttagatagcgacacggacttggatatctaatactttgcataaccgctctctttctctctcccttctctctttgatcctcagctggtctgactcctgtactatcgaaccaacgccgcacttgttcttctacacatcttctttgataagttcattgattagatataggttgtgtctctatcacagactgtatccattatgttatgtgctccccttgagtaatcatgcttctttcaaaacatggtctattcaagttcggtacatacatgcatatgtattcaccgataccgtttcttagctcgtctggattgaaaccgatccccccctccctaccgacctaccaacttttcttttgcctttccggatccatccgaggcaatccacccatcggcttggcctaatcggagttcatccaacctccaagcgtcctgccatgtctctagatccatcttagtttgacctctgctaagagcaagagatcgagcgaatttcatacggagccctaattcttcccctgagagggattgtgggccgtggatctgacgatggttaacaaagtgggattggattgcctggtgggaaaaggaagaaacggatagtagacaagaagaaggaggaaagtcagcgctggaacagagatgtatggtcttggttctggatatataccacatgtacacatgtgttgtgcgtgaatgaagaaagaagaaagagagaaagaaaaaatgaacctccgagacatcaggcggcacaacgagcgtgccttctctggctctagcaatcaacgctcggaactgattcattcgttcagatcctggcaatgcagcctcaacttcctcttcggtcgcatatgatttggaagggctttggaggggaatcttgacgtcaacctattttttgaggaaggaagagtagttcagaggaggtagagatgaaaaatgaaactgataacaaagaagaaagtcgagagcatactggcaagagagttcctcctttcgcatcaccgataactaatacgttaacatcctgatgagaaaagagaagaatagatgaatcataaacagtcagattagcgatgatctatacacaaagaaggatgaagagtggtgaagaatataatacgacacgaaccatagggaaccagaaacttgagaaggggaagctaaactcgattttctgctcacccattacctttttgattgcttcaaaatttcctagccctctttctccaagaacacctccctcgcctagaccggcctcctctatccataacgtacctcctttaggtagctggagtgcgcccgcttggagatcttcgttttttgttgaagacgggtgaaagtgagatttattaagggtagagatggagataggtatagagtggaatgttgggagaaggtgagggagtaggtaccgaagaggaaggggtgtggattggggaggaagaagagaagcggtcaacggatgaagaggcggttggcttatcaaatgaattcagaagaggcacacataagttatggttggatattggagcttatctctatcaacttgaaaaaaagacaagatatcttgacgaccaagcttactttcgttggcaaatcaagcccaatacccattctccgacccacgcttcctcgccacccaatccaatctgacagatcagattcctcagctctgttcggatagcgtgccattcctttcctggctctatcaagggaagtttatcgaccggaacgagagagtcggtgtgggaagtcgttttgagaacatgtatcgtaggaagtagtggcagagaagagtcaggggacaaagaaggaccggatgaaagtagaggaaacgctgaaggatcttcagacctgctcagtcgaaaggaagagaggattagtagaggagcaacgtataaggagacgtgtcagagcaaattgaagggacggacggagcaaaggtaaggagtccaataacagtatgtatggtgagcggtgaatgagtcgagtcatcgtagaactaattcgacagccaggaaagaggaaacagtatgagataagactggcaaccattgcctgtttcattcgtacttctaccagtacaaagcttaccttgatgaacgcgcctgctctttcggcctcggagccttcacctgactgcacacaaggaaacttgtgggcaatcgatgggtgaatctcaatgggtttcgggctggcagagagcgagcgagcgttgggaacaagagtcttatatttgtggattgattgatggatgagagaccagaggttgagcttattgatggcaagcgagacagacaattcaaaactgagagagatatcctcacatcctgcacccaactagattctcccgggacaccaactgcccaaacgacggccctctctttcaatcgcgagtagtcgatgtcctccccttgaccggtagacccagactcgggttcatctgtttcaagcacaggcatgaacacttctggctgagatgtggtatcctggagcatacatctgaatgagacgatcgaattgggagcagactctgttggacgaaacgaaggaatggagtgtatgtcctggagagcagagagaagagcaggaatgtctgcggccgtttctgctgacagaggcaacacgtatcagacaaattccaaggaatacaatcaccagtatatatgagcatacacaccctcttgagccggaagctctgcgagagctgttctgaggatgtctgtggtaccaagtgcgctcatgatggatgatgggaagaaaggacgaaaaacagggaagacgcgtcggatttcatttagtttgagacgcgtcgacgcgacttgatgatgtacttaagtaataatcatatatatcaaacattcacttagataatcgtcatcggatcgatcgaacttccctcctccggctgacgttccgttttagccacaaacgaccatccaaagactttgaccctttctgaccatctcaacaatgtcggccgctcctgcgactccacctgaaggatctccaaacgttaggccgccttacaatgaacggtaccatcccttctttgacgaggcgatgaaggaacagtctaatgaggaacaacttagagaagctaggctgaagtggtggaacaacggattggcaaagtgcaagcaaaacccattcgtgcccatcggttcgttcgttctttctcttcccatcttcatcgccgtctccttatctatagacccgtaacccttattccatgtcgtgcttgggaacaccatggctcatctggccgagtggctgatgggatcggttacggacaacgattagaaaggcagatgagttaatatcgcgaatccttttcttccttcccttcttccaggtatcgctgctacgtgttatgccatgtacggtgccgttcgatctatgcgagcgggaaacagtgcccagcttcaaaaattctttagacttcgagtagggtacgtttcgctttgattgtttctgttctcgttccccgttaagctttgtcctaatttccctcatgtttcgtccacctttctttcctgtcggttttctttagagctcaagcgttcgcaattttggccatgcttggaggaggaatgtactttgatggagcagaccccctcaagagcttgggcacgatcccagacactgtcaagcggtcccgtggttcgtagttactatcctgtctactcattagtcgtttgactaaaccgtctgatttgtttcgatgtgaacccattttccttcaaaacctctgcgacgtcctttccgatcttcaatcgtcttgttgtccgtttcatttatgcgcaacgtagcgaaacctgaagagaagaaacaggccaaggaaacagtctacgaagctcctggagagcatgctgaagctacagacgagcccgtgaagaaggcgcttcccaaactgtcacctacgaaattcactcctcctcggttgaacgtctctaacaactcgacatcggcgaacgacccggcaagcaacaactgggcaggcgagacgaaggaggaacgggtggtgaggatgacggaggcgctcgaggccaaacgaaaggatgctcttagggagaacgagagacagagagaaagactgacgggcaaagtcagggtggctgttgatgacatttaaatcgagatttcttctgtgttcgaacgaagatcgaagactaggaaaaaaaacgaaacgtagttgattattaaaaagagagtatgcgatgacttgactgtgagttctctttccttcaattccctctctcttctatcttgcgcttgacagacttggttgtactaacttgtcactcagcatgttcttgcctttcctttttgtctataccctcccccatagatccttctcttcttttttcatattttctttctctgatttttggttggcttcttcgacatccatgccaacttttatccagcctatctcgctcgcctgccagctaggtctattacccaattaaattcttctcaattgcttcccatttatcttttaaaattatacaagagaatgtcggtcatctttgtttctcatatccatgaacccatcttatctgtttgcctcttcgcttcttctctcttcgatcttcttcctctttaaccgtcctttttgttttcgcatatcatgttcattcctgcactgcaagagatgtcgctcgaaaaggaaagcaggaaccccactgtttgcatctcctcgctgtaacacagttatttcaaacctttcctacatgtatcaagaagaagccatatccctcaactagacacatacgtatcggaccgagcaagatggtcaaagaatggttaggatcatgttcctccggatgagacgagaaagatagaaaaagagacagagaggtgaatcaaggaaaggagacgtacgaatcgtctgaagacttcgtgtcctctccgtaagtttaataatctgatccgctcgtttgccaaatgagctaatttcgaccaccaccaccatcacgagaaggaagaaagaaaggaaaaagtttgcgcacaaacacaatgtcagtcatcgcttttcttgctctgtgtctgtccgttctttgtgttttcatcatggctcccttggaccgagaaggagatcgagaatcaatagccacaagcagacgaacgaaccgttgtcagacgcttgacccaacgggacgtgcacagcgttcgctccaaacaccttctccaacatccgaatccccgggaccgagccgccctctctgatccgtagaacgttgggcacaccccacacgtcggcaatacaacgttccataagaaggtgttctggcgaagaaaggtcgcctagccagtaatctgctttatgagggattttgatctgtatcaagaaaataaaataaagtacaaaaggatttccatgaatcagattgtactcgcaagatgaatgctcagctttggaatagcaagaaaaatcaagcgagagatccggcggtaagagaaagagaaatggactcacgtcgatatgattaagagattgcaagcttgagaacgagctctgcaaaaactggacgatgttgctcgcgatggattctaagtcttggtccgggacgattcggaaagaaaccgacgcttggacctgtgatggaatgacggttgaaccttaagtaaccaagaaagatgagtcgagttgaccaagagaaaatacgatcaaagaagagtttgattccagaatcagcccagacgatgatcgacagaagccaaggccacaagacggtgaaagaaccaagtattccaacagcacatagactcgacctctcggcgactgagaggaaagaagaagaaagaacgctcacctgccatgctacacgccgttccctttccgatctgagcgatcgagaaactcggctcgcagaacctagaccgcaagttctgaggtgtcctccctgtgagctctgccagtttctcgtaaagcgctctttccggttcgtccacagcacggacggattcatctagagggggaaaacacaagggaggccacccggatttaaatttgatatacatcaagtcgaccgggcaatagagacaaagagcttacaaaagtctgggatggcaattcgctcgttgtccgatatcgtcgccagcagacgaaccctgatagaacgcaagaaggacagtgtgttaatacagagaagctgacggaaggaaaggagcaaacatacatatcaagcatcggctcgttgcctgctcctccttcaacaccagaatgctggtcggcctatgataggtgttaagtgtaatgaagagaagggcaggaagaaagattgagcatgtcagtgaacaatacagaggacactaaaaagagtcacgtaccttatcactagtgatctacaagcatatttaggcaaagaagaaagggaagtagcagtaagatactagatcgtgataaggataggcacatagagagagagagaaagaaaaaacacacctgaatgctgacatggacgactcctcggagaccgtacaagatacaaggattgacttcgtctatccagcttgaattcgacaccaagattacatcgacatctccgatctcattctacgcaaccaatgtcatcgagccataatgatcgtgtggagggagagagaacaagagcacccggaggtcagtgtatgtattctgggctatctcataaagcgagaaggaaagggaagcaacctacccgatggctttgagtggcttctaggagaccagcactgcctgtctcctcctctccttcaatcaacatgacgagatcgacctcgagcgagcgttgttccaacaacgtcgacgccgccgttgccattgccagaatcggaccctgttgcaatggggaatgtagatcgaataagagatgaggaggaacgttcgtattcggtcaaataaacggaacaagtaatgatcaggacggaccttgttgtcggccactcctcgtccatagaggtatccgtttcgggcatctaacgtccaagggttcgaatcccaactctcccggaccgcactcacgacatcataatggccttttaggaagaccggttgggaaggcaaacatgtaagctactcgagagtaagtctcttgtcgtagcggaagttgacctaccatagaacagcactcgcttctttgcgggtctatcggtctttccggtgaatcttgctagcaccaaaggattcttgcctagagcaacaatgaatgagggagttctcccagagatgtttagttcgatgtcaacacaggccatgacacgaagactcaagctcttctcggagtagtttgatgttgtcttggataaactcaccggcagctccggtaataagctcggcttcggcccctagttgggtcaatgtgtttttgaggaaaattgcgccttgtcgacagctgtgccaaccaaacagagattagtaagaaaaaagggaagtcgctccaaacgtgaaggcgaatggagaagaggactgactgttgtctgtcagcattcctggagactgtgcggtaggagaccatttttgatagagaatagattaatgtatctgtaaagcgaacgataggaaattagtctactttctcggaacacactcttcgggctggaagaggaaacaccctatcatctgcaagcttaccaccatgggcctcatcatcatctttgtcgacatctatgagcccatccatccgcgctttgacgccatcccagacgtgtacgccttctgaaccaccggtaactagctgtgccctgccagacatatctggcgcagtggccatagagagaatggaggatttatgggcttggaagcaggctgtacactccaagctagtgttccatcgctgagggaaagaaagtcactcccgagtcaacgctatacattcatctcgaaggatatcactcgaacatggacacatacacagataacaccatccaaagaagcgctgtagagatcggtgtctaccggtgaaagatgcaatactggagcctaggtgaagagacaagggaggaaatttcgatggtcaaggtctgaatttgccagaaactccgaatatcgtgcggctaacctcgtgtcctaggagaagcctgatgattgagccagtctccagatcgatcactttaattcctccgtcctgcatccctacaaagagagttgtctcgatacatgctagagaaagtacggcgctatcgtacgagcctctgtagtgaaagggaaaggaaaagaaaagagaggtggtgcatgcgaatagacgagtgggcggacagaggcagtgtacgatcagcttgatgataatttgtgtaggaaaagaacagatgaacgcgcgcgcacttaaagtcatagacaaggctcagcgagcagtcgtcctgctgttcccaaatctttcaaacaaccaaagaaaggaacagagagtcagtttggttggtcgggtctaatttttcttgactcttttgctcaggacgtactctgacgtcaccggcaccgctagcactggcaagccagcttttctgattactaggatctttgacccaggttaacgtgtacacataaccatgatgagcggtaacagagtttctactgtccactgtgagctgcgggactgggattttgttcaaaggtggcgagggtggagcggatggttgtggactggacgcaaagaatcgggcagatgtcggattggcatgcatgggttttatgctagagaagtccggacgggagggttggggcaagtttggtggtagcatgacccactaagaagcgaaggtacgaggtaacaagcatgaacgagtggagaagggagacagggacgagaaggaatcaaaaggacatgagaagtcctgcttgtcagcccaaaggatgtacattgctcggaaagagtcccagaaagatactcacttgaatcgaggtggactgacagcccatgtagagaaccgagttctgtggggaccagaccacagagaatattcttcctggtgtgagaggatggataacgagaagaagttggtttgtgcgcaaacaccagacctgtaggatttaaaaaggatttgcgtgggtgattctttcttgtgtatccagaaatgatctctgctcactttcactgttccatcgcctaagggagagacagcagaggaagagatttgattgtttagcttgatatgattaaggcttgcaagacgaatagtgacgtttgataggagagggaccgacctccgctactgatgagccagttcctggagtcatcttctacaatcaagagagctgtgagtcctcctggttggatttacgttcgtattcgagaagggagagataagcatcacgcttgaatgagtgcacagctgcacggtgaagcatagacaagtacgacaaagctgaagcgtaccggtatgaccaggaagggtacatatccgttcgtaagtcgatctgtcccacacatggatctctggtgcttcgcagcccgaaaagatacgatccttggatacgcctggaaagtgtatatgcgtgtgcgtgtgtgtgtatgtgagaagaaggcagaaagatagagaggcagaaggacgggagagcagagaagtgcatacaaagtgactggacagcttggttgttgaattgaagggagtgagctttggtcggtagatgaagattatcttttgggccttttctacgagatatcgaggctggaatgagcagaaggtgaatggaagaaaagaagtcaccaacccacaaggttgtgtgagctatgtgtttgaaaggaagcaagccaaggctgaacaagttgtgagcaaaggattaaacgtcagagtacggacactctgggagttctatctgttccatggggactgataaacttggagatatccacaggatgagtgtcgaccaactgcagggtcgagaaagcgtaggctgatggaggtgacccaaaggcgtcattgtggtgcatgcggtgttagggttaggattaggattggctgcgtcttttctggctctcatacagatgtgctcttgagcaagcgcgctttgctgtgatagtatggcagtctctaccagattgacttggtctcttcacggacgacgaaaaacaagacgagcaagaaaacatccggtcgatcgacgagtgtgagagagaaggaagaaaaaaaaaaaacaaagaagggagagagaatccatcggactctgtgcatcagaaatgtttgattcttctttactgcttcctctactttctctggctacagccatccctagaatacccttatccgacgaaagccggccggtgtttgggctgaaccgagctcttgtgtgggatgcgtgtgggtgtgtatgtacatatgtgtgtgtatgtatgtatctgtgtgtgtgtgtgtgtgtg

SEQ ID NO: 421 - DNA, 1301 bp, Xanthophyllomyces dendrorhous
tgtgtgtgtgtgtgtgtgtgtgtgtgtgtgtgtgtgtgtgtgtgtgtgtgtggatctgtctgatggcagagtgcggtgtctctgtgtccctctaaccgatgggatcgaaacacaagcaaagcatcactgagccggctcgtttgaacgccgccgtcccggccaccgaaagaagcagcaaaagcagccatggcggcaatcaaagctgtagcgttcgtttctctcggtggtcacaaggcgaacgagagacgcgtcgggggtgcggtacctgttgaacgacgcgtagacgcggatcaaacgcgtcaggcacacgttcatattcgggcgattgcggagtgggcgaacatatacacacataagacagcgaggcaccattcaaatttcgctttcataaatgtcatctgacccgacccgacctgcacctttctgcttctgccgcctgccgcctactgctcgccgccagggtaaccgtccgatcgacctcgtggcccttaagcatcaaagattcttcttaaaaagccatcgtgtttgtgttcccccatcgagttcccgacgtcgttcttgctttgatccatagcttaatccttgttctcattgtccaatccatagttttataccttcttaccaacacatcacatctttcttcccaatgtctcacatcccagacgtcgagaaagccaactctgctcatctgaacggcggctccggaggtagcagcgttccgttgggtgaacaccaaggtcaacagtactacaatcccaacctcatcaacagagctatcactccgtgagtcaaagcaggccatcagagtgatctcaagaatggtatgaagcgcttgtgctcacctctgtgttcccgttttttttccttccccgctctcgctctctcttttctcagtggtggacatccttgtttgtctcactttcttctttcttccgccttgccgtctcaattggtatttggacctcatgcaacggcttggaacagagttcactgactatgcttcttccgactgatcacttgacaccgatgcccacactcttccttgggatggtatcgctttgctgtgctctcttttgacaaatttcttcctgcctcatagtggatacctcccagcctgctttccccagttagtctcgtttcttgtgtaataacctaaattttaccgatcgtctctaatcccgcgcgtacctgtgttcttcttctcaactccttcttactctcatagtctaccaccgaaagctcggtaacccagcgtacgaatcaatccatatttctcttctcccttggtctcattcatctgt

SEQ ID NO: 422 - DNA, 26491 bp, Xanthophyllomyces dendrorhous
ttttttttttttttgttcttgcttccccacagtcctctaggactcttggctttcgcctctacgacgtgagtagagaatttcacaaaattaaatagaataaaaaaccctcctagactttctcctaattggcgcgcttaccctctcggtcatttgttctcgatcctttaatctcatcttttcctttcgccgtccctgtcttcgttcccatcgccgtcaccgcccgcagtttcatcctatcctggttcaatgtcggaatccgaaacattgacacccctaatattatcctcagtatggctttcgcctatggaggtctctgccagttgcttgctggtatgtgggaggtaagtctacaattccttcatctggttggtacccgatcctcttacccttgttctgacaatcggtaccctctttcagtttgccgccggaaacacctttggtgccaccgctttctccagttacggaggtttctggatctctttcggttttatcgtacgtcctgctcacagaaaatcgtcaatcttacctcgtacctttcgcctcttatttgctcacctggcgatctttctaacttaatccagtactggcctagctccggtatccttactgctacttatgctccaggagagcttgcttccgttttgggaatctatttgatcgcctggttcatctttaccttccgtacgtacggatcttgaggtttgtaatatcaaaagtgaacctcacttagcttaccctgttgatctcgcccatccagtcatgatgctcggcaccctccgatcctcccttgctctcttcctcgtattcttcttccttacctggaccttccttctgcttgctattgggtcagttcgaaggtctcctccattcctatgtgtcccaactcatttcatacgctaatctctttccttgtcctgccctgaatcaccaaccaacagagagttccaggcgagcgccaactgccacaaggccggcggagcgttgggtatcatcaccgcctttatcgcgttctacacgtacgcattctttctcaagagtcaagcgtctctttcttttattgtgccaagctgacgactcacacatccttccttttttactcttttcaaagcggtatctctggtatctacactgccgacactactttcttcacgctccccacctacagcttggccagggtacgttctgtgatttctctctggtccttcaattcattttcttgttttgctgaacctggacctccttttcatttatgagcaggaggctgataaggcgaagaaccagtaaatctcgttattgtttcacccggggcttgacgttgcgcagctttcggtcgtctctcgaccactctccaacaattctacccatttctcctctccgtttcttcttctctctaatcgcttctccttctagcatctctaattcgggcttctcgacataccatcactcaaaactgcttaccttctgacctccctcccaatttgttccattctctccccccattctctcatctggatcctctcaaaccgaacacgcgcaagtgttttcttgagttcatcctcatttcttctctcttctccctatattctatttgcagtttgggtagtcgtcgttggtttatgtaacagtattcatccccttcttctcctcgccccgtccttaatcattcgctgtacatcctatggttcctcctttatgtgttctccattctttttacatcgtatagtttgggtccgccttctttcagttctcgatgctctggatatccgctctgatctgttctgagggaaaaaagaagagaaaatggaaaaggagtgcaaggagcgcaaatggactttcccgatttcttcttcttggctgactaatcaaactcccatcaactaaatgaccgtaatcaagagatcaacgattagacatcatctcttctcttgcaatccaatccgtcatcccattatatcccgtcctatctgaacgaccactcagtcccgatatctttgtatattccttatcagaaccggctaatcaagcttgatcgctcgttgtaataatggttgaccttccgaaacgaatcatcaaggttcgttatgtcaaccgatgtctactttcctctagcggtcttttcttcttctcttctagcttgggaaccgaagttgaactacctcgatatactcacttatgatgaacctgtatctgtcggtctcgtctgatctctactctctgctctctgttctgttctgttctgtcatgttctgttctgttttgtttcatgttgttggctggtcttgtcgatctttcctacggcaacaacctctgctccaacttgaacttaaactctcatgaaaaaaaactctttatctctatggacctgctgtctcgcttctactcgaaaactttatcggagataggaaacccaaaggttgatgtccgatccagctcctgggataacagcggtgccacacgaggacaaccttcggtatttcgatgtgatgatcaccgggcctgagggcagtccttttgctggttcgttaacgggttcctctcctctcctcttcactatccttcttggtttccttcttctcgatcctactcaagtagctgagctgggcttaaatagaaagcggagatagtgaagtgggtgttagatgtgcaaacaggttgggatgatatgatgacatcccggcacagcattctaatcagaggacggccacgataggataccatgttttcctcttgcttctctatcttcatttggcccaaccaaaagacggcgaacaccaaactgatgaacgaacttattctaccgtttgtcttgtcttcttccttatcttgtcctcccttcgtataggtggaaagtttaaattggagcttttcttgccggatggatatcccatggaagcccctaaagttcggttcctcacaaagatctaccatcctaacattggtgggtctctctttctcttcttgtcgtatcgttctccatccattctgactgtttcggcttgctaatggtgtatatctgtcgcttttgatgtccttctcaaaagacaaacttggccgaatctgtttggatattttgaagggtatgtgaacatattctctactaaacgcaacgcctagaaagattcatttgttcatatatactaaacacctattcgatttcctcttccttcaaacatactccaacaaacgaataatgcattgttgtcaaatcagacaaatggtcaccggcccttcaaatcaggacagttctgctttccgtccaggctcttctcagcgcgcctaaccctgacgatcctcttgccgttagttcatttcgttctcaacctctcatttacgaggtcataccagactcacacatccatatacatccacctgcgtacactcggcgctgtctctgttctgatatcataacaattcataaaaatatcgaaaccggaaaaacttacgcagaacgacgtggccgagcattacaagtctgacgagaaggcggctcaccaagtctcgagagaatggaccgcaaagtatgcgatctaaagggggctctggtagagtgaagcggactgggtgatatatacgcatctctttaatttgcctggatcgaggttctcttcttttctcttcgtcagtctttcgtgttcttcgttcttcttcgtcgtcttggtttcttcccgttcggtccggacacgaacaccatccttctcaaacgttctcatcctctctttccttcctttccttcctttccttcctttccttcctttccttcctttccttcctttccttcctttccttcctttccttccttgaaagttcttgatattcttgattctcgatacagtttccgaacgtgcatctctctctctcctttgccttttcttttgttcatgatcgaggtcgacagatggctcgttgggttggagaagatgtatgaaccaatcaaaacaccaagatatcggaacccggatattgaagccaaatcgccagaacgacacaaacgaaaagcaaagagacggccaaaggggaaaaagaaagaaaatgggttatgtgcatattcataacattcatgatttatttaccggtctcgtctctgatggcacctccgtcttgaaagttgagaatacctgcttcgctcatcagaccgaccttttgatatcatagcatgtagatgatgacaaagaagcaagaaaaaagaaggaaaagatccgttgagtctgtgctttacatcgactgaatcacggagggacaagagagaaggaggaaactaaccactttctccgcctcatcgagtttcatcgaacccaacaccttgttgacctcatccaaactctccttcttgagcgcgtccttcatcttgttctcaaacgaatcaaagatctcccactgctgcatcagataagccctgacctggacaggatcgaggccctcagttccctcaccctccaaacggatttcttcaggtggaggtccttcagggatattgaacgacacactggcacctccctcggcgaccaactggatctgttcctcaccttctccaccggcggacgaggacgctttctcagcggccatctctttcacccgagtggccattcgttggtaggtcgcttcgacgtccgactggaagaggtgtaatgcttttttgccagcttctcccggttggttcatcctgagaaagtgtgttggtgaaagagagaagaagaaaaagagatgaaccaagtatagacgtaagaatgtggcctgcccgtaaagagaatgagagatacaaaggaagataaagactgagacaaacctttggaagaagagtctgacaccgtctcgacctaatttcctacagtactggatcaacagccccttttccacacaaacctttgccttgactttctttccgtcgatttctgagttgaaggcttccagcaaaagagaatccgtgttcgactcggccatgatcgatgggttcgactgaataaatcgaagggcaccatcaaagtctccgtatcggatgttggtaaactccttggcgataggagtcgccatcgggagatcctcatcatcatcagattcaaccgttgccgacttctaaagatagaagaacgggttgagtaatatacacacgtgaattagcaagatatctgaaaagcgatactaacagatgattcagggttcaggacttcgatggtagtctccttctttttactgctcgccggcttcggcttctcttccagaatgttttctccggccttgttgacaaactatgtacgcgcgattgaaaacaatgtgtcagctgagtaattgctcaacagaatagacaaaaaaagggagaaaaaggaaagatcgatttactccagagctgaaaccttcatgaatgtgttcactggtgatcttgctcttctcttccttctcttcctgctcgatcaacgtcccgcactcttctgtcctgtgatcgagctttccgttatggaactcgagcctctccgtcagcctgcttgctagcctgtccgtatcctctccgtcttttgcgccgtctttggcttccttggcgacttgctcgagcaaatggaggagcatcacatcatatgtcggttggtttggtgcaccggtgttgggcttatcaggagagggctcgtttgtcagttgagagacgagagaagagaatttggaagtagcctctttaggaggaagcgtcttgagagagtcgagcagagagacgatccttggtcgaagggtctcattcaatgagatctctgctcgaagtttcgcaatccgctgttgtcgctcttgtcgtttctgatgaatcgactgctgcttccatctagaaagtgataagaacacgaccggtttggttgatgagcctgacagatcaagatcaaagacttctatcaatcaggaaacagcttaccgaatcatactctttttgtcgatgttgggatgctcttcgatatcagagtcatccgagagctggcaacgaagaacgaacggccagatcagcaagtgtacgtcaagcctaactgaacgacgaccaaataaccgagggaagatacctctagcatatcccatttggagtagttcaaaggcatgatggaaaaacgagatgtgtcggtgatggacagggtgaaggtaaacggtcgaaggaactagaaaagaaggatggagatgacgggcacaaggttcaaaaaagagtattagagatcttgctgcgcgtttgtagttatccactagaggaaatctgtattattcgggattggtatttaaggcgggcaattcagatatgtattcaattatctatctatctatctatccctttctccgccttcgccctcgacattttctgcttctctcttcctaacctcctactttcatcgtccagctctactttgacaagatgcatcgcacttgcagatctcttggggctctgtccacccgagctaccgtccaggtcagatcatcgaacttgatcgtctcctcgtcccgttcttttcacagctcttatacacgctctcaggagacagcctccgcctcggcctcatcttcgtggactcctccggtaactcctggccgaaacaaaaactatgatgccgctctggcgtatattcaatcgagcatggagaatatgaacaagaagttagaagagttaaagccccgtatagagcagctgcgggagaaggttgaggcctctaagaaggcggctgagaacggaaaggagctcgactttgctgcgtttgacgatttggcaaggctggagctggaaaaggagaggatcgagaacttgggagagttccacaacccaaagaccagatgggagtctgagaacggcctccgtaagtgtttccaaggggtttcctcacggtgacgatggcgatgaggttatcgagaggtgcaagagagacaagcatgcttgtccctctttttctgttccttcttttttcctattcttgtctactgacgtcaagtatgttcgtttgcgtcgatttcaaacatgacagttgacccgacaactccggtcgctcgataccttgccagagagcgattcgagttgaaaggctcgctcgacgcccacgtatgtacacttttcgccgtcttcctcttcttcctttgccttcttgtctgatatacctcgctatctcctttttttttctttttcttacttcaaacagactaacgcgttgaacgagatgtacgtgattcctgatctgatcggtcctccttccaaaggcctccgggtggatatcgctctgcgatacccggtgtctgctccacctccgcctcccaagccggatcagtttggttatgtgaaaaaggtccggaaggtcgagacgagggatccaaaggatggaaaccgggtgatcgttggacgaatgttgcctgtggaggagacattgaaggaacccgaattggagatcaggtactttggcgagaaggacacgtttggaaccttgttcatgatcgatcttggtacgtgtgtctacagttttctcttcgtttctttcgtcttgtaagctcgtgaagcccggtggctgaattgaagatgcttcacagacgtccctgatgtggaaaaccacacgttcaagtctcaactgcactggctggtgccgaacatcccattgtcggcaaagtcccaggtgttcccgtcttcggacccgtcggtggtcggttcgtcgagcgctttcaagtcgcaacttcctccggcggttgtgccttatctggctcctcacccccacaagggcacgccttaccaccggtatgtgtttgtgctcgtccagcacgacgaaccagtgatattcgggccaaaagccgggaagggtgtgatcaagacgccaaagagagaaaacttcaagctacgaacgttcctgagggtgaactggaagatgcaggatatcgtcggaatgtcattcattcgagagatttatgactcaaaggtctgcccgaagatctggaaggacatcattcgtgagtattgtgtgctatcgacaggactctttctttagagcgcaagctgctgacggaattggactatgatctttcttctcttgtactgaactatatctagaacaaccagaggtcaagtactttgtcggtcaaccccaatcgatgttctggacgccggagaagaagaaccgggccgaggtgtacaaccaaaagctcgggatcgtctcttccggacctgatcttaaccagcgattcgttaggacgcccggctgggagggtgaattcaagaggttggaggacagtgtggattcgaacggaaacccggtggttgttgtcgacagagtgcccaatgaggtgactggaaccaaggcgtgagatagtgtatgaccaaagtgatcgacatgaaacacaaaagtaaagacaaaaccaggcaaccgaaatgacgataaaggaaacgagccaaagaaaggagacagttgacagagagcgtcaaaccacgtgacattgcactgcattgagcacggtacttatcacgagagatgagcgccatactcagggccattcgccggttaatcacccatctcgccaatccggccaaggtacaccggccgatttgaaatttatttgaccaggtgccttgccgatggccgcctcttccgccctgtcccttctttttcgttcttgttgactcattcaaggggatttttttttcttctgttcctctttcgaccatacaccttcactcaacctgggctttgtgttctctctcgctaccaccaacaccaacaccacatccttctttccgcttcatccgcttggttggatcttatatgatctacacagaacgcgtatcagacgacgtacggttatctttctttctgttagcttaatctacagagacaagaatgagaaaaagcttatcaggtttttttctcccttgttcttcctgttctctttctcctttgccttccgtctatcatctcatccattcctatcggtctgggttcccaataccaatcgacagtacatctccgaacaggttttctctgctctcgatcaataaatcatctccaacaacatcttccagcatatacctatcttccctctttcttatccgctactcttccaacccttagaaaaaaaaagttccctaagaagaaaattaaaagccgaaaaacatgcttcgatctatcagacaacctctggttcgactctccaaccagaccggtcgatcgttcacatcttcgcccctccgagcgttcatccgaccgacaaacccgctcaaggctgtcgccgctcctgccgtcggaaactaccacgaaggccagggagagcccacgttgaactctccatctgagctcgcccgaaagatctcggctaaggtcttgcccaagatccccaagcctgatgttaaacgagttatggtcgtcgggtcaggaggactcagcatcggtcaagccggtgaattcgactactcaggtgggtccccgcttttcatctagtctcttcatctctatattgtactcttcacttcttccatcttatctatttaaccgactgggcctaattcccaattgtctatttaaattcaaataatccgatttcaccatactaaacttttttccccttcatctcttcttatcctcatcacatctcaggttcccaggccatcaaggctctcaaggagtccaacattgagaccatcctcgtgaaccccaacattgcgaccattcagacctcccacgaccttgcgtccgaggtctactttttgcccatcaccccagactatgtcgcctccatcctcgagaaggagcgaccggacggtatcctcctcaccttcggaggacaatctgcgttgaacgtcggtgtccagcttgacaagatgggtgtcctcgaccgactcggcgtcaaggtgctcggtacccctatccgaaccctcgaggtatccgaggaccgagatcttttcgtccaggctttgaacggttcgtatactatctttgtgctcttactgctccttcatatcttctgactttcgggccgccctcatgtactcttgacttctcacagagattgacattcctgccgcccagtcgaccgccgtttcgaccgttgacggtgccctcgaggcagccgctaccatcggttaccccatcatcctccgatctgccttctccctcggaggtcttggatctggattcgccaacaacgaggacgagctcagagatctttccgcgaagtccctttctctcagtcctcaagtgctcatcgaaaagtccctcaagggatggaaagaggtcgaatacgaggttgttcgagatgctgccgacgttagtatttccatcagacagaccggtcttcgtttgttcacatctcagaccctgacttttctttgtccttccctctctccctcacacttgtagaacaccatcatctgctgcaacatggaaaactttgatcctctcggaacacacactggtgactccatcgtcgttgctccgtctcagacgttgacagatgatgagtaccacatgctccgaaccgctgccatcaagatcgttcgacatgtcggtgtcgttggagaatgcaacgtgcagtatgctcttaaccccgtcagcagggagtacatggtcatcggtacgtctcttgggttctttccctcgtttcaatagatctttttgctcatcaacatttctttttcttcctttttttccttcccacagagatgaacgctcgattgtcccgatccagtgcgttggcctccaaggccaccggttatccccttgcgtacaccgctgcaaagattgccctgggccacactcttcctgagttgcccaacgccgtcacgaagactaccacggcctgcttcgagccttcgcttgactacattgtctgcaagatccctaagtgggatctggcaaagttccagtacgtcgagcgaaacgtcggatcggccatgaagtctgtcggtgaggttatggctgtcggtcgaacgttcgaggaggccctccagaaggctatccgacaggtcgacccgagatacaatggtttccttccttactggaagcctgaggatcttgagaccgcgctgtcggcaaacaacgaccgacgactcttcgccatcgctcacgccatgctcaacgaggcctacaccgtcgacaggttgcacgacatcaccaagatcgacaaatggttcctttacaagctcgagaacatcgtcgccgttcaccgagcgctcgagtcgacctcgcttgaccagatcgatgccgagttgatgcgaacggccaagaagactggattcagtgatccccagatcgccgagcttgtcaagtcgaccgaggacaaggtccgagcgcaccgaaagtctttgggcgtcactcccttcgtcaagcgaatcgataccctggccgcagagttccctgcgcacaccaattacttgtacaccacctacaacgccaccacccatgatctcgagtttgatgataagggtaccatggtccttggttccggtgtttaccgaatcggttcctctgtcgagttcgattggtgtgcagtcacctgcgctcgatcggtccgagagatgggcaagaagactatcatgatcaactacaacccggagaccgtgtcgaccgatttcgacgaggccgaccgattgtactttgaggagctcggcttcgagcgagtcatggacatttacgagttggagaacgccgacggtgtgatcgtctctgtcggtggccagcttccccagaacatcgctctccgattgaaggagactggtgtgaaagttctcggaaccgaccctgacatgattgacaatgctgaggaccgacacaagttctcttctatcctcgattccattggggttgaccagcccgactgggttgaggtcacctcgttagaggccgccaaggagtttgccaacaaggtcacctaccctgtgttgatccgtccgtcctatgtgctctctggagcggccatgaacgtggtgtgggacgagtcgatgctcgaccacttcctttcaatggcgactgatgtctcgcccgatcaccctgtcgtcatcacgaagttcatcgataatgcccaagagatcgacgtcgacgccgtcgcccacaagggaaagcttcttgtccacgccgtgtccgagcacgtggaaaacgccggagtccactctggagatgccaccttggtccttcctccgttctcgttagtcgatcaggatcttgctcgattgaaggagatcgccgagaaggtcgccgccgcttttgagatctctggaccgttcaacatgcagatcatccgaaagcccggatcggacgacgaggagcctgcgctcaaggtgattgagtgcaacttgcgagcctctaggtccttccccttcgtgtccaaagtcctcggtcacaacttcatcgagaccgcgacggccgccattatggataccaacgtacctgagcctattgatctgatgaaggagaagagggattacgttgccatcaaggttcctcagttctcgtggactcgattgggaggagccgatccgttcttgggtgtcgagatggcttcgaccggagagatcgcctcgttcggtacagacattcacgaggcctactgggctgctttgctttctaccaacggtttcaggatcccttctttgaactctggtgtgttgatcggtggtgacatcaccaagccagagatgaagacggtcgccaaggggttgatcgatcttgggttcaagctgtactgctcctctcccaaggtcgaagagttcctcaactcgatcccttacgtcaaggcgaagaagatcttcttcccgttgaaggacaagagaaagttgaacgaggtgtttgagcagtatgagattcagactgttatcaacttggcccgacagcgaggtgcggacacggtcgacgaagactacgttgcccgacgaaacgccgtcgatttcggaattcctttgatcaacaacgccaggtgtgctcaactctgggtcgagtcgctcgccaagaagattcctcagggtggtctggacggttaccaggagggtcagatccctagtgaggtcaagtcctggcacgagtgggtcgggcccaactgttagaaggccgtagagttcttttctttgttctatctctaccttccttgttccttccctctctatttctcttcctaattttcccctcttgtcaaggcttccctggcctgaaacgcgtttggaaaagaggataaaaaaaagatgtgtttcatgttgacacaatcttatacatatcgtttctctacaaagttttgtctaaacatatttatatatgaatgctctatctgctatctcgggttcgtcttttcaagcattgatcatattaggaccagtgaaaccaaaaaaacaaaaacatggtataaacacatttgatcaaacaggggttcagaagagaatttgcaaatatatgtattggaacaaagacaaggaatataacaacatggggaaagaagcattacttgtgggaagggaggagggggaggaccatgaattctgttttgtcaagtcgggagacgagatcaaacaacgcgctcgaacaaacaagacgctagaccgtcgagatgcagtcggttattcataatggtaggcagagagtacacacggcgaagagaacgagtggaggaaagaagattgagagaaaaagaaggaacgggagcgaggaacgagaacgggacgtagaaaggtttagttgatagccttcttgacgtcagctttgacctgcccgactttatccttggcttcttcgaccttttcacctgctcgatccttaagagccgttgcctgtcgttttcatttatttatttgtatacccccaataaatcatatcatgataatttggtttcgcgcaaaaaaaaaagttcgtcagtacaaaatgcaaatcggacggaaggaagacaagaggaagcacaaagagaaaagtagaagaagaaaagatcgaggaagataccgacccggagttgagcctcctctttcatcatctttggatcgtcgttcgctggccagaagtaatacgccagaacggcagctccaccgatggcgacgtaggttgatgtgtctgttgatccgtcagatttggacgaaacatattttgagaaatctgggagcagtccgattagatcggcaaaaagagaagatgcacatactagactttgcggccttcctgcctaattgctctcccttggctttcaacgtctctatcgtatccgactgtggcgtaggcgatgaaggaggaggaggagaaggggatccatcgcctctaaatgacctggtctgctgtttcagtatagacactcggccgattgactgctcgccgttgtgttcacaaccaaaaagtaatcaaaccaaactgatcgagttgagcaaacagacagagtgcagggaagaagtaaggcgatcgaacgcatgaatgaacggacagctggctggacgatgggctttcgaagaatcgcctgtttgataagtgtggacgacaacatgggtttgctctctttcttctttcttttcctgttgttaccgagtaagaatgcaagatttatgaggatgggggttgatatgaagagatgcagactggacgaatggacgagcgaacatcgttgaatttatatagcgtacataacgtcgagggtaagactgagagcgcgcagagagaagacgagagaacaggcgagcagagagatcacgagagacggcttgccgctgttgctaccatcatcatcatcgacatcatcgtcgacatcatcattctgtgaaatcgatcgatttcaacagattgtgtaaagcttccatgagtgcgtgtgcgttgcgctctgaacgaacggaatattggctcgaaacctttccgatcgactcctcaacgtgggaagatagggttgatcgccgatctcatgatcaaaattgtccgtctttttggagcgtcttcatcttcatcagcaccggcactgacacaatgagttcatcacccgcattcccaatgctcatgatcagattcacacttatcctcatgcattcatgcgccagctaatttgatggtgtcacaaaaacagagaaaagatggaggtaaagaaggaggaatttccctatgctcagtcagaatatcgacatgattgcccatgtaaattcgccccttagagcatttagcattcgtgcagatggtttcatcgatcgactttgaccaccggcttgaccaactctatgccttcgcttgcaccaacatcagctccgaccggaccctcaacccgttctccattcggcggcgttaggatgtggaccccatccgggtcatgtccaccttcgatcgaccgaacaaccttggcggctataccctcaaatagtttgtagctcaacgtggactgatatctctccagtaagtcaaaaccggtggtggccgcgggtatggtttgccctcctgtagggacagcagtttccctcaactcgacctcgtctgctgctcctcgacgacgactactcgcgtccagcagctcaaccagctcactctctacagggactctaccaagaaaggtcaaagactctctccgacacatttcttcacctccaccctgtccgaacaggtacgtcacatcgttacaacatggacatttgtacccagacatgttttcaatcagccctaccacaggaagagagacctttcgcgtgaacgagagagactttgatgtgtcgagtagggcgacagcttgaggcgtcgtgatgatgaccgaggtaagcttgtaagcgattggattcagatgagtcaggagtgagagatgttcgtcggatgttcctaaaaatcgagcgagcaggtaagagagagcattggcaaaggtaaagcggataaaaaaaaaacgagtcgtgggcacggctcaaactatgcaaacaactatacaagacgtacctggtggtgtgtcgattaagagataatctagctcgccccaccgaacgtcgcccaagaattgtttgatcattccttccttcttcggccctctccaaaccacagagtctctcgagctcttcagcagaaacccgacgctcatcactcccaaccgtcgagtctctccgtcggcataaacaggaacccaaccgtctgtgctttggtgtacgccttgaccgtcgagaccaagcatccggggaatcgatggcccggtcaaatcggtatccaatacgccgacgcgtttgcccaacgaatggagtgtaagtgctagctgcacagttgatgatgactttccgactcctcctttcccagaactatgttttatcgtcccccccccggaatcccgacataaaagagacacgagttcagagtctaggtcatgcatgcgttgttggcgggttgcgacaagttgagaaagctcgactcacaggacaagcaagatggatgagaccttagacagacgtcttgttataggagtcgacgtaggaggtgcttcggtcgacatggtggcagaatagatgatgattgataatggtcaatggcttgtgagtcgctcgaccgtcggtttgtcatgatggatggaatgacgcctgaggatgagaagcacaggtatttttacacgtgacttgtacacgggtggcgtcttctacggagctaccgggctgtgcttcatatctgcgctagaattgcccggacgatccattaactgtttggtactcccgcgttgctacaacgtcaaatgaaaggaaaaatagctgtcgctgatcaaacgagagtttcccttgcacagaccgctttctttcttgaatgattggaaaaggaaagacaacgaaaataattgaaaacagatgctgctagctccgagatggaaatcacactaacacgctagtctgtttcgacaacaaaatagttgactatctgctggacgagtgatcgttctgagcgggccggtttttgtcgtcactcttgaagctaaccggatatgggaccatcttgggtggttgcttttctcttggccagcaactcattgcttgattgatcggcctcttcgtttgaatgtgcggtgattaggatactacgtcaaagtcgatacctcgtctcaaacgttgcacgcagcccactctgctttcttatccgtcgtaaccgccagtatttctatctatggactttgatcccgtgtgtgtgtgtgtcgcatatcatgcactcaagataggatatggggtttccttctctgaaaagatttgatccacagtaagagagaagaagaaaaacgaatagaaatgaacaatatcaccgatgggccgaggcgtttcgaagactcaacatccagcctccaagccgcttgcacccggtaattaggcgttcaagtataccgtcctttctttgacgtcgatcgaccaaggtaatccccggcgcttcatgtcgatgtcgctacgacttttccgttcgaaattccgtttcatcctattctccttatctccctctctctgccgatctcctgattcctgtttggtggattgtcccgatcatagcccatcagcgaaagccacagcgataagagaaagaaaatcaataaaggccgtgctctctgttaatctcacggacttttttctctccttctttttaggattcgtgtgttttccttccctttttttatccttctctttctttttacccgctgcatgcttgaattaacaagctccgatgctgaccagtggcttaaagatgtcggtctttcggacaaacacaatcaccataaaactgatcttgtctgatttcttttctgaattctttcctcttccttcctcttcttttctctttcccctcacgatagtgctgacccatctggccattgcttacctgcttcggcgtttgtctctaaagccgattcaacctctgacattgttccttctcttcgtcatcgtttgcaaacaagattgatgaccatggccgagggtctttatccggttgacaacatttctggacaggaagcacctgaagcgtctcacgtaccgtcagttgaaattcccaaacgaaacttgttcaaagcctttcggtcgaataagtcaataatagaatcgacaccgatctcgacggaaccttccgacccacaccatccacccggctctgtcttttcgcagactccgagtcctacctccgagagctctttatcactcaaggcagagaacccacccatcttttccttcagaagtacaaacagtatggtccactcagttctcgtctggtcacctcgtctttctttcgcactgtatacgtcttggacgactaaatccggtgttgttctcttttggcttcatcagaggtcatccggataaaacggtgagaaacacgtaccatcttcttccgactgttcgcctagatttatctccatacagctagctcagatcgcacctcggttggtttgtgtagtgcggaacttcccggacccgcacaagataccgttgataccaaagccggagaaacagggttcagggaagacctcgacgcaacgctagccaacgttgttcctaactggaaccgaagcaacccgacaacccagtcaacctcgtcgctttcccggtctggttctctcgatggatcatataaaccggactcttcgaaaccggtcgttccgccttccccgaaaaattcagtccgttcggacgctgcatcaagtcaagagcttaccgagtcaaagataataagtcgtcagagtagccagatcacaacgacggggagttcaggtagtacagcatccctcacatctagctctgagagagccccaagctctttcaaatgggtatcagtgatgtccactccgtcgaccaaccctcgaatgttaggcccatctcaggtcccaacatttgatcctgatcatcctctcttgccaacttttggctgtcaacgatatgatttgagctcaaccatcctgctggcgactcctttgtggaagaaagaactcaacgattcagcgggcaaggtaactcacaggcagtctatacgtgctcggttttccagtaacaaagtggaatggtcggtccccgtctttctctcttctactcagtattgcctgctgacacacgccatgtcgcgcgtcttttcttgcttaataggaaaaatcgagtgctagtactaacgagctggaccgaagagctcgctgatccctccgcgacgaacaaagtccagaaagttcttctcggatacctacatctcttcaaaacaaatgcttcaacgaccagagagattggccgaatgaaacttgacgcagagtccgaggttggtcctctcgatggcgagaatccttgtgaatccgatacggacgggcggacgaacgttctgaatgttatgctaagcagacggccaaagaaagggacgaagagaacttggggagtcttgggggatacgttgacagtgcagtttgagaccgggtaagtgtcattactcgatgtatcacaggggtttctaccaagtccagacgacaatgctaatcacagccgtcgatatgtagtgctttgcttcagaactggatccacgagataaacagtttcatctttgtaaagaggtgtgtctctctgcttggcttattgaagcgcgccttgcaagtcctgatgtggtttttgtttcattttcatctcgccgctttacagagcggaatcagtcggtctgggcgagactgctcgggaatatagatcaaagcactatcctctgacgggcgatctcagccttgcgctcgccaacatctttgaaaaatcattgaagtctcttcctcggtccggtcacgataccgcagccgaatctttccgcgactctcccatccccccgatgaccagacaactttcttcctctgctgagtcgtctaatgtgtcccgaccactgtatccccaaattgtccaatccccagagttcaacgaattcggatccagaacgtcgtataaacccacaacgacaacagagatcatcactcgacctgtcctcgtcggaagttcaaaccctagagtcagtcatctggctgcctccgctactgctccgacgggtgtatcattgccatcttccaaacaatccaagacatcctgctatctcatgaacgaaccaaagacatcaggttctggttcgacaagagagcggtcttcggcgaatgactcccttgaagggtctttaagacatagtgattctatctgggcgcgcgagctagagattgaaagattgaaacgaacagagtgagttttccttctcgatcatgttggtggagttttagaaacaaccgacagacgctaactggacgcttgacgtgttgacctcagagtggagcttcgtgctgaactcgagctcgaacggttgaagagcgtggagcgacaacttcgagcggaacttatgcaggaacggaagcggaatgaaaaaagcgcgatcatccatccagaagccgtgttagacggttccaaaccgatcgagcagtgtccgtgagttcatctttcacctttctatgacctggaaaaaatacgagttcgttcgcctgctgatgttgtgagcacgcatggatgcatgtgcgccttctttcttctcaaaggtcatctgtgggcgattctgaggatagaacacccaaagtaccctccagtcgacgcgcacccggaagaaaacgatcatcggccattcagagcgaaacatcatcctactatttcgattcccaaggaggaagaagaccgtctgatgggatatcatatacgagtgaagactacgtcccttcgaccgcttcgccttctagctctattcaccgccaaacttccaaaatgtctttgagtacatgttattccggtctatccgctaaaaacacaaccaactttggagtctcgtttccttcccgggatatcgaagaaaacggagggttgccctcgaaggaggagtctctgtatcaggttccatctataagattcgctccgccaacgtctctcatttatctggatagttatagtacctctccgacatccatgggtaacgtggatgcatcatcgacaacagattccccggcacagcttcctatcaagggcctgagtttacctacagatttcaatcatatcgataggccgtacacgactacggggaatcgacagcgttcatcaagtaccaccgccaccgtcgccaggagaggatccgaccatcttggatcttcacctttatcgacaacctcaccatcgtctgctcttccagccagcaatgtcaacggttggaacgatttgtatgatgtccagtcttttccgtatcggcgatttccgtttcctcatgcgagaccgcctcctccacccggtccggcacctatgtgtagcttaccgcccctcccgcctctcctacctctctcagttcccaagacggaatagacagttttcaataaaaaagaagagaaagaaggaaaaagaagagatctaacagagattagatccttcgtactagttgtatatacccccgtttaggtaaggggaaaagattaccatgtcattgtaaatctataaagtagctttgacctctctgaaatatatggaagagacgagctttgagtgtcgaataatcgaaaggagttttaacagaatgtatagaagagaactgaaaggtcgcatgtcgatgatgaatatgagagagtacacgacaggcacaaaagaaaatgaacgtccaccaacgaggcacatcagaggtcacctcagtacgattccaaaccggcgagcttgcgtcctacttccgagagaacgggtcgttcatcgggaacttgacgaacggaccacccaggatcgttaggagcaggttctcttcgaggtcggcaggtaaacatcactggatcatgtgtctactcgtaaaaaccgttgtatgaaagcctaggtcagtctcaacaaaggaggggaaaatcagggtaagtatgagaatcattttttcttaccgaagtgagcatctggtcgatggcttccttcttcttctccctgtactcctctgagataagcgccgcgggtttgtaacaaacatagctagccaccctagggttcgtcgacaacggaatcgaaccatagtggactgttcgcgagtcccagaggatgacggacccagctggagcttcgactttatgccatgtgcaccctttctctttgatcatccactcgagcatctcgggtgtatgatgataagagtcaagtggggtccaaccttcggcaggtcgttgatgggcaaatcgatcgaagcattcgttgtagagctgtgaagaaatgtgtttgtataaaacaatagactgaaatcagatcatggtgagggcagatcacatgttttggtgagagtgacgtacctcctttgatcctctgagaaccatcagaccaccatccaaaggtccattgggagcaaggttggcgatccctgttgataagagtaatctagagatgatgagtccagaatgatgatttcacaaaatagacggaaggacttgccttgaacacagtggaagaaacgcctgttaggagatctaagggaaaagaattacgattgagccgacatcaagataaagagtcagacagtcaagctttgtttgctgaatatgaaacggaatgacaagccatcacgaagaactcactggtcgacgtgtggccagggtgaatcgagtcctttgttctgctcttcttgcaagttcagaggaacagatatattgatgccatctgatgacgtccaatgataattcaaattaccacaatagctcttatcggtcagcttttctagccttgtctgaaagaacgaaaaggagtcgtaccaaaagagacgagtagctctgatgttccccaaactgtagcaaacgtatcgatgagtcccggttcctgtctttatagatgcgccattcattaacgtccataagaagaagatatcaatcagtcattcatgatccgaccgcgtcgcccagtcggagggcaatgaaaagcatcaaaatattcacctgatatcccagagaaactgttgatgaccgactccataagccgaataaagaccgcctttgttgttgtagggtaaactcgagaggttccaagtagacggatcatccctgttgtatcccaggttgaatgattcaaggaaatcatgtgctctcgagacgtactctctcgccctatcgtccgggatgacgttgggtacgacgacccaccctggaaaaccccatcaagttttaacagatcaaccgaccaaaagattaactctcaaatctatcgaggatgtgcatgcgaacagattgatgaaatctagggaaagatgaaaagacgaacctttggagaaaagctggtctctgaaatccccatggtgaacggacgaagaccctaccgaagcggctatgtccgatggaccggcagaccctgtgagcgacaaattaccggccgctgtcccagtgctggtatcggtgttattggtggtagtagccgttgtagtagacgtagacatttcttaacaaaggcaaaccgttcagtggcgatggtcgatgaagcaaagttgtcgaaaggagaaagtggaaagacgataaagaaggacactcgtctttttgtagaagaactgttacatatctatgaatgaagggcacccgggaaaacttcggtagattaaaatttagtaaatgcccgaccgtctcaatcggtttgcttgcgatgctatttcacatcgactccatcccgtcaacatcacagtcgttacctttaatacctcaccgagaaggccgaagggatggccgtatctggatgctgggtactgagttcagcgtataagatgcatgatgtcggtcatcaactcttttggccgatagtataaatcgacagcgaactattcgaggaataaaacacagacaccatgatagacacagacttgtaaatattgaggacagacaagaattccagggagaaacagacagagggggaaaaaagagagaaatgatatttattgaaataaaaaaaatccgatcaacatggcgaggaaagagaaagagataaagaacggaaaccaatgaaagcaaatgacaagagaaaaagacaagagcggacaggaccaaggagacagaagactgctagaccaggacaaaacacgtacaccacagcagacaatacgatcggaagggatgacaaagaataagataacagaattaagtagcgaacggataatggacatgacaaaggacatggcaaggaggtactcttcaaacgtcgcagaaggtgatggtgatgaaattgccaagagaagaaaaagatataaaaaagaaacagtattgacaaccaccttcatactcgaggaagaaggttcaaatacacggcaagaagtaaagagaaagagtcaaaataaccctctagtggcccccatcgtaacggctgtcgtcaaatctcgagccatgtcccaattgggaagttctcaacgccccgcctgcaaagctgttgtacctcaaatttcttccactcccgggggcaacaaactgagcggaaccctgtcgttccctgatcttcaggttttccatctctgtagccaagtcgtgttgacctcgtctgggatgggccgaagcggaagcagctctggtcctgggaggaatttgttgctgctgcccagacagctgctgctgttgaaggtaatctgggttgtttgtcgatccgggagcggttgcagggggcgtgaaagtgccgaagtatgcgctattagccgggtcagccaacgattggattgtcggtcggtagttcggatcaaacgccgaggttggactggcgtcgaccccattaccgacgatagagcctcgaggaccagagatggaagaacccggcactcggaaaccggacgtgggcgatggtccaagaccggctccagtgggggaatggctcgatccagaatacggatccctgccgccaccaacactctgctgctgttggaaagatccaaacgacgagtcatcctctcgctgtctatcgtcgatcgaatggaagctctcctgtcggcgaccgtcggccataccggacgattgactagaagcatacgatccaaagtcaccgccggcaccgttgagcttttgaaggtactgagcatttaggtttgagttgttgaacccagcagaactgtgcccgtttatcgggttgaatccgcctaggcctcccagctgagctagcaaggccgggttaagtccgcctccgtctattccatatgagtgatcatcaatgatgacgtgtcagcatgatttcgtctgaagcaggtataacaaaagaaaacgcactgtgcatggtctgtccaccttgtcccaggccaccgagcgcacctaagccggcgaggccaccaagaccattgccgagaccgttaccaagttgtccattgagagccaataggctttgcagtacttgaggatttagcccagccaaagctcccacattgaggcctcccagaccagcagatggatcattcaacccgaatccaccaccaagtccagttaggccaccgagcgcgcccaacccattcagcgggttttggttcgctccgcgttgattgaatcctgggtttccacccacaccggcagcagcaagctgtcgaagcaaagccgcattcgccgctccccctcctgctcctgccccaactccaaggccctggagggctaaactgagttgggcggcctgcgcgggtgttaaaccgttgatgcctgagaacgcaccgagcccacccattcccagctgaccagaaccctgggtggccttgtctgttttcgttttcatgtagagaaatatatgagcgaatgctcattactcatttgtatcagaagagtgagcatgaagaacgaacattggcttcggccccaacttagtctgattcgaccgccaccaatcgggaaaccctgcatccgatcaatcgccctttcagcatctgcctttcggacgaattggacgaaaccgcatcctttcccaggaggaatcttgacctatttaatattttgtttatgaacagaagattgtcagagctgagattcgcggcgtggaattccaaacatcagaacggtttactcacataggtgatttctccaaagggaacaaagaaagtcttaagagtttcctcagagatcaaactactcagtcctccgacaaacactgttgatgttgactcgacggggacggcaccaatatcttgttgctgctgttgttgttgctgctgctgttgaaactggataaggttttgttcaaagccagagctctgctcggaggctagactctgacttggtgaatagtcttgaccattccctgtcccgtgaatagaatttgaaaaggacgaggttccagggaacgaggctggtccttgaataccactcggggaagtcgtcgacgaactagaaagagtgtgagccgtctggggcggttgttgtgaccgagcagatgtggatggcgataatttctccattgagtgtccgatcgacaaagcaggcatcgccgccggtggagaccggttagaaactggtacaggaagaattgtatccgatggttgagcccgatactcctgagtaacggacggatgagtgaacattggagatccagatgcaggcgcgggagcaggaacagagacaggagcagacaaggtagtggaggacgggacaatagagggcgagttagcag

SEQ ID NO: 423 - DNA, 17788 bp, Xanthophyllomyces dendrorhous
ctgggagacaatctcctctggggcggcggtggtggtggtgggtcggagggagaaccggcctcagcttccgaactctcggctggtcgagaaaggggtgagggtagagggtaatctgacgacgggaactgcggttgctgcggttgctgctgttgctggtaggcgaatgtcgattggtcatgtcccgacagaggaagcacaggagttcctcccctagaaagatcgctaatcgagctgcctctttggctgttactactagtgagggcgagcccaggccggttcttcgcggttgcatgggaaagccgcatcggtcgggaaagacaataaacaccctgcatgtctgcaagtgctcgtagctggtctgcttcctccgcgaatctatgagggaaagtaaacaaaattggcgagcaacgacaaacgtaagtattaaggacgcgcgtatgaacgttgctagttgagactcaccgaacaaaaccataacctctactgccaccgttctttggatccagcataatctttgcgcttctcgtacttaaaaagctctttctgggttcaccgcctgtagcgggggatctgaccggaggattgaggaacagctttacgaggtccgcttctgatacttctggtgcaagatcaccaacaaagatactaaattctttctcaagcggcaagtctgtggcctgagctggattgacagcccctgggttactggacgtggtggaggatgcggcccagttcgctttgaaaggcctgcttgaattgggcatcaagataggcgaactcggaggaacagcggtcaaggactgaagaatcttgcttgccgcttggccagtctggaggaatccacatcaaaagacaagggtgaacgtttgctcgagacaagaaatagagagagagggaaacatacgggaaaggtcaagaagcaataattgtttgcggtcggggtggatcccgactgattggatgtctgtcggatgagctgccagagcgacgacccaagaagtgtatgagtgagcggttgctgcagaaaggagaaaggatatcagacgttgttaaatagagaaacaagagtgcataccttgatagacacaacgtcccaaccgagagatgcgcccattgatctgaggtaggcttcgtccatccaactttccaactgacccaaccaaagtgttctcttctcactaggttcctttgtcaacgatggcgaggaggcggcggagccgctggcgccagaatagctaacggcggaagcagaaggggtgaactgcctgaagtcttgaggaacgaacgcagaatttgtgggagagagcgcggccggttccgatcgaagatgaggcgggagatagggtgagcccggtggcccttccgaagttccgtttgggaacgataccaactgatctttgacttcggtcgaggaggcgatagtattggtaggcaaagaaggcgagggggaagcagaggagggttcgatcgatagccgatgggactgctctttttgttgaaggaatagttgttcctgataggtggcctgttcggccttgtgtctctctaccttgtccttctgttcgtgttcgtcctgttgaggtgttatatctgatggcaaacacgcaccttcagacggggcagatggagaaggactcggttgggtgagtttgacggcgggtgtgtggtggccatcggtcgatgttccggattcaaggttatccgtgacgggtggtttacccggttgagactcttccaagagagtagacatggtgtggatgagcgaagcctctttgtttttgtttttgtgtgtgtgggagtgggtgtgagtgtgtgtatatgcgtatatgctgattatgagtgtgcctgagaagcgaacttgtggggtgtactagcaggactgaaaccaaggaaagcaaacaccgagaggataggctgtgaacaggcaaagatgggggaagcaaatatagaagaatggggacaggagaggagaatggaaaagaaggttcaagacaccaggaaacaagcgatggatatggtaaaaggagaagtattggggaggaaagcaaacgaggaacgggatggaaacagacgagacagagaaggtgaagaacaagaaaaggaggaagaagtgggagaaaaaaggagatggaagaaaagaatcgagacaagaagagaaaaagctgtcaactgaacaagaaaaagacaagaaaccatgttaagtggacaacatgcgcatatacccgacatctaggttagcagcatatacccgatttgcactctcacacatatggacacgttcgtacacacacgcacacacagggtccatccccttccggaatctcactcattcacgcacatacatccgttcgcaacgatacactctatcagatccatcatattgtaaagccccggccgcggtcagatggaaggagtagatactgatacataagaaaacacgcgtcaaaccgtatcactcaacactcgtcgcgttgtcattctcatccggacgcgcccggatccgtcaaggttgtttcacagtttcactccctgggctgaacggtggagtcaattgccgatgtaatcaactgatttttcgttcttccctctcttctttcgtagacgggcggctcttcatttgctcagacttctaatttcatgtttctcagctcttccatgtttgttttagtccgcatgtgggtctgaccttattttcttctgttttatttcattttaaatccgtcgactcgtcctgctcaactttaaaataaacaaacaaccaaagagaatatgggaaccttatcattcacgcaaatccgatctgccgatcgaaatatacgtcttatagctcgtctctcttttgatcggcctctccctggtgagcatgatcactctgctcatattcttctaccatctcactcttctttccgtcccggtcgagcttatcaatctcgaccggtccggaccggataacgctctccttggacaatcgagcggccagagaggcgacctccgagtcgtatacctcccattcgggaattcgtcgcgccctagccagctttggctccttcgtctgtgggtcctgacaaagatcgatcctaggtgtaccaatttatcaccccaagtttccatctctgtcagtgaacatcccctgtcccttttagaaaagaaaaaaggatattcgaaagaaagagaaacctacgtcttggcgtccttcaaggattcggcactacaccatgtcgcacaccacagccaagacttgtcgagcgtgtgaatcctgagctgatcctgcatgctatttggtagatcctggtccaggttggctgtggatttggggatgtgagagtatatgtaaagttagccttgtcaaccatccgatatggtcgatctagatggaatgacttgcccagcgagtttggatcctgagacagtccttgatattgtcctctcagtcgatcaccagccgcaatctgtatttctttcattcatcagttgaattcgttgagagccaaaaaaagtttctctaaagaaagaaaaataatctctcacttggcggaaccgatcgagatcgacggcgtagagcgcgctgatatgatacggtcgtcctctcaacgcttccttccagtaacctatcaagatcaaacatgcaaagatcagcgtgagctctaaactgaacaaactcaaatctgatcgggtcaataaacctctttcttcttcttccttcctctttccccgtttcactcaatcaaactcaccggtcttccagaatcggaacccttcgacttcttctctgtcatctcccatgggcgcatacgcataaggtgcaccgtgaagatcctcatccactaattccttcagatccgtccgtacgatctggtctgattttttttcgtgtgtgttccgtgtcagcctttcggtatagtgtctgtccacattcgagaccttgaagtttggatatgatacagatgtacgaaccagcgtcgacaaagatcactttgttcagatccattgggaacaatacatccaagaacaaaatcttgtaacctaaagccacgaagaaagaaagttcttgcttcatctggtcagaatcttataaaatatttcgaaagatactaaaagcagtctagaagtcaagcagaattgagacgaaccccaaatcaagcgttgcttttctttttgaccagtcaaccaactcggccacttgtaggtcacgagttcgtattcgaacccatactctttcgccaggtgaggaatgaattcctaaagaagacacagctccgaacccaatcagatctcttgtttcttcttttccttctctctcgagtacagataggcagacggtaaacaatgagatctcaccaagaatgaaggagaaaggaagttttcgatgaaccaaaactaatcccggtttgccgttataaagattaaaccttgttaacaatgagttaccctctaggtacgtttcgagaatagtgttgcattaccttcacagtactatttgtatggcgcatgacagaaatagccataatgtatgcgaaactgtagatgatcatcaaatgaaatttcgttaaacactggccctgctcgtcagataaataggttcaagatcgagacaaaccgctcgtagagtctcaacgtggaaacgaagtaaggagtgaaggctgtcagtccgatgacatgcatctcgcaaagtcaataggaaacgtcaatctcacaatccagaggcgacagtaaaaatattgatatctgcattcttcttgataggtgcaatctcatctgtcttcgatccgaacaacgatgaaattctatatgttgtcaagagagcatagagatgacagaagatgtaagaacaaacaatcagatacctgacgtatccctcgcttctccagaaatcttttgagaaatgactaaccgagacttgagggagttaaggaatgaaggcttcacatctataatctccagcacatcatccagctctttccccatcttcctcgacatctgaggatatatcgtcaggccggtcgagaagctgtagataggaacttcaggccctgtctcattcgtaggtgggctctgccatccagaagtacccacgctagccagttcgtagatctctcgaccacgtccttctcggattcgcaagctgagcactcccggatttgctttcctgacacatcaacaatgatagtagagcagacctttgcttaataatttaactcttcagaacagtcgttcactgtcgaagaatcaacccacaattgaaagtaacctaagtttgccatcacagacgtatccgccataggctgaccgtttgaatcggttaattcaatctgaagacctcttgggggggagcctgtctttgtctctcgtgcatgaccctggtagtatttacaaagaagcgtatgacgataaaaagcaatacgacttaacgaaggggtttgatctatctttacggcgtgaaacaagaatgaagaacctcttacctccacaaccagtgtcctcagctcaaagacgggttcgacatcagacgtcaaatcaataagcttcaagttgtccagatcgtggaccgactctttcggagtgaccaaccaggagggaggcgtctccactccaagtgtaaagattggttcttgaggaagattttggaagctgactcgagaacgggtttgctcactgtgtcaatcgaaacgacaccaaaagtaagtataattgccaacaacaacttaacaaagaagaacttggaatcaaggcttcttactcgtcttcaaaggtcaccttagattgcaagttaagtcggtaaaacctctttaacggggtctggaggtcgttttccaaaacaacaattcctagtttaaattatgtccttcaatacgttatttgcgaactgtgcaaaaggttcacatacctcgttcaaaacgcccgaaggcagcaggattaccttgacgtatacgaagttcatttctgaaagtacacgaagggtagttgaccatttctgggcaaactcagtggcggggtccataatggctacaattctcaacaaagcagtggccttatgaccaatttcaaatgatctattcaggaaaagggatttctgatgcatcagctttccaatcatcattatcccatgatagtataaaaattaaacacaaacgtcttgtcggaacggaagagctcgtaggcttgacttcgagtggatgcggaagcaacaccaaacatcccagggacaacatcctcggctacagcttgcgagaccgtagaagatgtgaaagcgaccaggttcgagtatgtcgtactaattaacaagcgcaggagagacaataagatctttgatcgcgagctgaacaaaccgatgatgacgggcgaagcttttctcctcaaaaagaatgcatcgttagcttaccgatcaaagacactagtattgtcatagaactcctctagcgcgtcgacaatgggttctgcccggacatgaagctcatgcctcaagagaacctcgtagtcatgtgaatcaaagatcctgttcgcatccgattttataatctgcaagaacagacgatgagacttgtaacggaaataggtggcagatagttcaagacactcacccgtccgttgactaccaaaataacttccccatcagctacatccaatcctcgtgggccaagcgcatgccgtccaccttcccagtaaactttagcagcttcatcttcaccagacggctgggtggacgactcgtggacaggagcaatctctgccttatcaattatttcaagcagcgtcgaaggagtggcggatccaaggatgggatcgtgcatcgtctcgaacaagagtgtcgatagaagtgttcttgatgacctttccagaagacgttttggcttgtgcaggaaggaaaggcggaacggagtagattgctaagatgaagaaaacacatattttgttaagttggccagtgtattgatgtgtttgtcattagtatatcagatgaaccacacacttaccatcgccactaacgcttcccagaccaatcctaatccctgctcactatcaagatcgcctgcaatccaaattgatagaggagtcttcgacgatccgtcttgatacaaagattgaagtatcactttgatgagcatgcaaaccttagatgattgattaaagttgcactcaccgggatagatccatcgttgaccaatatccgaattttcgttcacttttctcaacacgtcattcatattggccactttaagcctagattcgtcggctccttttccttcaaaaatagctccagttcttcggttggaagtctggggtaggtcgtagaagtagttcgctacttcgactgggatgccgacggtgtctgcaagatgaccagcctcaatctattgatcgaatttagctcaatttaaacaacttctaatcatgaattcagatgaaagaatacatactctttcggttaagaacaccaaatctttactaagctccacttgaagcgctcgaatccatgcttgagtctacaagcggagaaatttagttcaagattatagcgtcagaaacaaaagagacacctaaatatcacaacgtgtttgaacccacttccgtcctttcaactgctttgccattgacgaaggtgagtctaccaccatcaggtccttttagatccagtctctcgatccatttataagttgcgcgttctctcttctcatgagcctcgctgatgacttctacgaacgaaagcaagcgaggcgcattttgtcggtcaccttcgaatcccagaggttccacatattggatgaaccgggcgtagattttctctactagagttaaagagatatccggggtcggagaagattgaaccacctatcaatattcaggcatacagagaatttgaaaaatttcagtcaagtcttatcaaagatgggcatcaacatgtgagagaaaaatcggacatgggagagaaactgcatcgtcgaagcccttccgtaagtcttgacgagatgtctggtcaacctagccatcctggtagctgacgtgtttcagacattatccatttgtgtacacacacaatacaaagttcgtcaatatctacgcctgatcaattaaacaccatcggagaagttactcaccaactccggcttcgccatctaaaacttcgaccattccaaatcggatccctagtccccgattgataaactggtttacaggcccaatcaagacctccattccaaacgtggtcgataaatcgacggaaacaatgacgttcaacaaatttcgcttgagttgggggacttggccaggctgttggcgcagtagctaccagaggaaaaataattatttatgttagcagggagtgatgtccctcttacaactggggcgtttgggggataacgtaccattttaagatcagatctccatttcttatacctcgagtcagtctctaggttattccaccataacacgactccctcgactcctccgctcttttcagtcttctcgcccaagtcttggtcttctaggacgagtccctcggcctccatctccatccgatcacttgcgtcgaccaagccgtcaaaaatcgggggttctcgttgaggtaaggtgagtagactagacgcttgagatggagtcaatccgagttcggtcaaagctaacgagtgtgagatagatcgtcgaacaacgggaagtagactagaggaaagtggaagtatcagcagaagtcatcaactttagagagatgagaactacaggaatcactaactcaaaaattccttccttcccagcttggatctctttaccatcgatccagactcttccctcgacttctcgccttgacccctgccatccaacgccagcaccacccaactgctcccactgctttctgttgaaagacccttccttgatcagcgctctgttatcgggttcttttggatcaaaaggcaaccgagatagagcattggtgaacaatggaaaggactgtgacaacaactcgagcgcaactaatggcgatgggtgcgagagaataagagatgcagtggcgaaaggcaattctggattgaagcagcaatgatgatattaggaggaaacgcaagtagatatggttgaggtttcgtgtcaaaatatctctataccattctcagaaaaaatttatccaataagactcacgagtaagttcgacttcgttcaagggggttgcgttctccctccatgggtcgttaccgagcgcctcagtcaaaatcggatcctcctccgggataatccgcttctctttaatctgctcctcgttgaacacgttgtcttgtcgatcatctacgcttgaatattccatcttcttaagaaccatctccactccccatccttgaacgggcacacctttctgttttttgaccgggacgaatgtcgcttgggagcttccttccaggtcggagacaagcggaggatccattctgtatcgaaccaggagcggaagttcggggaacgactgaagtagatgtaacaagggaggaaataaggtggacgaaggtgcgaaatagagcgtaagtggaggcagggtcgaatcaatgttgagacacagcagatgatcgaaaggatacgatcgtatggttgagtttctttatgtgcaatgaaggaagaacgtcaggaatttgttcagaaccagaaatcatatgatttgagaaatctaccaacatgctctcgtcccagttgataccctccttgccctttcccagcccaagtacttcgaccgcgccgtccggtccgcatcctctctttccgttccattcgacccaagcgccacagtcattcatttctggatcaaccagcatctgatgtacgctcagtaaagcttctactgctggtgcactttctccagcggctagacccaagtcccaagctggaatttgtgaggggtgaaggtaatttggtagaagggcatgggccgcatggtagagagctgtcgagttggcagcaaggatcggaaagtcagggcgctgagagagatgagtgagtataggtaaataggcctctggagaattcaacgatgtttgttctctgccattgccgagataacacgttgtaatttcataagctcttggacctcagagcagaagatgaaccaaaaagctgaatacggacaagatggaaaacagaaacggatgatcctgccagacggtttccagttgtagattcacatgcttctgggcagcaacgacaacagtacatgtcatcaacagagctagcgacagacgcatgctttttgatagttctgtcttgtttcaatctgtcctttgcgtgatgcttcttcagctaagaaagacgggcgaacgagtcagatgagatggtcgatgaagaactgagatgacgagagtaagatgaagatgaagatggaggtggaaaaatactataatatttttgtaatgaacaccacaaaaacttgatattgtctttattacttttcatgctgttttccctccatcatccatcatctgttcaggtcagtcagcgttgtcttcctttctttttctttgtactttaccctccgaagacaacaaccgaggatgacaatttgccggggcaagcagatcctctcattccatgttggagtcaaactcgtctggattggagacggaaaagaaagacaattcacggttgtttttgctaaacacaaagattctttgtttcctttcagtctctcgaccttcattcttacatgaggtgctgcgaatctgaaaggagaggagatcttctcgtctgaggttgttgtatggagggaatctcaagtttcactctcggcctgtgggttagaaagctgaccactcacttcattctcaattcacaggtcatcgatgaaaaatgatatcatcaaacacgggttgtgttgagctaattcttgattcaatctgacgatttacgtacttgcccgcttcagatatgcaacataagagctagcaagcatgttgtttccgctcatgttgcttcccgcttatttggttcattgtttttctcataggcacggccttaagaggttcgagactactgttctcaactgttcttcaaacgccttctttgtcttttccccgtcaactattcatcaagctcatcttctcttttccgttgactgtgaggttgatctcctccacctaaacagtactcttgacctccaatccccttaccgcaattgcttgtcgcttgtttctctcagtacattcagttccctcaagcagccatcctaataaacgtcgacccttcccgcaattgatatcttcacgcgcattgtacacttattcgaatcttccaattcgaatatattccaccgtcctcccttcctcctacttgctgtgtcgtcaggtctctcccaatgcccaacggctcatcaaaagaaacttctgtcagccgagatgttggtgcatatatcctgaaaatacaaggtagaagaagcaggattgaacaatgtagagtgagcgtggtaagcaagggaacagccttcacgtttgacccgacagggctcgaaccgatcatcccggaagtttcgtcagcacgatgccagcccgatagaccgctcgggctcatatcagctccgacgggttcgacaatcgtccataaactgcacactcgatcccagaacgataatataccgatggtgtcccctatctcttcagatcgggttcagacggtatctgacgatttcaaaccaacatctacgcacttcttccaattgtcgacaaagtcttccttgggaaaaacacaaaagatcccaacgtacgcggagccaaagatgccagccacctccgacagtttcacaatgttacgaaaggtcgaacttgaaatggccaattgtagtttaagaagatcttatttgagaggccaatcgacgtatggagaaatgatgtgaaagagtctcagagggagatggggtcggtctaggtcaatcagaacagagggagagagtggttttcacatcggcctgtcgttatgttcgtttcaccactgtatctataccatgcgcgatagacacatgtattgtttagaattacaaaactcgattctatgcctctaaagtctcctcatcctgcagcttgaaaagtttcactgaattctcccaagcagcctgtgcaacctcttctaggctaatccctttgacattggcgacgacccaagcgactcttccgattccgcaaggttctagtctggatttgactgcctgaccttctttgaacttctcgggtttattcgcaggaggtgaataaagttcttgaagggcaggcgggagagattggagatgaacattggaagcgtgggaggttgttatagagcagtaaggtgcatctttcggaaggcaaacagctgggtaagcggactgtaagaaaatacgatcgctactgactataatggtctacttaccggtttcaagcaacagcttgtctaacggtagagccttgaccatatcaagaccttcttctgttttgagcgagcaaccattgatcccgatgaacaacccgagctgaatcatatcctccatctcgttctttggaccagtgaacgaatgaacgacacctcccgacggcgcccatttggcttgatgatcacgcatgatccgaagaaaatcttggtgagcagctcgagaatgaaggaagagaggaagagaatgttccgaggcgagagatagttgcagttcgaaatgagggatctgagaagagatcggcgagaaatgaagtcggtcgtagtctattctccaggattcaccaaaaccgttgatgagtgtgtaggaaacataatcgaacgatgttataacaatgaataaaaaaaagacctacctaatccacattctccgatagcgatgattcttcctttcccctttccatcccctttaccttgtcgtatcagatcacttaatctagcgagatatccttttgggtctgagtccatttcagatgctcgggtaggatgtataccagccgtcgagtatgcgcctgatcttgcaaagaaaattagtgagaacatggaccttcatgcggacatacaagcggcacatgcctaccatattcttcggctagttcgagagcttccttggattcagacagagagcctccagtaaacatcatcgttcggactcctgcctcttttgccctcagaacaaccgccttgagatcagctatgatgtatttagatattgtttcagagattggattgggtatgtgtgatcagcatcaggcgcgcatgatcacatagtcagtacgagatcagaagtatcatacaggcatgtttaacttttccatggtactttccctgaaactattcaagtaaagcggatacttcctggttcagtaatcagtgctgtatgagtcgacacaacaaggtcaagaggatatgattaggctgaaagtaccatcgagtctgttgcgttaaacgctatgtctgaggagagcgagaaacaggtagaactgattaacttgattctcgtatacgtcgtctagtctcttcccttcaacgttatgcaatcatggaaaagcttaccaaagtatctgataggagtagagaccatcttggagtgcatctatcagttagacctctgagagatgttgatggtgatagaaaataaaaataaaaataaaatatcaactgataatttagtccaaattccattccatctatcatcctacatcctacatcccgtccattcgatacccttccttcttcgtatccgtgcatcagctctgtctagcgttcttcatccttacttctaactatgacgagcatgacccgttcttcctcgacttcttccgatggatccactgtcttccctgttaaccttcctctcgcctcggcctcgcctaatgcggtcggacacgatcttccacagaacggtcagttttcgaagtcttcgtctacccttgcttctctcttcttccagacggaatcagtatactatgacggttcactgaggaaagtcgtatctagaagttcgcacgatctgattgttgtcttcttaatttcttatcgtttcttctctagcatacacgcttcaccaaacggctcagctcgaagggttgctcacgatactcagagataaggagaccggccggtaagcctcatgatgcaacgctgcagaaaccgaagccgtttaattgaaatctcatcctcaatccactatataatctttctgctatgacgaaccggtcttccttgattcgcagaggtgattttgtcttcaccgctaaccgggtaatacgactccttgtcgaggagggtaggtctatctatttcttacagcgaacggcccgacttggtctcactttccaagattctgattgtgttatgcgtttttcaaccaaattgtccctccgctacttctgtccaaaggtttaaacagtcttccagtctacccgaagcagatcacgacgccgctaggagacgtctacgctggtgtaggcttcaaaggcaaaatctgcggagtttctatcttgagagccggagaggcaatggagcagggtttgagagaggtcgccagaacggtccggctaggaaagattttgatccaaagagtaggtcgaatacttttctcttagtttcgatctctgtagtgactaggcggtccatcgtactgaaagcgctgtaaactttcttgggctgaaggatgaggagactgccgaggccaagctgttttactccaaggttcgtctacttcactgttttttatttatcttctttgaccctcgtttctcaagcttggtcttgtctgtttacagcttccagaggatatcgccgaacggcatgttcttttgctcgaccctatggtaagttggtcagtctttgccttatatcgattcacacgctgatttatttgctcttgaattttgcgcgcgtgttttgatcatagttggcaacgggagggtaagggtcttgatacaaatgtatgtggaaaacgtatgcttactctatcctctcaattttctcttcggacctgcgcgtcaaacagatcggttatcaaggctgttcaggttgtcatggagaacggtgtgccggaagagaacatcatgttcctcaacttggtctgtctcttccgcttggtcagacaacataagatgtcttcttgcctgaccgtatttttatataacttcttgtctagattgctgccccagagggtatgaaaaaggtgtgcgacctctacccaaagatgcgggtgattaccgcaaagatcgacgtaggactcaacgacgttcgtccccatattatcattctcctcttatactctccacttcaccccatagactcatcctatcatccttgtcttcttgttgggctgtcaaatctgcagaaaaagtacattgtaccaggtgtaggtccctcaatttaactctgataagtctttgctcgttccatggctcgggaagactgatgtcggttgctccttcagttgggtgattttggagatagatacttctaagcaacacatacacacacccatcacgaaaacaaaccaacacaaagatagacaagaatttggccggatacagattgctcatggcctgcagtcgtttaatcgtcttattttccgaactacctgtgattcgcaagaaattatatatgcttctgtcaatttcaaggccgtactcttgcatgagtaagaaagaagctggtacagagacgagacgagacgagactcaaacattccatccagtgatcccaaactcgtaaactgtgatccttccaaagaaatcacttcctttctcaaactcaactttccacgtagtagctccgtcttttctcacctcgtcgttcaagccgacttcttcgtccgtcggtcctacgctaaacgactgagacctattgctatccgccgggtaaaacttagcccaaggtcggaacgttttagaaggaccaggaggagaagcataggacaaggaacagtgggttcctacaaacccaccggcaaacgttatggaaaggtcggacgggatcactgcattaggaaagacaagggtgattgattgaggcaagccctataggttaggaaaaatagacaacataagacaatgtcagtatgatagagtggaggacccctctcctgccgaggaatcaacctgcttctcaagttgctcaaataggaatggaacaaaacggaggaatgaatgcagatgaagaacatacgtttgcacttgcccaacaagtttctgaatctccatccgtcaagtatttttttgaaacagatttgtccaaagtagaagaaactctttgcttgacggagagaaagaaagtacttgtcaatcggtctagtcactcacagagtgtttggattcaacgaaggaactcacctgacgactacatctggtgtgatcagaggaacagctggagatgatttagcggaagccatgttgaatgatagtacggtcatcgataagacggctagttgaagaattctaaaggcgtctgattaaacacagtttctcgttccagcccgaactccttccttcctctcctacttgtacacggctctcgctcttctggtcgaatacttctgaacatgcatatttcgatacctctagccgagcctctcaagatatctgatttaacgtattggaagtattttggaacagaaagcgttttgctccttagtctggcttacttggctcaacagaagaacacacgaccgatcaggattgggttggctggtttggcttatgtggttggatggcagctatcgggaggattcgtttttaaaggttctttagagttgtccgacaactctccttctgctttgttggccagccaaatagatgcgtgtactgatctcacggttggttgttttacgtttcatcatcatcctgaacagacccagcacatgggttctgtaattatctcgtcgggttgctcggggtttatgttcgtcttcatcagatcctcgtctagtcttctcaacttatttgaacaaccagatgcttagtgatttattgattttccacgaccgaggaatcagctcttccttctcatccctcggcttgcacttctatcagaaccctactaccatcctaccccttgccctccatcgaccacaatcgatcttctcatcaatcctcccctaactggctgggctcctactccctactttacgcctcctagaacaggtaaaaaaccgttccgatcagccgcaaaacatcttgttgtttcacttcgaaacgcttctatcttggttggaatttgtgccttagcagcgccgtacccaggattcactcaaacagaaggtttcagtttatttggggtcatgtctggacagaaggtcatttggttacctggatttattcagcctttggatgagcgatttgttgcgttgagtattaccgcgttctttggagtacgtcgttggtttctcttttcctcattctgttcgttctctttgcagagtcaattaaaaatatcattgattcatattttggaaccacagttttgcgtgtacctttttgttgaagcgctctatcatcaggctgcttctatcttgatctcgcttggatggcctgtgagctcctttggggaaatttttgaaaaaccttggatggcctcatcgtacgtttgcgcccatcttgatcttttatgtacttgacactccgcgctagctaatttcgatcagtattgtggttgattgatgaatttcttcagagtccatgaattttggggcaaacgatggcatccggtcttcacaccgacctttcatttctactcccgcctcctcccttcctctctcaagcctgtgatgatctttttgatctctgggttgattcatgacgtcggcctcttaccgctcacgaaagacacgatctatccaagttacatc

SEQ ID NO: 424 - DNA, 27415 bp, Xanthophyllomyces dendrorhous
aagttacatcaccgggttctttgtccttcaggccgtgcctttggtttcagagaggctgttcggagagatgacgggtaagagagtagggggctggtcgggtaggatttgggtttggacgtggatgattctttctggttgccgattggtggaaggatggtcaaagtgcggcgtgtccgcaagtgagtcaaagacaaaccagatcatttttcttcccaggtctgaacttcgaggctgatggatgtttctcccgctctttgttcacatctttgtttttctagaggcagtcaagacggttctggaatttatgggtctcttgcatgtccagccagaaggacctccttgatcgccttctcttatatctaatcatttctctatctgacattcatattttcttccaatcctgatgcatacactactcttgtctcgctcatgatagatatctagaatagtatatactctatagaattagaacagatattacggtcttgactgccttcgatctgtaccggaggaccggttattgtctggaaattgttaacacgcgttaccacctagataacaaaacacatgccactacatccgctgtactcttcttcttcaacaacgaaatatcatcatcaacaatcacacatacatatcccttttttttctctctctgaggtaccaagcaatctcttatgttcgctaaggctgctcagaaattaggtgtgcctgaagaacagattggggtaagtctcatcttttatattgcttcgccccaaagtgacatcatctctcctctcggaaagactcatcttgaactccttcgttttatcagtttgtcttctgcttgatagctgcttttcccttggcctctgtctacaacagacttccactgggctccgttagacatagctattccatagctgtagccgcattcttcttgattgcggtccttaagctatggtccggattctttcaacttgtgttctccatcatcggaacgtgcgtctggatacaacttttctcgaggaatcttcgtccctcatgttttcctttcgattatcagatgacttatcttttgtgttttgtgtgtgtttgggaaacacccctaccttctttcgatatcagatacctgatcgtcatctttaaccggacgaacaggatgccgtggctcgttttcgcgtatgtgtttctgattatatcgtattcctggatatgaatatacgtatcatctgcttaacaacgatttggaatgtaccttgtcagttttgtcatggttcatctaacaattaagtaagctcctatacgactgcgtacatgcctttcatgttggctggagctgatcttcaatggcgttgacgtttaatgcagccatatactccgaacgatcatcgatccttcgcttaacctgatggggattaccggagctcaaatggtacttgtaatgaagctctcgagctttgcttggaacattcatgacggtagacgaagcctttctgtatgtttctcctttgcaaacttgtagtgacactaggctccgaggctgggttctgtatgttgagcgatcttttagacatacctcatctgactgactcttatctccatcaggaactcgatgctgcccaagcggcgactaggttgacgaaggttcctgggctttggtcgttcttgggctacgccctgttctttccttccgtattgattggtccatctttcgatttcgcgttgtacgactcacatgtcaacaagaagctttccacagagtcgaataataaccaacctagtacatcgtccacttcagctcgttcagtccagacggcttctgtgactatgtcttcgatcaagcagcctgacatccggggtgatgatgatgtatcgggatctgtggcccggacaaagtcgccgagcggaaggaagagagtagcgtatgttcatttggcggttggacttgggtttctgggcgcgtatgctttgttggggtcgaaagcttcgtatcagaatactctacgaccagaatggcagagctacagttggcatttcaagtgagtagctggtcattctatctctgtcaatgtcttcgtgacctgttctgtgtcatggctggacactcaattaaagatcatgatctctccctatgttccccttaatgatagattcctgtatgtccaggcggccggattcattgctcggctaaagtattatggtgtttgggagttgagtgacggagccatgatcctctgtggttttggtttcaacggatacgaccccaagaccggacgaacaaagtggaacaaggttcgaaatatagacatcattcggatcgaaaccgcggagaactacaaggtattgtttgatagttggaacatgagaacaagcagtaattacgattttctccaactttccttaatttgacacagacagttcttgatcggttcgcattttcttttgattatcggtggcgattatgtagtttggttaagagaatcggtctacaagcgaatcaattctcatggcaaaaagcctgggtttaaaaccactctcgcaacattcaccaccagtgctttctgggtaaaatcagcgttcttcctttctgtcttttatcaagctccgggtctcacgtgatttcgtgtttctgacagcatggaactcagcctggatactatatgacttttttccacggaggtcttctcacatctcttggcaagctctttcgacgaaacgtccgacctcttctgctccctcctggaacgcctgcctctgggcatggtccgatgcctagctcatccatccctcctgcacttcgagtggttctcaagcgcgcgtatgaccttctcggttgggttgctgtgcaggcgactctgaactatatcgtctcttcgtttatgcttcttcgtctcgctgagagtattcagttttaccgtgctacaggttggttggttctctgactctgccgaggttgtcaatggacaaagaagaagaactgaaacttttggctatctttttttctttcttttcgtcgtatgcaatttcagcatggtatggggacattttgatagttggatccttcttattcttcaaacttggcggagggaagttcctcaagcgtacattcggtggtccgccttccgattccatcaagactcccaccaagacgaaatcggtactcgtcgttcatcagaacgggcagcctaatccatccatcgtgatttctccaccgccatcaatcgttgatacaaattcgagcggtacacggtatggatcgatccccttctctttgggcgaaacgtcggattttacagacctgtcagcgcctagttcaccgggcgaagaaagtggaccggaatgggcgtgggaacacaacgtcggtggcaaaggaaagacgattgcaagtgaacggacgaccgacgaaacctcggagctgtaatagaaggatctatctttatggaaatgagatagtgcattgctcggaaagcgttgacagccgtacataggccgatggatggtttgttagggttaccggcctttccggcccgggagagatttggggctaagattaccccgagaactgatggctccgagtacaaagtccaagattttactttccatttgatcttggtctttcttgtttccatttgctatcgtctgttgtgaatccataaagaagcaacatctagagatacatacaatgagccaccgagtgatcacagcgtctgaacctattcttcggtctcaatgtttgttgggtgagggtcctgtatgggatcccaaacgtggattgttatattttgttgacatccaaaaagtatgcctggctctctatctttttttttgtgggttcgtttcagatggactgaccggatatgttatatgtaattggttgaaaatcgtagggtgtgatccatacctacaacccaagtaccgaagtgcacttgaaagctcattacgaaggcttagtctgtccaactatccacctttttgcatgtatcgtatcacctatgaacctcgattgaaccgggtttcttccttccttcttctgcgtttgggttgtctcacatatcaatcttagatcggaaatatcgtcctgagaaagaatcatcctggtgttcgttagatatctttgcctgactctgactagatgtttctcttggaagtttgacatgctcatttatcaaccgaaattcagttcgtttgcgcaatcggttcttcgttgttttttgccgatccagcgtccgagccaggaaaactcgtaccattcgtgactcctgtaaaagaggatgattcgagtagggaattcatcagattcaacgatgggtatgctgatcgacagggccgatacatcactgttagtatccttagttttgaaaatctattgtccttcggagagcttggtcttcatactcttggcatacctccagtacttgcggttggatcaagctcatccgtgatgttatcttgtttcctgatctgaaataaccgtagggaacgatggatctcaaaggatcaacacctagaggagttctatattctattgaaccggacggatccattcaacaacttttggacggagtcacatgctcgaacgggactggttggacagctgatgataagacaatgtgcgcacgttctcccttctacgttcttactttatcccgtatctccagcatgtgacttgtatttgagactaatgatatgctgctcataatgatataggtactatatcgactctgggttgggcaaaattcaagcataccattatgacctctctacaggctctgtgacgaacccgcggacattcactacaaatactttcggtgacgatggtgtgtttgatgggatgtgcatggatgcagaagattgtctctgggtctgtagatggcgaagtacgtgtcctcggaatctctttgtcttcttcctgtcaataagatcgcctgtattgagttcctttctaaatacggccttgttgggggatcacacttatcaacccgaaggcaatagattggtgaagtataccccggatgggaagatagatctcgagatcaagttccccaaagcggcgaacgtgacttgttgcgtctttggtggtttgtcctttctgttgtgttgagctttctctttaatctaaatttacatctactgaccccatcaactctttgattgtaggacccaacatggacgagttatatgtaacgacggcttcttgcgctgcatctggtgaggatcatttaatcgaccaattctcagagggaggtgatctttaccgaatcaagattgatggaacgaagggtttagagaaatacaagtttgccggttagagtcggcccgaggaggaagtgtttatatcttggatgttgttattctatctcttttttctcctcgtttcgttggcttcgagtgtggatctttaaatgttgtttcctatttcagccttcctctgattgcgataaaatagaatcatcaatcatcagcacatatccatgtagtcatcatgttgtgtgggtatcagatctgcaggcgctctcatttattgattcgatcgaagtgatttgtccgttgatccgtttttgtccgaggacttttgtactcggttaattctatcgggccaaaatccaagaagtcgccaggaacaggacacaacttgttccagttactccgctcatactcacacccacccacggtatgcacccgacacgtccacatcctaatccgcttcctcagcagacacactctcgaccatccgtttatcccgtcgattcttcctgggcgggtcaatcgacaccatcgtccttgtcctcttcatttgaaggcccgcagtcgcaacaagccttctatcatccttcgcctcttgatcgatactctcatcaacactcccagcccacacagatgtatcaacaacagcaacagcaacagcagcatccacagcagcacccacagcaccagttacatcatcaacatcagcaacaaccacagcaacgacaagtttcccccgcacacgccttagttagtctggggcagaaaaggccgatgccgattaccggttcggtaaactttggatcacctcttcgcgatcaagaatcgttcgccgaacccccttatctcggtcaaatttcatcgcaacagcagcagcttcagccacagcagcatgagcaactcccgccatcgaaaaagctgaagagacaaagcagtcagacgaggatgtctccctcgccgtttgatgaagcttcgtccgacgaaggcgacgaggacgatgatggcgaaggcgaagaaggtgaagaagagagtgacgtgacagggaggagcaaaccaaaggtcaataagggaaagagaaacacggatgacaatgggagtgtggaacctgtgataggaccggatgggaagccactcaaggtcaaagccactagaggatctcggtaagtctttctgaactcctgctcttcttcacccctcctttccaatcagataaaatattagcagctgaaccaaatctttcgtttcttggaatgccgctccgttcttggttgaccatagagcatgtaccgtttgtagaaagctgaagatgagatgtttttcagaaaacggcccgccttgcaaggttcgtgagctcctcatctttttttcttcttcgaatttggatgtatagatgatgaacgccagcggcgtgtttctatgctcattccatccatccgttgccctctttcctcagagatgcgccgccagcggtcaggagtgtgtatttgaggaaagcaatcgaggaaagaagagtaccaagtatgtattttccctggcagaatatgagaatgcgtgctgattgacctatcttcccattccccatattacgcgttcagaaaacatgaagcgatggcccaatcacttcgaaagatggaacagaccctagatactgttttaagatctatccataatcccagcggtggtctcccttcaggtatggtcacgaggacgccttcccctattaacggcaccccacccatcccgactggagcaaaccctctcctcctccttcagcaacatcatcaacatcaagccggaacaccccaaccggccacctcgttaccttcaatccaatcaatggactatccggaaggttcccagggagcttctatcagatactcaggcggtctcaccaacagtgcagcctctcaggccgtactagatgggattcttaggacagcaccgagagatcaactatcaaacacacctctgccttcgacaagagaaattcatccccaatctctacccccatcttcgttacccgccccgctcagtctaggtatggcgcctggtggaagcaacagtgggtaccccggaacatatacaccttacaacagagcaccttatccttggtataagccatcttcccactcaggccctaaccaaccctctggtggaccccaacatctctcagggtctacctttccatcatctacctcgatgagctcttcattcacggacggggtgaacatgcacatgatccctcctccaagacctcattcgcctagacttcactccttacccgataattcgctcaacccgctcggcttgttggcagaggctagtctgcacaatcaccgaagacaggagcagagggcattgatgcatggggctggattgacaaatagatccgggctgttgatccgaaaccttgtttactctggaggaaccagctccaacaaccggacatcccacagcacgtcatcttcttcatctacagtaggtggaggaggtctaggagtgggaggagaatactcgaggggttcaatcgaaggagggttaggattaagcgcaaactcgtcttctgtgtctgcatttgataatgctgcttccggcatgactccggctgcgtcactcagtaaacgatcgccttccagcgacttagcctctcgtccgaatggatctttgatggcttctccactttcgagcgccggtggtgggggtggatcaggaaacgcattggccctggcgagtgtgttgagcggtacttcgagtcgaggaattggtaacggtgggaacagcgatgttcgaagcagagcgccttcacctatcgaaattgatactcaagttggcggtgaagagaatgagaacggtcagaaacctgatcggagcgagcagggtgcgagtgaagaagacgagggtgtcagggtaagaaaaggaaagaaaatcaagatcgaagaggagaaaccaactccgattggggtcgctgcttcaggatacttcaagccaggtatgtccgctttccatttctctttcgagtcgagagccgatctgcgcgcgtcgatagaactgcttgatctcaatttctttgattacgattcgaacgtccttctgtccaatatctgataggcccaatgacggttcgtatcctaagtctctatcaatttataccgagcagccttatctcaagtcaataatactcaattcgctttcatttaaattgaatttgaacagatgttacccctaaggaagataattattgagcggtcgatccgacctgaaattcttgatttcttaacaacagaagaggttgtggttagtgtttttgtttattttgcttttcagctgcatacaagtcgtcccttcaaacaagtatgaccggatagtccgcgttaatcgaatggtgtttttcgaaatttctgaataggaactatttgatatctacttcaaaaacatccatggacatgtgccggtgctggataacaactttcatacgccttcattagttgctagtcgatcgcctttcctcttgactaccagtatgtgccgtcccgttttctctcacactctgtcatccgcccctagtcactgaccgtctctctgtcataatttaaaacccttcttgctttcaagtctgttcgattgcctccaggtattacaacaatcctgaaaaaccagacttgacgaaaaagcttaatgcttgtgtccgaaaactcgcattcgagaccccttctctcggccacaaatctgttgagattgttcaggcgttccttctattgtgtagctacggccttcctgttgaacggttcgagcaggataagacgtggcttcttcttggaatgggcattcgaattgcgacagatttgaatttgcagagaaagagtgttctctcagggaagaatacggaagaggcaatgattcgagatcgcgagattgtgaatcgtgagcggacgtggttgtgagtttcatttcgcattatataaatctggaggcttgctctctattctataacttaaactcatctcttttaaattgttttgggtaatgcttggaattttagaatgtgctatattctggatcgctcgctgtcggctcagatgggtatgttctctcatttctttctagaccgcttttcgcgatgagtctactaacacttcaggtcacgcttcgaacaaataacaggtaaaccatacactatccggtccgtttgacacctcgtctctcacacacttttctgagggacacaatctttcgtaattctcttatttatttcaaacttgacgttttctttctcacagcgaggactttatcatccgaaattctgcgacgtggagagtgaacaatccgtttgccaatccgtttgatgaaggtcttctccactacgtgcatcttcaacagatattatcaagatgtctcgatcatctgtattctggcatcagcacggcttcggggttgagatccgacctggactatcctctatttttggcttcggttgaagcccagattttcatgttcgtcctctttccagatcctccgctgggcgtgttagaaacatcactcttatcattctgtctgtgccttcaatcggagatgattctataggtggctggatacttgggagtcgacattcaggtttgtctccgctatagtggttgttcggcttgaaactgagtagctttctgttgctgattttttatccggatatcttcattcgcccttcttcaaactatcagtcacactcttgctggcgtaccggaacatatgaggcatcatcttcttgcagctgcatcgagcggacggttttatttcaattgtgaggcagacattctcttgagaatttcctctcattattttatcgacttactcacatctggtcgttcaaaatttggcagatgcacttcttatggtgaattcttttggcctacaagcggcgcttgacaaatctcctatcgacgtggggaattttttcacaaaagtggctagtgcggcatcagtcagtcctttgtctgtttgaatctttctgtgatctcgtttactgataatttttgacttcaaacaatcctctaacccacatcagaacgtgattactatcgcgtaagtatctttgtcaagtcaaattactactgcgtctcatttgctaaaccgatacgagtgttggggtccctgaaattataggaaagatgatatggccgctactggccggcttcgatatgctccagattcgaatttcatcatgttaagctatgcaatcctctctctgctcaaggttagttcattgtgaatttataagaattatttatgcgcttgcgttgactgacgtgtatctcggttctataaactcgcaagcttcttcgaccggagttaactgcctacttagatactccttctcggattctcaatctcgccaatgcagccgtagaagtccttgatgagatttctgtctcgcctcatcatactcctgccatgtactcttctctcctccgatctcttctctcacctaacgagacccgacctccaactcgagcgccaagtccacttgccgccagtaatggcctcaacaaagctgatggttcagcaacaggcaacgccgagtctgtctccaacgggtttacggaggccgggatggaatgggctgtgcccagttttgccggggaagaattcggagaacctgtcaactcggacctgatgaacgcattcgaaggaatggacgattcgtggacagaggcagatggagttcacatggagagtgtctggcctggaaatggagctggactatgggattcgatgcttatgcctgtaagtttttctcttgactgcttctttttgaccgagtatttgcacttctactcttctcatcatatgttgcgaataagactgacctcaacaatttatgtgctaaaaccagggttttggagggtctacagaagtacacggtcatgcgccccctttcgcaaacggagcgacaggatttatcactccagcgttgaactctcctacacaagatcctccttcgtcgagacactaaattgtctctaacagtgtgttgctttttggattccagcgcatccccgtcttctttttctcttctctcaatcaatcattcattgcaaaggaatttagttacccgatagctcatgtttataatttattgctcgcctcgattaaatcttttctgtacccgacaagccttctcgaagaatacttgcaagacttcattttctatcagtgcagcccttgagccttcaatcgagtgcatccatgtatacttcgaccaaaacaaatctatcatcatacacgggagagaaaatgataatagtacacttatcccatgaacctgtttccacctttccagtctccaattgttggcttggtaggcttaacctcaggtataggttccggcgctggtgggggaacggcttcaccctcggttgaccaggcaacctcaacagagactcgaagtcgttcttcgaggtcaatcattgcttgttgaagctcaataccttctggtcgatgaggaaccgagattagaagatggttcaatacgggcgtgacatcggctacaagacacattacaacgaacagaaagcaggaagcaggaaatggcaaaagaacgtcaataaaggggatttcagatgatttgaaaacatgataagacgtacggattagagccttgaatttttcgactagtcgagagaaactaccaagaaggtacatctcctcgtcaaccgttccctttcggccaccagccttctttcgttcattctttcttttgctccgtttcgatgatgaagccctgaaaaaggaagaacatgaattgtcagtcatcaatttgaattggtcctactatcacaaggtgaatatagatgcgtcaaaatcatcatcgcgcacgtacttggtcattccggtcattccagtcatccgagtaagcacagtagacggagcaacagtgtatcgggtgaaagcagtcgcttgagtcgcatccgtcatcacatcgatgttctctagagctggatcatcctgcatgaagaaggcgtctgtgaaaagaaaatgagaaagtcaaaacgcgtgtcgtcaggatgaagcgatggttcaaagatatatgcgtaccaggctgttgcgttcgcaagaccttcaactcttgaagtcggtcgacctgcttctccatttgttcctcaatctccttcaagtcctccataatgacgttttgagcctcggagagaagcgggtggattgttgactgaacaagctcgggtttcttgtgaagagcagtctaagcacatccaatatagaaattggtttagtccacacgtacgcgacaaaaacgttagaagaaaaagaagacagatcaactgacaactcggtaggcctcagagaagtctcgtcctttacagaacgcatgaacggcctgatcgagattatgtccataatccaaccagattcgtccagcttcaacatttcgccctctagactccaggtagtctgattaacatagatgcgaaggagtgaatccagttaacgatacgtcaaagactcttagagtactaatagaatgtagacgcaccacaaacgttctgacacaaagacactactcgctcatcttcgaatccctcagtgaaggccaacgtgaacaactccttccagagatgagccttttcgtaagctttcatggctcgaggggtgttgagagccaaggtaaagactgtttgaataattttcaagatgagcgtaattagttagagatatgtcagcttttgcaccaagccataggagaaagaatagataacttaccgattgctgcatcactgaactctcgcttgtcgtagaggtgctctccatagacttcgtacatgacctgagtattagaacaccgatatttgagtgaacagaaccagacgtcacatgtttgatcaagaaaggccacatactttgagttgatcagcatcattagcccagatcgagatcgactctttgtgtaggtcatacttctctacgtatgccacagcctcgtcaaaccggtcaggacctagcgtgatataatgaaaagggtgtgagttgactatcttcttcaatgtacagatggcacctcggaggagaaaacctaccagctaaatgcaagttcttcaaagcacttgcacgacgttcaagatggtcatcgatacggaatcgctgatagtatcgatcgagagcccggagctccttgaggaacggaagatattcacgcggatcctggttgagacaagtaagatgaagaagaatcaggatcacgtatcaatgtatgcttcagttttgcgcacggtctctgacaaactactgaccttttgcgagaattgagcaatcatcaggacgagctggaaatcatacattccgagagcgacatcaaacaattggttgacatccgcactaagatgaatccccaaaacgttcgtgccagtcagttttcatgagtcaatctggatatgatactaagagggataagagtgacattctcacaggaaaatgacatatttgacagcatcctcgacgatcttaggatgttgacctgttcgatgaattggacgtcaagaagagtttaggatctgtccgatcaacctaacaggaatggctggtttgattagataacctacctttaagtttgtgtagtactcgaagagcctcctcgtagtctggaggcgtcttgacaacgtgagcggtagatatcgagtcgacgtatttgagcatctgcttgttgagctcaaccagcatcgcaccacagattttgttgacttttccttcgacaacaaacgaagacctgacgaggaaacaatatgatgacactttactgattaggtataatctaaatcgcctcaaatgtcatagaaaggaggaccaagaaaagaaaaggaaggacaactgacgaggatgctggaacaccaggaacaggatacatgcttcgggaaacatcctcgtttctggttacggtaaagtataaagtcagctcagttttacatccgatgaaaatcataaactgagtctgaacccgatactgacttcagtccacccaagaacaagttgatataatcaacgtcttcaatctgctcaatgaaagtgggtaagttttgcatgaacttctcaggctcatggtcgtaaaggatgttgagatcaattcgattttttcggcaagtcaggaaggcatctcggtagttgcccctacagaacggaattacgatgatgttttgttgagcaaaatcgatcttgataagaagggggtgaccagtggggacttacttggtgacgtctctccttactcccgccaacactagcggtcgagggtataccgtctctaggtttcctcttggcatttgcaaaaccaagctattactcgacgaaacgacagttacgacgatagcacccctctccaccctcctctcttcccaaaccttttcttgttcgctcacgatgtatccaccgtccaggatcctcgttaaaatcgtcaatggggcatacttagattcatgagtagtggtagtgtaaataaggtaatcggctgaaagcccgaaggatgtgctattactcgcgattgaatagacttcggaggaaacaggtgtcattgcaaaaagcttgccaaggggagagagcgcgatgaggagagtggttgattcatgagtgacgaggcgaagagtcgggcaaaaggtaggtaggaaagactggaacggcatgagatcaccgtcaaaggagacttaatcatgtgttcgtttcaccacatgcatactcgttagtctagctctaagtgatcaatgataataggctgtgagccaaactcactggctgagacttgtccggtcttgtcctccaggataaatccgtcgattccagcgataagtttgcccataccactcgatcccactgatactgtctgccattcttcctctttgtcttgtttgatccaaacggagtctctgctctctttagcatcccatcctaagacagcgatggccttcttttcgtcttcccagaccaaggcgacttgacgagctcttacttcttctggaagcgagaaggagatgacaggctcgatcacctgcgctcgaccagggacacttcgatctaactttgttcgaacagaatgaagctcaatcgcaccggaaggatacaactgagcaaggatgtcttgggcgggggagtatgcgacgtgaataggagggatgcactttcgggaatccatctcgtgagagttgatgatcttgttgctggacatgggaggtgggacgttctgggtgcggaagggagtaatcaaaagagaggcgccgtcgacaacagagaccatcccagtatcgttcggagcaggtatcacagatccatatgtatcccaaatgaaggatcgaatctcgagcgagtcaggggtcaaagtggcgatcttgaaaggctcttccggatgccattgaaccgaggtgaacctggtcgtgtgaagagaaagagaggtgatctcttgcttgagataccagtggtagttgtttctcgtccaaatctggacaacatctccctcattatcgtccccctcgatccaaacagataacaagctgctatcgcagttccagccgagctctctgactctgtaagcccatcctcggccctctccgtccctcttcttaccggctacctctcgaagttcgaattccccatgtctcaacccgttcctctcgaaaaacacgacgtcatgccttccctctctaccttcacctgcaccttcaaatgtaccgaatcgctgagtggaggcgatcagactacctgacggctgccatgccaactgatgttccaacccagagatcgcctctgatgtcgactgaagggcggccattcgagaataagttcgaatcactcgacgcgccgcgttggatgaagtcgggtccagagtagagatggcgaaatgagcgccatcgcctctccaagagattcgaggcgtttcatcgtcatcaggagtgcacgcgttcttttcggaagagacatttgtctttggttgttgggcggctgctttgccggctgacccatgaaactgggtttccttcgatccccaaccgacgttaattgctttgtctgtgaatacatgcgaagcaaaaatgagtacagagtttctgaggacccagataaaaattattttgtctgtccgtagggggcaatgaattatatgcactcaccttctccaaaatccttcgatcgcaaagggctatcagccaaaacatcaaagtctttggtcatctgcagtaacttgtcatcacccgtgatgacgatcaagagttcctcatctggactccattctgcagctttgatcccagcgtcgacgacaccgacgacctccagttgctgcagagacgatgggattgcccatgacgtatttctcgtcagtcttctagaaggacaagagagaaagtcgacaacagatgaacgtacagaatccccagtgaggtcatacgagatgagctctccgctggccaaaatgacacaaagactctgagattctcccaagtactctatacacaggacctgcttagccagatgagggaatcgatgcttggctgaaggggacggattggcgatataagtggcaagctattgcaccggattaaggaaggaggaggaaagaccaaacagaaagggacatgagcgtttgtcgctcatattcgtttagaacctatccttgatgattgctcagaacatcaacgtacactcaaaacgtctgattcactgggcccttcaatagcgaccaattcaagctctatcgacccttgaggctgagccgattcaacagccacatagatcgcgccggtctctgggttgaacgcacaagaagaagacctcgagtccggagctgctgacggaagcttgcgagctattgatgagaggcaagccaaggatctcatggtggttgatcgtgagtgagggtccaatcgtgataggcctaggatgaacgaatggagagaaagcgagttcccaaaaaagttaacacttgagtataatatttgaatatcttaggtaccagataacctgctgactaatcattggtccatcccacttaccctcatcatgttccacctggccggatctcatctgtccacagtctcacccaccttgtccatctcactcaccttaccttctttgaaatctcgttccgactcatggcatcctggctatttgccccatccccattcgatatcttggtggacaaggcaacgtcgccatccatacctatcggcacccaggatatcgttactaatctggagattgctgatgagatcagagcaaagacaatccagcccaagcaggctgtggccagtttgaagaggaagcttggggacaagaatccgaatgttcagatgctggctctcaaagtatgtctccttagaacttctttctgtgcactgttgtttgtccatgggtagttcaagtggcggtatggctgagcggtcgtgggtgtggacacactgtgccgctctgataccgtcctcgaatgcggtggccgcgtcttttgttcgttctgactgtgtgaaactgttcattcgactcttattagcttaccgactcgtgtataaagaatggtggagatcaatttctgagtgaagttgccagtaaagactttatcgataatctggtgtctgtcttacgaatacaggtatacctctgctcacgcgtggcttcagaccaattatatacaccattctgaccgatgcttatttgtgtaccgtgactggcccttggatccatcatcattcagactgtcaatcacgaagtcaagaaaatcggattagacttcttccagcagtgggcacttgcttttcagtctaaacccgaacttagttatgtgtatgaagtttataagagcatgaaacaagatggtacgtgtccgcccctgatgggtcatcaggatcctagcctttgatcactcaacttttctcttgtcgtgacatctcttctgtgttcataggcatcaacttcccttctcctcctacctcaatcccaaccgcgctcctttcaacctcgaccgctccgacctggatcgactctgaagtttgccttcggtgtcgaaccgccttttcattcacaaaccgaaagcatcactgtcggaattgtggtaaggtgtttgaccagcagtgctcatctcactcgatgccgcttccttggttcggaatcaccgacgaagttcgggtctgcgacgggtgttggtcaaagtctaagacgggtggtttagccaaggaagctgtgaagcaacaacagaaggcacctcaaatacctggcaagtcggctgctcccaggagtagggccgacaaggagaacgaagaccttcagagagcgattgctctctcattggcggaatctagttcgagttcgagaactgggtttgttcccgcagaaccgtatggtgcaatgagtgagccgccacttcgaggaaaagatggtcggagacttgaaggaaacgactcaaatcgtcatgcagcacaagagaacgacgaggatgatccggatctattggctgcgattgaggccacgctcagagatatgagagacgctccatctgcaccggctggtattccttcggaagacgtcgaaaacactagagcaattcgacatggggtgaacggaccgatcggaccaagagaatgggagttaagtcctagagaggaagacgcaattctaacattctcgcaaactgtcgaacaggctagtcgactaggcgaacgagatttgagaaggtggggaaacgaaggggaattatgggggaaagcaagagacatgagtggtaaggttggacacggggttcgggttcttgaagagcgccaaagtgagtgttcagctttcatcatactatcaattcattcgaaagactcacaaacgttagaaagctgacatggtcaaatatctatattctttacttcttctcgttcaaagacactttgttcaacatgcaaaccaaactttcctctgccgtcaagctctatgatcagcttctgactgatcaacaagcttatgctgagcgtcaacggacactgcaccaagcctctccataccctcagccatatcttcagcatcaacagcaaccgccatatggctaccctatgcatcctcaaacagctcaacctggttggctacctgctcacgagccatcttctactttggcaccctatcccggctggaatccgtctcaaccaagcatgtatccttcatacaaccaatatagtcctgctcagccgacgcatcatgtagcagtaccccaatcgccgaccggctacgctcctccggctccttggcaacagcaacacccacaacaacaagcctcgagtctgtattctaaccagacgtcttcatatcctcaacaactctcggcgaattctccatatccacctcaacctacttcgccatacccccagcatgtaccatcatccccgacggtcgcttcaacgaatctgtctaagccagtccatgcacaacctcctccagcatcatatccccaaatggctccgcccgaaccagactttgcacctcctagtgtcgttccttcacacgcttatggaccatctgaaacacaacatatacagtcacagcaatcattcgccacagcaccggtagaagaaggatcagcaccatcgttcccttcagagtcccaaagctccaacccttgggatcaatctgaaccccgggttctctgctcttctcctgatcaaacatacccggctcagcctccgacaattcaatcgaaagcttcgccacgccagcagtccatgccagctccatcgttcccgaccgtacctagtcaaccttttgagccatttcctaatgtgccacaaggagaattcacacatttacctacagaggaagaacatcgaaaagaaaattccgcaccagaagaaggtttgctgattgctctttgagaaaaagacggtagaacgcattttctcgctcttgtctttcctttgtataagcttggaagtctgtcttccttgttgtatcttatgtacgaatttctcttgcttctcgggtctacaattgatgagtgtttgtcgaaacaaatttcaagttaatgaggttcaattcccatcccccccgccgctcgtacaaagcaagaacattctcatggtaaagtagttgggtatttggtaacgatcgaaatattagaatagataatttataggtaagcttaattgcgagggcgtcgagatgacaagttctatttccaatgtttgatcaagagcagtaaggactttccgcgtcagaatcaaatgcagaataaattgaggagtagagagacctacaatttgtttgacccagccagtgattcgttggtccatctccggatcttcctcctcgagattatacacgactgactgatcttcttcacctaacacttcatcctcatcagaaccttcatcagaatcgtcgatcggttgatttcgacttatacttttggccttagcagctgcaagcgcttgatgataggtttgttcgagctcagcagaacgaagagcgaggtactcttccgttcgggcgtgttcttgagctcgttcgtccaagacagaaggagtcaggggttgtagcttccgaggctggaccctcgagttataatagtagtatctcctgttttgagaatcgaccagataagcgaaagatctcagatcatgctgcacgcagttatctttctggagaaagataacgaaccttccaggtccaacctcaatctcttcctcgaaccgaaaggagacgtccgtatcgtcttcgtcgctatctccatcttcgtctgtatatgatgaattctgagatgacgtgtccagctcgtcacagtttgggattggcgagttgaggaacttgactgcagtccctggtgcgagttcagttgcaaaagacatggcgctgatcgtagtcatatttttcttttgattgtagagcagggtgtttgttctgattgagagtgagtagagtattctgaacaaaaaccgtcatcaaggctttcctttttatctgaaaagtatcatgttcgtggtcaagatcgactcgggacaacagatgtgtatggagggtgtcgtggttttgtcaaaaggcgacgtggcctcggttaactccgattttatctaggattatgtaagtattttacttgaacatgtggtgtcagggttcgggttccgaagggtgacggagaggttacgaaggttgcaatcagatggggaaatgaagctgataaggaggaagtacaggctctctggctttagtgattataacgagggcgcaaggcggggagattgaaagaacaagattcatatgacactggaaacaagaatactaggaacccaaggagtgacaaaggatttaggcttgaatagctgtactatcggtggcaaagaagcgacgtcttgtaaactatcctcagacttcaatggttaggctcaacagaacagatcatagaaggtgctagaagtgtctgcgctgcaagactgttttcctgcaagttgttgcaacgagaaagcataagcaggaacgaagcaggagatgaaacagaagtaggagaaggttcccgggagtgacactcaggtcacattccagagatgtagacacttcttaggggtatcttgtacaggatcatacttatttgtataaacaatatgagtgttttcaagcatataggtaggtttgaattatgggtcataacatcatgagtagcagatgagcaagaacaatggttaaagaagatacattctttgccgtatatttcatatttttacagccatataattaatttctgatttagggatctcttgttgacattctcgagcttggatcatcctgaagctgctttaattcctttaacgaatccctcatttgcctgagaacatcagcctccattctcagctcgtaaagacctttgctctttgatgactttggtatcgatgaatcgcttagccctaagagaggagcgcttgaaaacggggttgctggtagttggcctttaggtggaggctggaagtctgaaggaagaggtaaggagtgagtgagccggagatggtgaacagttgatcgtagaaccagttgaacatcctatcaggttgaatcatcaccagcgaataggatggtacaacgaaagacaaaggcggcggcgaaaaggaagattgacacgacacaaattcaagaagaaaggttgtcagatagttaaaactaaaaacaatcggaatgactttgacaaagacggacaaacatcgatctcttggtagaatgatttggccagatacacaaatcgttcctcctcattcatgattgagccatcctcgttcgacatcggaggatcatccggattcggcggaagaagagtaaggagtgaccgagagatgagatcgagaagaccggctatcttctgtaagagttcagtagtcaaatgttagcctagatgatacgttagtagcgtttgagtatcgcagatcaagagaggtagttcaagacggagggagcctgatagaggaaagggtgatatgtgacctaaacgcacttggtcagtttcaaataacgatcggatctggctagatgatgagagtggagttgttgtagacatccttgttgtctttggcgtgagaaggtgaggcagaagagcaaggtaaagaaggaagatagcctagatggatgaaatgaatgaggtttacacaaggcgataattgctgtgattagattacacgtgactatgtatgtgattaggtaaacatacggtgaatagttcactgaggtgactaacgatgatgctcgtttgaccgccgggccggtaaaacgctaaaatatgcagccgggagacatggtgacaaacgtttgatcaatactgaactttcggtcacctttccaggtgttctgtactccattgaatcgcatggaaaagatggaatgacaaacctgaccttctggggttccgctccatagagtcgtgcttgaaatgaacgcacttggaatcagattggaggcgtctttcgtgaccattagtctgaggatacctggtgatatataagcatgctccatcgatgtggtcttttctcttttaactcttgttgtaatttcttcaatcaaaatgctcagatccgtatacatactacccctagcattccttatcgccaacttctcagtcatctcacaggcagctccgttggtttccagacaaatcaatgcactctcacgagatccctcggtcgcagaccaaaaggagtttgattatatcgtcatcggtggtggcctggctggactaacggtcgcgaatagattgtcagaagatgccaatgtgactgtacgtacttggttggtggtatgtctctatgtggcttgaatttgtcatgttcaactttgatttgcctctttgaacatcatcataggttcttgtaattgaagctggtcgagatgaccgcactgatggcagggtatataacagtaaatatgactgacttcattctgcccgaaacagaaaaggcgtaattgctgacttagtatgtgtgatcatcatctctagtcgcaaactatggtcaattttatggaaccgacctcgattggagctggaagacgactgcgggaaaagcaattggtggtggaaagaccctaggaggatcaagttctatcaatggcgcccactatactcggggtgaaaaagcccagtatgatacttggggaagcctcattcctaacagcacttggaattgggacaccgcttttaagtacatgaagaaggtacgctgagtttttgttgctatctatgacccagcgagaagcgcacatgagggcttacttgatcatttatgtcctcatttaggctgagcgcatctatcctccaaatgacgatcaaagagctgctggcgcaaactataaccctgaataccacggtaccagtggaccccttgaggtcactttccctcaatacatgtataaaggtcctggtcagcctaacttcaacaagacaatttccgaatcttttggagttccttgtacgttgcactttccttgctatcttttcttgaaagcaaagaccgttcaatctcattcaaattaccattcagattcgcccgacttgaatggtggcagtgcagccgtagtttccttcactctcactgtttgtcttgcctttttccattcttcatattctcctcgcctgcgcacattgaattgaccttacttttgatgacaacatctcacagacactcaatccagactccaactacgaacgatcatcttcggcttcggcatacttctcgcctatcgagcatgtccgagacaacattgtggttctcattgaacatcaagtcagtatttccatcagcctttctttaatcatagtacaaacgatgtgaggtggaagttcatttgttgatatgttgtttgacctctatatttctgaaaatcacaaaggctgttaacattgaattgtcttctgaaggcagcgacactgtcaaggctacaggagtcaacttcaaatcgaccacaggtggaacctccagtgataactatcttgccctggccaaacgagaggtgattgtcgcgtccggtgctatccaggtaggtttctttggtagacttttgctgacgcaagtcgttctgctctacagctcctgattcttctctgtatttcttgttcatcgtttcgatagtcaccagctctactgcagtattccggaattggaccggcttctgttcttgaatcggctggcgtgactgtccaagtcgatctcccaggtgttggtaaaaacttgaacgagcagacatccaccgtacttggttacaccccggatgatggggtcgaattcgatggaagtggtccttccgataatatcgctttcccttctttcaaagcggtaagttcaccatcattatttttcaatattgtatttttcggaagatcttcagctctcaacatcttctgttcaattcctacggcttagctcttcccgaatgattcggactctgttgcttctgaccttcaaggcaaaatttctcaatacgcggctgacgccctgaatgcgggtgccatcgtttctcagtcagctggagaaactttgtttgatgcccaacgaaaactgattgttgagggaggtgctggtctggctgagcttttcttcgattctggatgtgagtcaatacatcttcttttcaattctgagtgcatcacgcgcttctggcctgaaatttctggattctatttcggtctggttcatttcggtaaagtcccaaacggcgggtttggattggacacttggggccttcttcctttctcacgaggaactgtggaaattactgtgagtgtagatgcagctacttggacgttcttttccaatgaccatcaaccagttcatagtgactgatctcttataatttcttctccctctgtcaatgaaatccctagtcgaacgactctttcacacctcccaaagttgatgctcggtactttgcggtcgactttgacaagacagtacagatcgcagcgatgaggctcggtcgacaggtattccaaactagtccactgagtcaatatgtcagtggcgagaattcgccaggattggataccgtgcctgataattccgagcatggttcatctgacgattggagtaaatggatcgacgactcctgtaagcccaaatacttgttttggatcatcggcagtagtaaaaatgtcgctcagacgatgtgacaggagaaagctaacctttctttcgttttttgacttgttgatggttaatatgaaagttgggtcggtatcacatccgattgcgacttgcgcaatgatgactcgagagttaggaggtgtggtcgatgattcattactcgtgtatggaacttccaacatccgtgttgtcgatgcttccgtcattccccttcaggtttgtgtttcgctgcttgcaatctttttttctccctctgattaaaatctagattgcgacatgctgacggctctgtatcattcatgatgatgatgtgaatatcaaatagctttctgcacatctatcggcttctgtgtacggggtggctgagtatgcggctgaccaaattaaagtatgcaaatttcacacactgtcgtttgaattgttctcagatcttgatactaactgcctggcctttcctcatgcgtgtgaccactccttccaggcttcacaataatcgctcaagagtatatctagttttcataggatctttgtatcatctcctcttttgatgttctctgttataaaatatggtatcaaacacttttctcttctgatttgtatgtatgagaaagaagattattcgaaagatacattgattctgatctgttacagtaggagctaacgcaacccaattggatacgagattccttgaatgcgctttatatgctcaagatagtttagtctgtgaaagagacaaaaaggaaaccgttctgaatgtcagtttcgcaggaggagcatgtgacttttacaatgtcttatgaagagttacgaacagttcatgttctagaaattgttgatccgtttcgatcgcccaagagaagatagtcagcatataacttcatgtatagtttgaagaaacatactccaaagagactcaatcttacctcgatggcctggcgcttggcttgtcgcttggcctcctccttgtcgtaagcgtccaaacccttggtctcgaacaacttgtcaacctcagcaccagccaaagcagccaggatctccttggctcgagcgtggttctcgggctaaatcgtccaaaagaaaagtcggtattcatccgaaagaaacaagaaatgttagtgacaaagcgagggactgcgcgcagagagatgagcgttgacgcacctttccgttctgcctctcgtggttttcgtaagccttcatggcctcgaaagcagcagcaccaccgatcaactcgtgagacaaagagctcttgtgatcctcgttgttggggtcaacgttgtaaacctctaaggttgacaaaggtgggtgagatggcgcccgatgagatgggacattcatcatgtgagatggatgatcagtttggagttaaagacatcaaaggagattgacctcgacactcacggtccttggcgtctcgagagaagaatcccatgattgtgatttatgtgtctgttggaaggttgggtgaggagttagtgaagtagatgtgggtagtaagctgaaagagcgaatgagatgggggaaggaaggaatcgaaacgatatggagcatgttcggtcgaggtattttatacc

SEQ ID NO: 425 - DNA, 533 bp, Xanthophyllomyces dendrorhous
attttataccattctcgcatgtgaaagaagggacgctgacgaaatgctaaatataaaattgaacatgtataaataaggagaccgatttaaggtgtgtgttgctgtgtaagccgctgctgtggccgacggcgatggaacattcgaaagccggttctttcgggagcaagcttgtcaacaaaccatccgaggtcacgaacggcaagcaaagagaacaaaggcaatcacagcaatcccaacgacgacagagttgtaacaggcgtcaaaggcgatgctgtacatccgatagaccacaagcctacagatgtggtgctgtgaaggctgtgactgcgatggtgtctatgacaacgacatatgatttcttgttttctttcttccttgtacaatacttggtccgaggctattttttgttcattctttcttactgaagatggggatcaaacaaacccaaacgtttctaaccctgaacggcgagaaacgaaactttgatccttttgtgttctaaaactacactacacacacacacacacacacac

SEQ ID NO: 426 - DNA, 77978 bp, Xanthophyllomyces dendrorhous
acacacacacacacacacacacgtcaaaaccaatcacagccgcactctaacgtcatcgtcagctcatcagtcctcatccatatcttccaaacacatcatctggaaggactcgacggaacgaattcagaaggcaaaaaaaaaggagaaagcgaaaaagagacatcacaccgatcagcaaatacacttcgtcgcacgaatcacactagacaaacgagaacgaacagaaaactccacgattccatcgttgatctcgcccatcttgcgacgttctttaatctctctcctccggagtcgttcttcttcgttcatcacaccagtggtctccaaaggaatcgtagatggtaccatacactatagaaccgggaatgagaggaatgaagaagaaatattagtcacatctctgcaaaggaaacacaaggaaagaaatggagagtcaaacacttgcctgcatgaaaaaaaccccagacgtatcgagttggatggatactctggcagatacagtgattgcgcgaagcgcacggagtagcaagctctttcgatacctttcatgtccaagcgacgggccaacagaatctgctttagtacgtgtctctcgtgaacagagactgtaaacgcacatacgtttgtctaatcgattcagtccgctgaaagagcaaacacaacggttgagagtttttgaagtccatctgtgagagccaacatcgtaagtttcgacagagaagctaagaagatggatagagcctatcagcttacttggacacctccccatgtactgtccgcctcgatccggaagtccacacctgggtctttcgacttgccacttttgcccgcataatcagtttcgggcacaatggacatgaaggtcactttatctgtcgacgcgtccaacgaagagagtgcatctcgaagccaggatgcccgacaaatgatgtggagcgagctgtcgatccaaatgatacgtgagaccagacaaattgatccaatagatatactcagcatgttgagtgcactcaatcagaatttagaccccgattgacacgtacgattcatcaggtggtgacagatcgatattgtccgccagatctgtctctgatgttgacagactacacactgttgtaggcgctgactcgctcgattcgtcctttctgaggagaaaccccattgtccggaacaaggaaacaaagaatgacaagatcaggtgcgattcaaaggtcacacaattccgacgatctaacacactcacaacacaagttccagaggttcccccggtcctgcccaactgattctccctgccgtgattctgacacctttggcctccccactcatcagatccttcttccttccaggaaaatcatcttcactgtccccatcgtccctggatttacctttcttggtctcatccgatccacctgtgctcgatccgaccgttccgaagatactcaaacactcaatcagatgggtcaagttgatttcgagcgcggcatctggtagaggaggtggcgatgagctatcttggctcttcaaaggagtctgatccagatcggaagaaggcggcggattgaaagtatacgtcgtgaagacattgttggggatatatgcggtgcctgaggttgatgtatgcgctcacttcaacaaaaacggtcaagtcgacaagatggacacttgagctacaggactcactcttcagcgtacgcgcttcctcaacggtgatgcttagtccagcttcgctgatgatgaccttgacgcgctataaagtcaataaaaaccgatatgatatctcaggatcagtcaagggctgagcacatgaaacaaagatgaagaacagcaagagaacgagtagaacctgttggaatgcaacgcatctcaagagagttgtaaagtgccggacatcgttcaaagtggctatgagaacctgttcttgatgacaacacaaacacatcagctcaagacgagatcatattgatatacacaagatgtatcctcacatgctgtttatcgttctccatctcacctgtccgtgtctctggagatcgcttggtgtgttgatgtgttgatgtgttgatgccagatgtgaatcgcggtgggaattatctaccgcctgcgattcagcaacgtcaccatcaattaacatctcgctcgccttgttactttcttattcactttttcttcctcgaccgtgtcttcaacaaggatacactctgatcctcttgccggaaaccctccgatggcttcagataaccaaccaagctcgcttcatcaacgtaaagggcagactcagcctgagcgggccgctctcaaagaggagcatgtcgaggcggagattcccgtacgtcggtttgcgctatcagatccgatcatctctgatcttcttcgtcatggtgtcgctgaagagcacactgacatcagataggctttgtctgtcactttcaaccgctcagtcacctaggtcccctctgaggagtctcatacgaaattcaatcatctctctctgtctgggttactttgctatccgaggctacgaggtcagcgttcttttctctctttgcaaagatcattctcttctatatggttcacaaacggactgctgttcaacggttttttttgcctttcaccctgaatacagactttctttccgacgacctctgaagaccttctaggagtcccggcttactttcaaacagagccctcatttcccgcaccggttctcacagcagacgttgagaaacgagatgccatcaaggaagctttcctggttggtccgtcattacaccatgctcctgaaaggccgaggaaactgacacacctctccgggtcttcatggtgcctgaccgtcgcgtacatatcttattatacgcaaatctagcattcatggcatgcttacgaacgagacgcctgggggaacgatgattatcatccaatctcacgaaaaggggacaacatatctgagtctggaggcatcggcgtaaggtctttatttcatcagcgtctctttcaaagtcttttttactgattaacgtgtttcgacgtcgatctgagtagtacacaatcattgatacattagataccttattggtcatgggattgtgagtagcaatacagtctagccatgcattgcatatgacaggcaattcaatccttattgacttctttcttgcatatatacttcactttttctttttccttttttttaattaaaaaaaaaggacggaagaatacgagcgtgctagagattgggtggcgaactcgctaacgtttgacgtggacgttgagttcaacgcttttgaggttagcatgcagctcatttcttaagttcgatattcatacagaaactgatacctttcattctgcctaactttccaatcgactcttcaagctaacaatacgtctgctaggcggtcttctctcggcacatcatctctcccccaacccagcggatgctgcactatacttaacccacgcaaaagacctcgccgatcggttgttgacgacgttcgagacgccttctggaattcctctttctaaagttaacctgaagaagcggaaaggactcccagacttggacaatagaggcgcagcgtcattggcggaggttggaagtatgcagctcgagatgaagtacctgagtgagcttacaggcgacagaatatactgggataaagttgagagggtcatggatgtcatcagaaacgagccaagcatggagggcttatatcctatcctcttaaggttcgttttctcccttcaagcatgtcaagcggctacttttagttgtgctagctaacctgttccggttctctgttctttattcagtaccgaaacgggtgggtttttcgctagtgagattcgactaggttctaggggagattcttattatgaagtaaggtcctgccttgtttcatttttttttcaataacattgatatctgacgacatacccaacgcctacgcataaataacagtatctcatcaaacaatatctacagacggtcagtttgattgactgtgtcattactcaacccgcgctactgtcgttgcgcctcgcctcgaatctttgactgatcttataaattctgggatatcaaggatggacacgagcccgtctaccgacagatgtatgatggcgcaatgcagggcatcaagcacaagttaatctacaagaccaaagctagccaactattgtatacagccgagcttggaatggtccgggatccgaagactggacaacagtgcgttctttcgccatcatgttacacaattttatattctcttaccttcgttctatataaaaccagaacctggagggtgaatccaaaacaggaccatttagtgtgcttcctcggaggttctttgcttctaggtgtcaccgaagctaggctatcagttcctccgaacctgaacgagttctcacaagccgatatggaggattggatcactggaaccgagctcatcaagacctgtgtagagacctacaacacgaagacgtgcgtgatctctaaattcatatctacctcacatatcttatagagagatagagagacaaatcgatacgacgatatgttcagctaacggagacttgatgttcgacagaggattggctccagaaatcgcgttcttttacaatgaacaacagccggaaagtgcgatgcaagattggtacatcaaaaagtctaggttagtaatccttttagttcagggggcgaaataaccctctttgcaacttttgaatgtgacaaaatccgtatattgatctcctcaaacatcgtcggggttcgatcttgttcacagcgcggaaagacctttgatcgatgctcgaaacatccttcgacctgaaacagttgaatccctgttcctagccttcagattgactggagacccaacttatcgagaacacggctggaagagtaagcatgattcccacctcttccctcttctctcagtcctgtccaagcctatattattttaaatcctgactgatctctcaatctgtgtactatgttatctccgctcgttttgtaagtcttccaagcattccaagagcattgccgaatagagactggtggttacgtctcggtgttagacgtgaatcaagtcccggtcgagcatgaagatcggatggaaactttctggttgagcgaaacgcttagtacgtctctagtccttcctggtgtctttttattctgtgtcattctctcaacatattttcgactcgtttgctgatgattggcgcaacatttgggacttgacagaatacttgtacttattgttctcggacgctgatgtcatccctctacgagacaacgtgttcaacaccgaagctcagtacgtaccgcgactcgatgtccgaacgttttctcaaaagaagatgacgcatcgcttctcatgctcttgtgctgacctttccttttctcaccctgttcgtgtacgcatggatgaagtatccttcctgtgttcaagccgacagtgaaacatgatatctagtcgttcgggcattcaattataataaaagcttggtgaaaacatgtattttctctgcattttgcacgtaaacgtcgaattgacagaccaacaggaattcataagagtgtcgtggaccaatagtgaggtacaaataagaaaacatacaatcaggggatatacaaaacgatgagttccacctctgttcaaacaacccgaccacagaaaatagcacaaaactaaaaggacaaatttagatcggaagacagaagatggaaataaaacagttagaaaaaaacgatgaaaatgaagtgattgtaaaacaaagattaaagtgtcaaaagcaagaccccgaaaaccatctactccgacccaagcccaaacccaagggctctcttccaattatcctctgacaagtctcggacccgattactctccatctccacctttgattccttatggtcctctgcaatcgcttgtgtattaagcatggtagaaagcattgtttttgacaactccgttgcagtagaagtcatcgtctctgcgtctacttcttcaattgcagcctgaataatttcctcatcatcctgaacgagactttgccatctatccagaacaattctcgcctggctgatctctccgccccgagcaaggctgtcgctcagtttgagcgtgcttgatcgattcggaaccagattcaacttgatcgcatgttgaaacgactcgagagccgccatcggtttcccaagttgacagagtgcttccataaagtaggcaaaagtggattcgtccggttgaagagactctcggatgatcattgtgtgaaacaaggtagtcgcccgaaccatggcgatctcgggttcgaggggctcaaacgtgtcgaatagttcaatcaaccagctaggcccttgtcgaaccccaagatgcattcggagaaggatgttgaacgtctctgtatctggttttggaccatgattcatcattactgtgaactcagctacggcgcgtgagacattttcctttgttggatgttgggcgataaaggtgagcaagagattgtaagcctgaacaggcggaagctgaccagaaggataaaatcctctgatgagaggtaagatgttgagagcatcactggccgagacatgtccacgtttgacaacggtaatatcttcaggctggacgattcgttgaatagatctgatcactcgtccccgtgaagatttggctatggccattacaatatcatccgtcacgatggcgtcgccccatttttgggaactgtctgctagagcgcgagtcgccatccccgctaatctaggttctcgaccaacgacttcgagaaagatggacagaatgtgtccttgtagaggcgttcctccccatgcgatatgatcatcgtagatatttgcagcaaatcgagccataggatgacatcggttggaatgattggaatcatccgtgatcttgacaggaacgtctgtttctcggatgcccagggccaactttaggatctcgatcagagtgttttcttcgaatacgaatgctcgctctctaagccggaacatctcgtatagtcgtctagtgaaaggcagatcctggtgacgaagaaacaagagcagaagctcgtggtgatgtagtggcgatatggtttccaactgaggataaactgagagtagtgggacgaggagcattcgtagattctcaacggggagacaaaactctgagggtgctgatttctcaaggcggagaattgagtcgatgattacggagactccttcagaactgatatccccagagccattgagaatatctcgcgtgaggatgatggccgaggtcgttcttgagagtaaagacgaagcttgctcgttactcatccacgcttcctcctcgtcatcttccatcaatgactctacgacctggcctgccgatgaggattgcttcttctcacacaccaaaagatcctccacccacccgttcgcaagtttctcaccatctccgttcaaccctttataagcaccaacaatgaatttccaaagccgccgtctgatgtttcggctataaaagctatcttgttgaacgagcaactcatcttgagtctgtctagcgtctaagacggaagtttccgctagctcgatttcttgtttgagttcctgagaattgctcgaacttcccgcagagagagaaacagcaaagttgtgcagactttcgggagaccaggatccgaccttgtccaaaaagagagaaagggcctcgattcggtccactttatcttccggttgattgaatatcagagtctgccgactagcaccgagatctggagaaccatacccagcgactagaccgacccagcgccagagatattgttggttgtcaaacggctgaacagatgagggatccgaaagttcaaccatcaatctccaagcctctcgtaagatgacagcagctgcctctctctttcctgcattctcctttcgttcttccttgtccaatatacctaaatccacccgatatgcctcgccaatctctatgccagccaagaatgtttgtcgaagttgctctgtactgagccaccattgcaccttcctttgccccttccgagtagttactactgggtaagattgtgcggcatgaaggaagattttgagaagccgaaattgacgggtgcttgggtcggcatggctggcttgcgacttgaacagaagagagagcatcttgggcggcacctcagcaggctcgcactcaagataccttccccaaagatcatccggatccagagattcggcctcggcttcgttgacgaaaggaagcttagacttatacgatgaagacatatcaacgttgtcggaagtcttggacgtcagcgcggatggatctgaggtaaagaagtgcggaggagggacacgttctgacataaatgttgaagaactgtcttcgcctccggtcctaactttgggtagcgtaaacggctggatagaatctgaatcataagaaaatgctggcgataaaggagtcgaacgggccgatcgggaaaaatgagttctttgtactgaaagaggaaccttgcggtaatccatgatcggttcttcggactctttcggccatacttccacgatgttcgttatatctgcgcttatgagaccgaacccagacggttcgcccagtgtaggtagagatgaaggcaaagcagaagattgggctgtccgcttgggtaaaacatctggtgagattttaggtgagggttcaggcagaggaggcggaggcggaagagtggaagaggtcggaggaggtacgacagagaatggtgtccaattcgaagtagggttggtcgtcctatattcgcgctgattcgtagcggtgtggcgtggtttagccggaaactctgttcccctggagggtggtccagacgaagcctcccgaaccaacctctggttgcattgtttagcagctttccgaagggcaagggacgttatggaccagggtgcgctggggtctgttgaagaagctgtggaagagactaaattagggaaagcgggagaagacgtccaaccgggatgcataaagactagatgggaagatttgagacgcgtgctgggtgaatgtgaaagaagagagccatcggaagaaaccgaagccttttgaggtctagtcggttcaaagtatgaaggatggactttgaaagctccagaagcaagcacagaggaagatgctgttggcagggaagagtgcagaagaacattcaggaagtttgtagtcagtcagccagttatattcaattgagatcatgctaacttcatagagatatcgattgtaatttggacgccaaaggggggaaggctataccctgtcaaattgataaacgcaaacccacttaccatcttctacctgttctgcacaatctgatcttaatccgctttctccagtgagcgtgttgagatcttggccgaagccctcgacgttaggaaggatctcatcataggactgctctgtttcccggaacgatagatattcctcggaagaagatgatctgtgaaaagagcgttgaccagtcgctcttgatagacagggtgctagaaatgtaggtggcagtcgggcgacggccggtgcagagagaatgagcattgaagaggaggaccgagaaagccgcctggtgaggtgacgtctatgcatgcagaccaagttgactagaagagacaattgtatgaatggcacgaaagaatgagatacgctcgataggcagcaagaagagacaacaaggtcaagactgtgaaggagacagaacgtacgtgcaagccgctgctgctgatgatgatatgcctaagggtctcaatcttgtatgatgtccaggaacgatccacttatcggaacaaataggaatcgtatagttttccgtcctttttttgttatctgccaagaatctatctctggtcagcgtggagaatatcacaccgggaaagacgacttgattgatagagaccgactggacgagatggcaaggtggaacggacgacgggcgacggacgagatggggatgcagctggttctgatggaagtgttgtggaagccccgcgtctttttttgatttgtcctgtcagcacgtccaatcaagcacgagccttttccgtgctgtgtaatcactggttacgtagctcacaagttgtcacatcatcagggccggccctgagcgtctcaagtttcgtataaatttgggaagtggctcgtgtcatactctacctttttctcctcaaggaccatcttgcctctgtgcaagttcaatgtcgatcacagcgaagcacctcctcttctcttccattcctttctttttttccatgttttctttcattaggaaacaggaaacgtagttcgggagggaccagaagagatcttttttcgataggtgtatatttcccggtcgagtggcttccaacggcggagtacccagattaccatcccccccttttttcccttcttgaggaattccatatcacttccttgaccgctcccttttcggagggtgtgttgactcggaaaatggagtttttcgggtaggtgagaatcgggagggaggacctttatttcatatccgtccctatagtccttggacgattaggtgtttggaaaaaccaaagcgtcgtaaattctttctcccctatcatatggtttctttatatgtatcaagtcggctacaacaaaataatcaagagacatacaataaccaaatttattaaaaacaaactaagtatgaaacaggacagaataagacatgataagaatagacatgaacgatgaataggtaaaagaaagacaggctggtcaaccaggtatacagaggcaattaatatcaagggtgtagcgtacgaagataaactaatagcctggaaggataaatggttgagagaatcaattcattaaatcaagaacatcaagtaacgtaaactttgcgaaagaggaaaccgtcaaaataattggagtgagataaaagaagacgaggatatgaaacacgttgaactggtttgattttcagaacatcgtcgccaaagcctcgccttcagctttgagctttccagccaccgcctgagtagctggactcgagttctttccgaaagctaaatataatagttttgacaacgcagaacagatcagagcgacttcctatcacaacatctgttagacaaagaaggatacgatcatctgaactggactgactgaatccgacccagacgcctcggttgaatccgtcgtttttctcctggacggcatcgacgtgtcgttgtttctcaaacacctcccctacaatccccacacacacagagtttgtcagctgactagatggtcctattacaacggtagaagaagacgaaccatatttggccaagtcgccttcgtttgtgaagtcgtcataatatcctacatcatcctctccctccaagctgggcacgaacggcgcttgggtatctctcagattgttgaatgggagcgaggcgaaaaacggttccatttggagctctgtcaaagagctgattcgagtcttgtcgtgggtgatcaacctatataccaaaccatcatttgaatcaagctgtcagggcgcatgccctagaaggactcatcattagagaaagaaacagtgattgaaagacaaaccgagtaataacgtcccaagcctcatcactcatgttgaagattaaatccttcgggttcgtgtacactggccgagtcaatactctttgccaattcttcaaattcgcccacgtctcgtccggcgtagctccagaaaacggcggataggccgcgctaagaggtggagcagcaagtcaaaaacgattctcgtcagtctcaatttgcacacaatcgacgctcggcttcaggagcagattgaatggaaaggcgtacaggaattcgaataaaatacatccaagagaccaatagtccaccgagtacgagtattgctttccacgaaggacctctggaggcatactgttcgttgtgaatcatcaaacatagatataagtcatgaaggtgatgtttaagcaatcaaagtcgacgaactagtcaggagatccaaccaccgagtcagcctgtttcggagaagaagacagtcaggtccgatcagcaaacagcccgacctgtgtctcgaagaaagaatgacgaaattgttgagaaggacgagatctcacatatcgaggctcagtcatccggatgctccgatagatcgtcctcctctccaaagtgtttctgaggatgagcttgtcgtctttggcttgatccaactatctcacatcgaaagcaggcacaacgagtggtcaactttcgatgagcttcgaaatagagagtaaagaatgatatgtataagctgacgaaccttgtgcctcatactctcgattttcatcggattcagcgctcccgtcgccaacccgaagtccgtcagcttgacatgccctgtaccgtcaactaagaaattctccggtttaagatctcggtctaagtgaagaacaacatgagatcggaaggggtcaatacgaaaagcgccaagcttcagaaaaagaggcatgttacagaaattgactgtgttggatagacgaacgtatatatcccagcttgtgcagctcgttgaccgctacaaacatttcagagatatagaaccgggcatgttcctccttgaggaccccggagttgtttaggagcgttcggaagtctccaccagggacgtattcctagaattatccgaaagatgattatttcgtaaacagagacgagaatcagttgagtcgaaattttataagaaagaggaaagaaggattgtacggaccatagctagataaatgtgctcaggatcctggaaagcgtacatcaaacggaccaaccaaggagttttggtcgccgtcaagatatctctctcaaccaagacatgtttgatctgggaaaagaagtttggttagaatcagtttggaagagcggttgtgtcgataacttctatggcttgagcagagaaatgaaggaaatagatgcccacctcatccatcttggccagcgtcctcttcttcattttcttgagggcgcacacctcaccagtgtcagctttcctagcaagatacacacttccgtagcctccttgtccaacctaagaccatgcatttgcaaaggagataaacaatcagttaccctctctgtagaccaaagtctctaaaaaagaaatgtacctgagcgatgattctaaattgatcgactttcaacttcgttcgtcgttttcgaagtaggacacgctctcgacccagatacgaccgtagctcagatctgtattcggacgagtcgggcgccagctcacgagaggacgtagattcggtgaaggcagtgtgacgcaactgcctagagtgaaggtaattcaacaggtcgactagcatcacgtcgaaggaaaagaagcacggcaaggtaagaaatctttcttgcaaaaatcatgtaacagatcggttgttacacgcacagtaataatctaggaagtctgatggatgagaccagcaagtaaagctatcgggtcagcgatcactgtgagggaaagaacacaagtatttggaggatacactcacaaagctgagcaacagtagcctttcttctgacttccgggctctctgtcagtttgagttcccattctttgagtcctccaccttgagccgctcggtccggtcgggagcccaaggttctgaggtcattcatatcagcttcaggcggaagaagaccgttccgttgagctgcgaatgcctttatatcagctactgtcggagtcgagggacctccggcattgtaggcattggaacgaatgtcaacatttgatgatgtgggcgtacacgggtcaatattcttggtatatcgagggataccagatgaggacatcaatggggactgagacggcgaggggaaagggacgggtgttgcagcagccatctcggataattctacagagtttggccgtttgccatgatcttaagtacatgctatgttcactagattataagaaggcaaactcactaggagagactttagtgggagacgagggacctttggaaggagacgattggccggatctgatatcagaaagaaaaggagcgaagaatgttaggatcataataataataaccatctcacgcacagacaaacatagctgttacctgactatagattcgacaagaatttggagaacgcaaacttccgactgaattagtaaacaaacaacgtcctttctctctgttttggctgtctttgaaccaaacaagatttgtatagccaacgactggcagtcgagaacaagacttacgaccagagttgctctttgaaggcgatgacggaggattccctgtcttctccttgttgggcgagggaaacgactctttgagcgactctgccaacgattgagtcgatctaacgatgaggaccaaggaaccaggaacggaaagctcagggccacagttcaggaacataatctcatcgagagccaagaagattcaacacaaccatcacacgtacctgaagactctagatatcatactgaatagatttctaggtggaaaaagagagcacgtagatttgactgtatatgtgtatgaatgtgagtgtaagtatgagtatgtatgatgtttaacgagcaagcaagggttcgtaggatgaagagtggagcggcagcagcggtaacaaggttgatagccaccccaagaaatcataagcctcattcagaaaagaaatcaacacgtcgcgtcgagtcgcgtcgagtcgcgtcgagtcgcgtttcaactatttgacctgcacaggtcgttcactctcgcacatacagtagcttcaaagacatcatacattacatccacaatggcgctctcgtcctcgcttgcctatcacccgtcatcggcagctctagccggaccatcaagtttagcatcaggatcacgcccacctcatcccaatctggctgatccgacattgacgcagatccctacgaattttcctccattccaacagcaatccacccaattccttgcagcgctcgatgccttcgtccttcggggtaaggaggaaatcatttttagaaaagagactagggaacggttggtcaaagaggctgaggagcaaaagagacgtatggaagaagggattgacgaagcaagtcgaggcgaaggaaaattgctggagagtacgtacgagtggccagttgtcaagtttctaaattccttgtcgcaatatgaatttaccaacactgacaatgacatctgacggacaacagttctagagaaagaagcatcggatgtcgctgaagtccaaacgacaatctcagacctcaaactcaatctgtcaacactggaatctcaagaaagagcacagacggctgaactcaaggaatggactgtcaaagttgaacaactccgggcggaaaagacactgagactatcgaaggaggcagagataagagcgtcaatctctcgggacctccgtacattggaaaatgccctaggatttaaagtagaaggagtcgatagtgtgtttcttcttttccttttaacttcttcgattctctctgatggctttactaacccatccattctatctagcggataaactcttgattcggttcaccaacctttccccagatgacccgtccaaagtcttttccttgcttatagacctgtcttcccgtctctacaaaggtgagcgctagacatcctgctgccgttctatatgctcttctatatgccattatactcaacaagccacatatttctgtgtcgctacagtttcttcgatctcacccccgctcccgtcattgccatatatccttgagacacttaaccaagaccgagactttcatcagttcctacgtagaagtttgtctttctttgcctttcttggtacattcgcagtctcatattcactgatctctctgttctatgtttcttctcatcttttagtccgcaaggcattccaaattgaggctaactaagattcaccgtcatatttcgacctgatctcctttgcttaacctgatacgacccacttaattatctttctatctatatcattggttttacattttcaaaaccttcttattaatcgttgtgcctcgctccttcataccgagttcttaaatatgtttgagattatatatccacttttttccgccagtacaaattctaggtatctctgtaagccacaagtgtatgtgcgaagaagtcgtttatccttcatcaaaactcctctatctcgtccccttcgatctcgcctccgctgtcttcttcgttcctatttcgtgccgcttgatcctcatcgtcctcatcgaaaccgacaggaataaaacgttttgtcatcatctccaatcctgatatcccttccttgccagcattcgtccactcattcttaaccaatctcaggtctttagctatgtcagcatcaccgtcaagggagaggggcaaatcggcgactgggtccgatgtggcgctcaggatcgaacgaagatttgtggtagaacgagtgtgtgagatcggtacgaaaggaagagaggcgagttttgggagggccgctgtgggtcggtcgtgaaatgggacgggaagagaagcacattgggcatcttcagatcagtaaaaaagaggcttgatcaaaaaggaaggagacttcccctgcctacctggataatccggagggataggaagtgactttagttgaggaatcaattggctcgtcatgacttctctcgatatttgacctaattcaagcgattgatgatccacagagtttatgatcaaatacgtgatgtgacgagtagaatcgggtaagaagagagattatagaaatcacataatcgactcatacctagacttgtatacttagcgagccaattcccgacgtccgttaaggaggtatcggtctccctctgtattcgggcattctcaaaccaatccggtttatacaccttctggcctcgtctgtccgtcagaacacaaatcagttcatttttgtgtggcagagcgtatgagacattgatgttatttgactcgaacgaaacgagcatctgaagctcagaagagtgaaacacgaaccttagaacgggcgatggtagaccgaagaggattcctctggtcgcgagattgaaggcgtacgagatagacgtggttgagctttgccactttggtaacatatcccattacataaattgtcagaacgttgaatcatgttttcctctggtgagagcgtcttcagaagaaggaaggaaagaaattctcacaagatcatcgtctgatcgcaatgcatcacttgcgcttatagaatcaaccgcctcgaaacattcatcgacgtccatcgtgaagagcgggtagttttgatgcagatataggttgaagagagagatgtcgacaggagattgagcaaacaacatctgaagatattgttttcaagtattgaaaaagagtcaatcgacggcataattgagaatttcactccgagagatatattttacatacctcatgatcaactttagagattcttcgagatttttgttgtaaaaagctcggaagaggaattacatcagagtggaaccgaggcacatcatccctatcttctttttcttcctcgggatctccaacgcctatatcagaagcagttgtcgtatgaccataacttagctagatgttcgtcaagtagtagagaagattcgcaagtgaagaagcagtgaatcaacacgaacgcttgttatataaaacctttcccaaagcatggaagagagctaaagactgttctcgtcttgtaactgagttcaatctaaatttgatattcaacgcttacatttagatcagtcggcacattaacttctcatatctagagaaagtcaaggcggaagtggacgaacaactctttcagttccttgtcggctccctttggcgatttgcctcctcgtcccttcctcgtcttcttgacttccgatgtcagattggacctgcccatatcgactttacataagaattgcagtgcgttgatggcgcttcggatatccccattggaagaatgaacgatgagctcaaccgcttcctgaggaggcttaatggctgatttagatagtgcaagagagataactcgattaagagatttgaggagaagtgttggtgctatcgaattgaaactgatgtattgacgggggtacttcatgtccaattcagtatacacgcgtgtttctgttcagaggacgcataaatgcgaacgagatcaatctggacacacatacctgatagttttcgtggcgggaccgtccagtacatctttgcccaataagctccttacatcccatccattctctcccttctttcgatccatccagctttcacctgcgcgaccactgtctcctgcctcggagacaattacaacgagcggagcagcagatgggacccagttgactgcgaaatctctaagagcctgttgaaagctttcgcgtgttggagcgtgggagagatttggaagatcatccaaaagaagaatcttcttgttggatgtacaattagaggaggagcttgtggatggagacgcagacaaatcagaatcaaaagaaagggagggatacgcatagcgcgcaaggaaggccctgaagcgttctgtgagagattctcgatctattttgtcggggacaaaagtcaaatatgaccttgcaaaaagaagcgaattttctttcgaatctggagaaaatgtacctaccggtgatgcctcctatcccgaattcttcagatccctctacccaatcgatgatctcgatgcccatttcttgagccacagtctttaatgtagccgtctttccgactcctgctgaaccactcaaagctaggattctctaatacacagacacgagaaacgtaaaacgtaagatgcccttcgctttgaacagtaattcgtgagagagctaactctgtatttgcctctgagagcggcttgcgatgaggtctctgggtgatcgacatcaccaagggcctctcgcagccaacttctcacttcgctgatcttcttcttatgcaccgcaagatcatcctgtttcatcaaacagagaattagttttcgggcaatccttagtatgactgtatcgacaaggagctatacagcgtaaggtgaacatactgctgatgtaggcgcgtatgcatcaacccacaaactcgctgcatggctgtcagatttatctgatgggagcggaaagcttcaatgagcgctaaatggcaattaatacgaaacaccacgagtaataagacgaacagcctgaaagttggtacggctctataggcgtcgttcctttcctctttaacatcctgtctgggttcggtctcgtttcaacagcctcttcttctttatcgatctggtcaagctcgatcacatcagcttttcgcttgacactgaatgttttggaagggcctatatctgaagatgtagagggcatgttctgagtgaaggagacagttttagactttgatttgccaattttagatgcgacggctgattgagaagatgtcagagatgatgcgcatgttgatggggatgaatgcgtaatcaaaggagtcgttagagagaactgtattgtcccaattcaaagcagacactctcggctcagctcctctcttctatagttgtcggaactaagaaagctcatgggtatatctcgatcagtgaacgtacggaggtgagcgagcctaagcgcttcatcgtccggggctttgagcttgccgaaaaggttgcctcaacagttcctggagaaggtttgaggatagattgattatccactgttttctttgacctagatggttgcttccttgaagtctccggctttggtggcatcttataaaggcgttgtttcactgaggaaggtcgaaagagataatggaggggaaggcgcaaataggatgatgcacagattaaataaattaaccctaacatcgcgtcgcgtcgcgtaaatgggtttgttgtattacgtaacgaggatcgcgtggcgcgtcgcgtgtcaaatcgttgactgaatcttcgccgtttctatcaagagacgatcttcaacttcaacttctcgtaacagatccaatcactcacactcactcactcactcgtttgctttgttcccttccttttagtctctatcgatcgagccatccggtataatcctgccttgacagtcatgggagtccatgtccgttcgagcgatagcgacgttatcatggccactccagactcatcaactactacgtccgtaatttcttctactcaagatatgagtaagtctattctccagctctgaacttttcttgatttgtaaaggaaggaaatactttgcgctcgccactgacgattttctttggttatctgtcactcagctaatgaaatgcctgcctttaaactaaagtcccgtcgatccgtcatcttctcctcggtgaatcaaaatcatccttataaagaacccagccccagacgcccggcagtctcggctcagtttcgtgcgctagattcggcatctatgaatagcgtcaaccgtcccacaaactcaccaaacatgaaggcgggtgacccaggttcatcaggtatcctcactccatctagaggaattctcaaaagaacgggctcggaagaaattaggctcgcaaaggatgtcaaagaaggaaccaggataaatggccgactcaaagacccctcccgatcggattcagaatcgtcagcgatggtcgaagaaacatccgaagatgacacagagataattcctatctccttctcatctcatgttggcactcctaggaaggataacaccatggtctcgtcattcagtgcccaatctccggcagctgcaaacctatcttctcattcgattcaaacccacattaataccctgttgtctcccagaaccaacaccactccctccatccatcaagaccctcaggaccatcagcaccagtttttagtttctcttcaagacctggccgaggcctatacaagcctaaccgcccagtttcgaggtctccctatcactccaccaatagataacattgcatctaaaagcccgcgcaagcggaaaaacttggcaaaaaagagttcaatagatgtgtttcttcgtccgttgattaagaatgcaccggcattgatttcagctttcactagagatctttccagattgttcacacatcattcacccgctcctcaaccggtgcgaattacatcgcttgcgcggggggacgattcctccccaggttcttcttcagctgtgggttcgagcgagagagatgacgaagacgatgatgaggcttttgcatttggaaacagacgaatgagaagaggattctcagaacatgagatcactagaagaagggaggaggtttctgttggacatgctgttctcaaatggctagcgctgctgtttcattccgaggtcgtctggtcttgcttttcaggtgagacatacttctaacattacacctcttctaaatatttttcaagatactggcccctctgaataaattctcgaatcgtttcttctcagatgccgatatcctttccctccttcgactactacttcaaatccctcttcacaaacccatctctacaactgactcgatcagcgctcctcttccccctttgttttcacctacaacggcttctaaacgaacatactctctctccatctatgccttgactcatctacgacttccctctcgaatccttcaatacgttgtcgatgatattcttgaggccgtgaagcgcgcttgttcacccgctccacccaagaagtctgctatggtttctaccaccagcgcatctgttgctggttcctctctcccttccgtcacaccggcaatcgaaggtcaggtaaatcaaaaagcgaagaccgaggctctaggcgcaacgttcaacttgctctcaagaaatccaactcttcttcttccattacatagggaatggattcctctacttcttcgaagcttgcttgattcatcaagctcgatccgagttcgagcaacggcagctctggcagctgttctcgaaggaggtcacacatggctaaaagagctggaaatagccgtcagggaggcaagcgttggatcccaagaccaagagacaagagaggagaaggaggcagagctgaacgcagctagaaaggttgtagaagaggaggttgcattgacggttgtcaaagtactgggaaagaagaatcctgtccaaccgacgacaacagtcggacagttacttcaagcagggaagagtgagggaaaaatgatcacggcgttgatggggttgctgaaatcgactgtagacaaagaacgtaggtccctccgtcatcatcctttcatcgttgttcttgaatcccagatgactcatcctccgttcttgaactcttgcagctcattgggctattaccacgtggtcggttctagtttctctcctgggccgaaatgttcatactaatacacatgaattgctcgactttttaaatgtacgcaatctgtttccttcatccagtgacaccaacttttcaacttgctgacatcgttcctgaatttgtctccccaaaggtcgccaaatcgaaagctattccggcggtttctcttctatgccgactagcttgggatcatgtcattcattccatcatctctcaatcttcacgtcggattacctcatctttcatcacttcttcaacctcggaacattcgtcgtcccctttacctgacagaatctctgcgctcgacgatcttatcatatacgatctttcttggtgcctcgccgataagcgcacagctcttttctccggcttcttagtagctgttttcaaccgccatcagccaccttctatcatagaaagcaaatctgaggatggatccatcaatagaaagaggtggaaagagagagacggagcaaacggacacggaggagtgctagccaaaaacaggttggaagcaacaaagatcatttcacaaggaatcattagcttgatctacggctacaccggcgctatactcttgactgcttctccttggaatggttcaaacccttcgtcgatgaaaaatttcgaggcccctatctctcgctccacaaagaaccttcctatccccaaacctactgctcctaccggtcaaataggtacaatttctgaggaaggcattcttgttccctctactatagattcttctttccgaagctcgttcacttccaggtccgactcttcaatcccagctccctcatgtttggaggtccacgacaatcttactaaattaatgaaagaacttatcgggccgctgctcaccgatcacttcttacctgcaaaagccttggacgagatcaagctccttgggtggtcgatccttcgctctatctgtaactcttctgcccctcctttgaacacatccgtctgggaactcgatcgacttctctgctggtcgttcttgaacggcgatgtatcttcagccgagattccatctctgattccaggtggaatttccaaagctgcggcggaaagagaaaacgcactttggaaggtggcatctagagcagcggagaatgtaatcagggtcgatgagataccggcttggccgcgaagctggattgcaagtcgactctcggattttgtagtgaagctttttgagaaggcacttttagagatgagaggattgatggacgttgaggctgtgagatggatcaagagtgaagaaggagagaaggtcatacctgtatgtcctctatattgtttcgatccatcatccgggtttcatcattttgagtagcgctaatcactcaataagcaacgcgcaccattttacaggagactctcttctttatatggaaagatattctgatcgcactgaagtcgattggtcccgattcaggttcgccgctttcagctgtcctaaattctttcatgagaacataactactaaactgtcattcgattctcaggttcagcaccttcgaatttgtataatgagggtgtgatcgagatcactcgttgtcttacaactgtacttaaaacagatcctcgcacttatgttcctcctagcttggaacatactttgaatcttgctgtattgagactcaatttagtcaatcggctttttactaccgctgccgagactctaggatcatcagcgttcgctgagagcctcccttttgaagatgaaactgtcttgggtgctggaagcggtgggtaccctactacagcgggtgttcttcttacctcccttctaggagggccttctcccttgtttacgtcgacttcaccggctcgagttccgtttatacgattattggagagcttgttgaatgtgggcgtatcaggttctttagcgctcaacctgttaggagatttaaccatgaatctgggagatttagctgtcggagtggatgaagagcctggtcgattcgaattgtggagactctttggttagtatactgcgttgatactcaatatcccacaatctcagagcttcttcttatcctgatttttgaatatgttgggttccaagtgagccgatggaatgcgctctggcccgaagagccgatagatagtacactgacggtcattcaggatcagagcatcaactcggacgaggattgtaacggagcgcaatctatgactgtgagtcaatgtttctcaaatcttttatcgcacatgaatcaaagttttctgatgtgaccttgttctgaaatgatgcttcttttccagctcggccttctgaatgacttactcaccagtcctttccaccgattccctcaagcttggtcaaatgcctcgaaggaggacatagacatctggatttcattattgaacacgtctacgtctcgagcaattgcaaaaggaatgaatcccaacatcgcggtagtcgagcatcaagcggccggtttgaatgatgctgatatggccaaattgtgagtactcagctttcagttttacggaaatatatccaacagtcactaagtattcatgcgccgttgaaaacagaccttgtgttgcgacaatcaagtgcctcagcgccctcatatcgaagattcaataccctctcccctcacctcccacgcatgatactcagcttgccttcaagcgcaggatgaagaacttccctgacagcttcattcaacttttgagggattgtcttgatgttgcctatactcagatctctggcaaagagcacagtttaagccatctgaccacgctactcaaggtgtgtagaaatcccagaatcgagatattgttgcaacgtattgatttgagacttgtctcgtcgtcattcaaatcgttaggacactgcttcgctcttgaaagttctacctctagacttcacgggcaaggcaattgagcttctcatagttgtagtaacgagatgggttcgagatacagatgctgttcttcctcaaaatctctatgatgaatcagtaagccctcttgactcgtgcagtcgtcgagtttctgctcaccaaccttgtgattccttaggctcccgtgttgtacgaagctgttctcgatgtactttctgctacgtcaacaactctggaaggagagcgcttttcagtcattcgactcgacaaccctactcttcaaaagatataccctctactctctgtcgtactcgatgctccttcaagcaaacatcttttggtacaagccttgagaagcttctggtcaaagacttttgctgaggttgaaggcttggagagtcctgagaatttgaagacagttctaaacgaatcgaatatgtttgagacgcaaccgaacacgcttcagatcctatattccccatctcaagtatgttcttcattatctcatcgcatcatcatcacctgctgattgaaagctccgaacatgacttcttggaccaggccacaaagtccaccgcctcaccaggcttgttatcagaagatacttctctcgagatctctgaagctgccagggatcagagctatgatggggatatctcttccctcggtacacatcaatcaacctaccagcccaattctcctgcatcccaacttccatcagagtcatctatatcctcagcaactcagaattcaagtggaatcacgaagaatgatgaggacttcacctcgcttgaggctcctccttcaaggaagcgccgccggggaagatcaggtcagtcgtatcctcttgattctgttctgatcattcgctgaattaaagacgcttatttttcatcttgtgtgattgtatcatgcagaccgatcctctaagcgaagaaaaatatctccggtacctgaagatgccacaatttctgctacgcctgagatacaaagtgtctcagatcttactgatggcggtgatggagatgtggattgcctgattatggaaccctcgtctgcttcaagacctgtcgtcgattccaatactcaaccctcttcttccgcttctcgatcttcaactggttcacgatcagtccttgcgtctgtatcggcatctatcactcggctcttcagaggcaagactgctgatgatgagccttgtccttcgtctagtccatcccaacccgaagacaaaaacgatactacctactacagtcagccaacaacctcatctgatatagcaaacatcaaaagtcgtcttcgaagcacaaaggaatcaggttcctcatcgacgctttccaccccgttaagaaaagcggcatcgagcgcaacattggtagctagggaggctgaacgtcctcaatccttgtcagcgggtgctggcacgcgagagcagagtccaacgacttatgagaaggaaagtgaggatggacgaatcatgactcaaattggtatgcttctcttgacggttctttcagtcgatgatcaacatctcaaacgttattccgtcgattctttattcatctcttcttctcttaacggcatgcgcggcatagaatcatcgttaacgaccgaacaaccttcgacccccaagtctggccctcgatcgatacaacctccaaagagtaagtatggataccgtctcgccaagtgtctctctgctatgcgtttgatcaaggacagacacactcaatgtctctactttcatcccaggtacgagtcaacgttaccggacaacaccactctacgagcaaagtatatcattgacacaacctggaaacggcaagagaaaacaatctgaggaagctcatgatagtctgtatgattcatcctctgcatctcctcattctatacaatttggcgcgaaaggtaagggtttagttatatcacatcctcgcttttttaccttacttatcgtctgatgatattgtatcacgttaaatttccgccaaagtgcctttgttggatcggaattcgcctttcgtccaacctctattgggtcattcgggagaacagaattctcccagaaacgacgacctgacgactagatcgccctctatcgctacttctcttccatctcctccaaccagtgttgaccagaaggacgacatcttggcttcgacttcgacccagcttggactcctaaaaacctatcttggccatatgacaacgatggaattactacagtgagtttccctgatcaattctacatgtgaagcagccaaaggcatgttctctgacccatgtgtttcatgaatccctcacgtaactctcagagctcgagatttgttgatgaattctctgggtgcgatagacgatcgcttccgggctcgctttgaaaaagaataggtttgctatcaaagatatatgttttgtacgctttgtgtctttcactctttttgaggatattcacacatacacatatgctaaatgaacgtatacaaggttacggaaggcagaagtatttggtgacaaatgacagcaagagaaagtcttgggactgattgtttatcgaacaccccaagatcatgcaaaagaataaataaaggaccatagagcagaataaggaatgtatatataaatagaaaagaatgcagtggccgagcaagccagatattgtccgttagcaagaatgcctttttagtgggcgtcatagagaagaaagaaagctggccgaagcaaatatcatcagtgataacctcctaaccagcactcatggccaacatgctcttcttgctgattgctttcctccttctcaacctggagagagaagctctgtcctcgggaggaggcaagaagcccagcacagacttcattggctcctctggcatgctaggttgatcatcttccaatacgaccgcagggctcttggaaagagcaacagacggccgacgcttcgggacttgaagagagggtcgacgacccatcgcgttggagacagatgaacgacgcagagaagagccgttgtaaccaggaaccggcgaccgaggggaagaattactgataggagatcgagggtattcttcgcttgatttgatctttcaagaacaaatgacagaaggtcaagaggattagtacagcttaaaaatgtgatgttcaagttatagctggagatggacttacaaacgtgattggttgaggactgttggtgcaggtgatgtcatggtgttccatgtagaatttcacagcagcgtggctacagacgccaagagatggtacgttgtgagaatcaagaataatttcaaagtttctatacaaccaaacaaaactaacaatcgagtccttcgagcattcttggctccccaatcttgccaattggccatgtgaggaattccaattgtgagttcaactgaaagcataagtacatcgtaaagattagtatgatactaaattcatcataagatgatgatgaagtttctggaaaaactcactatttctttggaagttgatgctttggtactgttggatatgaaaactagatgaacaaaatgcaggtacgagagaagcagaatcgacatgggtacgtaccatgatagcagtagagggggcaaagtctctcttgtcgtctaaaaccatacatcatcagtttggaattagatcacaccttcataaaatgacagagagcgaacctgtggaaagccagttgcagattgatttttccagtgcatcgatttgttcgttggttgtgttccatcctacctgaacagtcatgttctcgaacatagatctatagtgacgaatcatcagtttacataaatctctgcagctctagtatgatagagaacaatacaaacttacccgcttcggcgcactatgaagatggattgtggcaagaacaaaagtagtgagcaaatcaacatatcttgataacaatgtcaacaacgatcgaacttggaaagcgtaccattaaggatgttcaagccaaacagtaccgaatcttcggtgttatgaatcatcctttggtcagcctctctttcttcatttctcgcgaagagcaaagcacatactgtaataataggcttcggttccatctgaccgcgtgaattgcgtactgaaaatgcctgtagaagcaatgtatggagatgtcttgttagtcgaataccaaataagaaaagaggtttcgaatatttgtgcttacccatcttcttgactatcatattctcggttccaataaacactcgatccccagtatcgaaaggatgagtgacaaacaagaagatctaacgaacaggaagggcctgtatcagtattgaggacaagaaaataaacgcattcagcgttgacataggactaaggttggtactgaccacagcatcaaaggcgttactagctgccgatttgaagataaatgacagaccaatcataattgtgtacagggaagtcaattgagtctacgatcgatatcgagtcaacaaatcagataagttagctgttgttcaacacacatacgacgtcgtacagcatcaaaacccaccccaatgtttactccgaagattgacagagaaactgccagacgaaaaatttgtttagcgatcagcggacattgttcttgttcagccatacatatgatgagactaaccgaaaaataaaattatagctccgaagaagaggagaatagagttgagagacccaacagcatgatcaacatccctatcagagcacatagacaggattagtgatctacaaaaatttgattgagaaagtataagcatgagcgcactgcatggatttggccaagaaacgtcgttctttgtatgtctgcataatcttggacttgatctcagatttagagatatcgccgtttccatcctaccatgaaccacccaaaagaaatgaggtgagtcaaggaatttgagacagttaaggcagtgagatacatgatgcaacaaagatatgttgaggagacgaaccgcatcgaaaacctgtgagaccatcagagtattgaaaaagatgatctataagacaaacagccaggtgaatctaccaatattagatatagaatgaccttaccctgaatgccttctgtgcctcctgttcagtatcaaatgcgccgaagaaatcctcaggaatcagatatgttctcttcgccgaacctctataagacttaaaaatcgctctggccaagttcttttgtgaaagcgaaggacaaaggtcagtagcgtcattcctaaagagtgacaaaatgacttggggacgatgatgtggagaaggaacggaccttggcggcgtgaggcgtagataccgaaaagctgacttccttgatatccttgttccctagctttcctttaatattcctcgcatcatgcaatacagccttcttgacaccctttttgagtccagtcgcgaagttttgtaacttgatacctgttttgctctcctcttcgcccaggtcctctctaggaggtggcggggatgactgcgcggtaggtgggtacgaatgaatgctcgatgctctgttactttcttcccttatttggtcgatcgactcatcccttcccgaacttttgaaaccgaacaaatttctctgggaatccacagagcgatctcttgctttactttgaccgaagaatgtattaggaccgggagaagatgatcgagatcggctagcccaatcgaccgcgaatagagatgagcgagctgaggtgccggtggtggcatagtccttagattttgaccttgtctttggtcgatatagattgagtcgatcgagcacggcaacagtttccttcatttatttgaatggttgagtattagtgacagttttatatgctcttgtgaagaaaaactgcactcactgtaaggtcatttagtcgatctcggaaagcaaccgtgtggaacttcaaagctatggtaataacaatcagaaagtcagtttgtacctgataaacattctgattatatcactggatagaagcctaaccaatcaactgcagcaggatcttgcagatacagaaaattaagatcaggaagaataagaactctacaacatcgaacatctatgatgatcacacagatgcaaagcgcaagaacgacgtcctcaaatcagttgacttcgtcttgataacgcgtagacaaggtagaagatcatatgggccgattttaccgtatcagtataaggggctcgagattgtgtatcaccagcagtgttgagtttgtaaatccccatgaagatcacagcccagcttccccagatacaagctgcgtagaagactgatcggtagcattgaaatgagtcaagattctgataattcacggtatataccaacgtctgtgaaagactcactaggtttgatccagccttttatgaccgcgtaactgagattatactcgaaacagatcagacataatgcgaacaccagtagaatagaaaacactaacgtttctacatgagatttcatgttctccgtcatctctccccaaaaaaggatgatcaacccggtcgctgctaccggaattagatccacctgtggcggatttaatcaagagaagagatgacggaggttatgggcaagcttcagagttcaatttccgaattctcgacaaaagaagaaaacaagaagaaaaaaaaaacaagactaacgatcacagcgagataccaagacaccaagacgttgaaagcagtgaaattcaaccaagcgctgatgtttgcctatgcagctcaagacgcaacatatacattagcaccagatttagatatcggagagaagaaataagaagagcggcacacacagtaacgtatctcctctcattagttgggttcttgttgagccaagtatatctaacgatcaacggaatagcgaccaataccgctgccattatagtcgatccgatcagcgttgagaacaagaaggtgacgacccttataagatatgagttaagtcagtgataactattctttctatagcagaacgctatgagcaactcacctcgcgggcccccaggtcttctttttcttctttccgttcagcccaaatctttcctcgtgtttagcttcgattctagttggaaacaggcaaagaacggattctcgtattaaatcaacctcccgctcatgcctaggttgtataaaaccacggcaaaatgtatggaaaactcactcgtcaagatcctcctcagccgaccagtcatacaatacgtcatcgtcgaagttctcatcttcactcagcacacttgcgctggaggacatggatctatcataatccggtctagttggagcaccgtatgtgctgaacctgcctttagtcgaagcatcctcatcccagactgcttcttctcgtcggtgatcatcggccatgtctaaagaatcctggatgatagccgtgttggcgaacctagcctctttgggtagttttcgaggcggagagcgctccctctctcttcccctgttttcttcatcttcttccaagagttttggaagataagtctctgtttcggcagtgattttgttgctaggaaccgaaattgaatcgaacttgtgtacagattcaggaggttggataggctggacggccatatgatggtcgtccgaacgggagagttcgatagcagtcaaggtctcggactgagcttcgtcatattcatcggagtttgatcgttgcatatgaatggcatccggagcgagaacagcaggtgatggagctctgatagaaggctgaatggagtatgagctaaaatcgggtagagaggagggtgaaagaggaggaggattaatgacggcttgagattgagtcgaaccgtgatcggtcttgccagacgggactggtagaccgttagacatgttcttcggaaatctgtctgcttgttgaggatccaaccgaatgtgtttgtagatgtatgcactttgttgtgtttataacaaggatcgatgatggtgatggtcaggagaaggagaggtgaaaaaagaatgctggctagctgtgtcgctccctccggccaagtcgacacggacagagccgaaaggccgctggcttaggccttacacagctctgttagaaaacagcgtagactcttgtattctgtactcatttgtctcgattcatatttatcaaaggtatatgcggaacagatgatgtatgaacgtgtatggtggaaaggatggggtctaatgtgtataaggatgtagaatccagataaactacactaagaaggatgattcgtctccagaagaacgaaccgtatttcttccttcatctcgatttctcagacaaccacccgaccgacaacagtcgtgtgacataatgctgaaagacaaacacagagcgtcaatttcaactcgacacaaaagacacacaagagaaaaggcatacgttcgatgactcccttcttttcgtcgaacatgtagttccatactttctccagacgagcggctccaggaatatcagatcctcgactcggcgcagtcctacggatacgcgaaaagagagaaatgacgatggagtgagcttcaaatatgtttataagagacgcagtatacgagacttcactcacgcggggtgcattccgttttcgacaattcccacataatcaatttctgtgtatagatagtattcaaattggtatcgtcagccgccttctccagcctgggaccggatgccttaagaaagaagaagagaaatataaaacctcaccaatcggctcgtttccaaacaccttgaattctatactataactttcataagacttttcactcgcgctcttcagatgatgcctaatatattcttgaggaggaggcgtgttgaaaggccaggacttgattttcgcggagaacgcgatgactgaagaaaagaagattgagcaatcatcatcagttttgtgttttaatatgcaaagagggaaagacttatcgttcgtcttacctggccagatcaatcctggctacaagatagaagagaaacaatagtcagaaccaggtatacttatgaacgctggattgaataagattatcccacatgatccattttcaacttgatcgatctgatatccgtcgatttctcgtacgtgtcctccacgaccgtaatctcgagcgtagggagtctgccagtctcttcgggaggactgatcttgtagtaaaacggagcaaaaaactgcaggggacgagcggccaaccaatggtacgtcaacacccgatcgacggtatcaattcgaaaggaggctacatacgtgttgaacagggtagagagcgtcccaggtagggttcaaatctcgctcctcaaaagacacagactgaagtttagattcagcagggagatcaaggatggaatgaacctcatcgaagatctctgtgtaacctggagcagaatccatcatggctatgtggaacctgaaatctcccgaggtggcctgtgttgttgttttgaattcgttcgcatcttatcaatcgacagcatggagagacgagatggctgaattgaacatcacatacattgaattcgtgctggaagaaaactcttcgaggagccgtatcgctgaacggacgcttgaaagagaagaatccgactgacacagccgaagcaatcaccgcaaataatacaacccttttctggaaggccggtccaaatctgtggtagagaggaatgatcgaagatgcaaacaggaaacaaaacactccagtgatctaaatattcagtcatgaatttgaaatcaagtgagtatatggttcgagttcatgattaaaaatgactaaaacaaagctctagttacgttggcgatgatcagctcgacaggagggatgacgcccatcctacccgtcaggggtacaaagatgcccaacacggttctcgtgcagtctgtaccggaaactatcggacctagctgagcaactacatatactgcctgtatgtagatgaacagatgaaagaatctaaaaggtgagcatcgtaccctccagaaaatctgaaaaggaggaaaccacgtgagaacgtactaaatggatggatccctttgtcttcctgcgcacctgggtgagaatttcagaagtcgagagcgtgatgacaccagccgctgtcaagagcgcaaacaggcaagcggacctgatacggaagtaggtaagcgctgccatgatcgaagcgttgaggacgacgactcctgtctgggacgcgtgttcgagaaggggcgcatcgaccaacggaacgaatctactcgtcaaagattgggaaatctatcgatacaaatagatatacaagctcagggtgtaagtcttggcagatgtctcgatgttcttccctctaaaatgaaacgtacccagattccagcaaaggcagggggagcgtataaagctgagaacgggaaaataaagcaaaagatgtcaacgttgatccgcaaaggacatcaagaaaagacctggatgacatacctagaggcaacagctcatgagagtaccaagacatactccgatccaatacctaagacatacatgcgtcagcaacgcgtaattgatacttcaatcatctctgcgtaaccctcactctgaacacgaaagaagtctcaccttggacatcaatagtgccactatgttgacgcccaaaagcgctcctatgaaagagctcacacaacccgctattccagccgcatacgccttgtatgacctccactctgatctgttgaggaccagcagtgctaccaacgagatcaacacggctgagatctgtaatggttacaaccaaactcccttgttcagtttctcgatgtcaaggacaatcacaatgattcagaaaggcaaagtttaccttggaggaggtctcgagcgagtacatcaagaagtatgaatcgaagaaggacagatagactgtagtggagttcatgactcgtccgttagattttgtcacaagttcaatcgaaataaaagcgaacaacatacccagatcttgttctttgacacccttctcaatctcggcaagagaagactccggagcggttaactcatcgactacagctaacacattctctccaaaatgctattgaaggacacgtgcaaaatgtagacttgattcgtcagcactagaagatcagagttagggttttaggggattattggttttttacctgagtagttcccttctctaaattcgcaatggtatctttgcttgtatgataatacctaccagaaccgaaacccaagttcaacccgtcaacttcaaactgaagctttagcctatggagacgcgaagaacagaggtacataccatgagttgtctaccactgccatatcgagccctccaatattcagatactcctcaaattgtccgaaatctgtatcggagccgatgatacctgacgagaatatatcagctgcaagtacgcttccgtgcggatgtgggaccttcgaatatgctttgaccatggcgttgttcgttgcttggaagagcatctcctggccagtcgtaccagcagcttcaaggttgaccaccgctttgatggttttggccataggatgttgtgtcgaaaacagatgggatgcctgcgaagggtaagaagcgtcaacgttgatacttttgctgtccaaagatatatcatcattttcctcacgtctttgttgtgaaataaatgaatggatgattagaaagaacgtgacataacttcagagatctgccaaatgatacacaccttgcaaactttcctctgcgttattgaacactgaggcgtcaagcaaggagaactaaagacatcagacatcagaaacaacaagcaagcctgaactaagacacttacagaaaaccaccgagttcgtgaacgatcgttctctctcaatcagaattcgcgcaatttccaacatgatgcccactccgatagcttgaaatgacggatttcgatggaaagtttaacgtgcgcgctggaacaggtgggtaagttactttgaaaatgctcaccatcatctgctgctccaggaccaggctgtattccagacagaaaaaaaaggtaattaagagccacttatcagcccaaagttgacggcctgacatgcgaaagataaaaaaaccagactgaccaactgagaatcaatatgtgaattcagtaagagcgcagactctttggactccgatgagccgttggatatccgaaggatgacatttgtcaggccagtataagtcttcaggacatcgtggtctagaatgttgaacctgaaggagatggttgtgagagggagaaagagaggagagggggatgaatcgatgagtgaaagactgatgaaagcttgtgacgaatcgtttaccgatgattgccgtttcctctttgaagatcaacttcgcagtccaacccttggacttgatcacatttttctttcaataccttcacttggttccatacgtaatctcttcccttaacgtgttcgtccgtgcctgtggtgaatatcaaaaagagccaggagtatttagccacaattgggagacaaatcaaacctgatggacacttacctactatcctccacccggaatcttccaatgcttgaatatgagagatagctaacgattccgaaaactggggttcattcgttatagaatttgttctgtaggattattttagcatgtgaaattgtaaaacggctcgtcaattgagtagatcagctccaattgagcccatgtagctctaacgaaagaaacgattcacccttcggccaatggggcaggtaatcgggacagccgatttgctgtaaggtatgtgaggactgaaacaacaggtatcaacacgaccagggaggggagtggtccccatgtgtttgttcttctggatcgcattgttgagacaaagatggagaagagatgagagaacgactgagttttcttgcatcaaatgagatcaaagcttcttcgtcattctcttacgagtgccgcgccggtccggcaggaaactcatatggggccggtatggggattatttggggccgtccggggccgtttggcccatgtctgggttccgtctggggtctatgttgagccgttcgccggaagagatctcatctgatatacggacgtacatcggggagtaagacaaaatatggagagaaaggtcatggatgtcatattgcccatagcgttaggaacacaagcaagaagcagataccaaatgacatttgacaaaatacaaagtacgatatcttggtagaactcaggtcagaacaatatattggctcgctggtttcgctggtctggactacttgcttgaccaattcaatatgcgttcgctcgtgcagcaaggcttcaaccgtggtgactagcgccttctgatgtttaatacgatggatataatgtggatgcataagaagtcgatctctcaatatcatgatctgttggcacacaagaatgctgatgaatcaatgttttcgtacgctgctgttgagtgctaataatgctgcctatagactgttagggttactctctctggtgatatgacgtcgatttcattggtcacgatctcaatcgagcggatgaagtcgtgtatctggccatacgataccttctctctcgttgcctgtttgttcttccatgtacaaacatggatgatgatgatgattggggacgggtaagaacgatcggatgagatgatcggaccacgttggttcctatatataacgttggctttctgttcttctttttcttctcttcctctttctccctcccccatcattcatgaccatccttagaggactcttgccaaccttatataaaagaactcgcgcatatcctcttcaacccttccttactctacaaagaagaaccatggcgagcgtgactaatccagataaagaggccgtgacgaaagaagtcgactgcacgttcgatgacctccttgagggaaagatgtttgttccctctttctgcgcgcaatctgctctatcggtacttgtttcttctagacactcaccatgctccttatcaaccatctcacggccggtctactcgtcatcttctcaggaaacaagtcggtttcggagaaggaaagatcctcttgagcaaaatcgatggcaaaatcgcaagttccttctgattatcgatcgattgaggttgccgatctcaagcctatcgtcgtctcctgtttcctacgccacgatagtatgcaaccagtgcaatctgcacccattatggagctcctctagccagtcagttcttctttccgattgaccagaaagggcctatctcatgctcacaaccgtattgtgtatgatggtagagggtgtgttgactagcactggcagagttgtttggtaagttcatcatttagcaaactcgcaaactccatatcatcagctaaaagaccttttcatcctcttcgattaaatgttgttcggtagtccttggtgagttcgatgattctgactctcgatactaattattcaatctactgatgcatctcttgaatatctaggcacggagcctgcttctctgtcgtgagtatatccatctgttcatcttatctcgtttctggaaactgatgtctcgtgtgtcatgttccttttggtccctttgattagaaaactggagatatcgaagacgccccaggccttgacgccctccatgcttacacggttatcccatcttccaacacatcggaaaagatcaagatccaagccgacctgaagatcgtggagagcaagaagggaaagaatccttgcgatgagcggaaaggagtagccagaaagacaaagaagaacgaaagagtggtgattgtcggcggaggaagcggaggagcaggcgcgatcgaaggtcttcgagaggttggttgaatcatcttcccgttcctcccttccttcacttgggatgaacgtcgtaggtctgacggatttgatccatgcatttgttcaacgttaatagctcgggttcagaggtaaaatcacggtgatctccaaagaacctcatggcccgattgatcgaaccaagctcgttcgtcttcttcatcacttgttttctcgttctctcctaccttgcgcatttctgagggtctatctttctttgggaaaaaaatatctagtccaaagcgttaacgacagatgcatccaagattgctctccggcctgcttcagaatacgagtccccaccctactctatcgagcttatcacctctactgaagtgactgctctggatctcaaaggcgataagattatttatggagatgggaaagagatggtatatgatcacctagtgatggcaacaggggcagatccaaataggcttcctttggacggaattgatctcaaaaacgttttccagttgagaggaatcgaagattccaagaagattgatgctggtttggtccattattgtcttcttcttgcatttctctcgaacgtatctgacgtgaaccttccatcaccttgtctgaattatgcagctctcaaagaaggatctaaacttgttcttgtcggatcctcgttcatctcgatggaacttgctgtagttgcttctaaacgaaagttggcctcattggacgtggtcggaatggaaagcgttccgttcgagaacgtacttggaaaagaggtcgggaaaggtttcaagacttatcacgagtatgtcaatctactttttttttcttcatttatctgccttcgcgctcttttcgatggtttacgtatgtgtaatacagccaatagatctgatcggtgttgctcgtcctttgaattctccagaaaacaaggtgttacatttcacatggaggcagagatcgattcctttgtgtctaaaggtaaatatgggatatacgttcagagtcctaccatctgctaacatgctataattttctcgagatcaatctaaagatggcacagacaaggtcggcggcgtcaagctcaagaacggaaaaacctttgaagcggatctagtcgtactcggggtgggagcaaagccgaatacttccctgctcaaagacgcaggtatcgagattgagaaggacaacagtgtgaaagtcgatggattcctgagggtacaaggcttgaaaaacgtttatgctgtcggtcagtccctagtttttcgagttaactgttcccgctcttgtctcttataacgaacggttagttggctttcaattttgtcatcttaggagatatcgctacctatccgtacagaggtggaatgactcgaatcgaacactggaatgttgctgccaatcgtacgtctactctgcgttttctgactgcatcgtgcacagaaactaatcttggaccgaacgacctatgaacgtctcgcttagacggtcgagctgctgctgaatctatcgctggagatccggcaaacaagaaaccattcagcaagattccgatcttctggtccgctcagggtgctcaattgagatactgtggtaactcaaaaggattcgatgatgtatacgtcaatggggatgcggcggagttgaattttgcagcgtactatgcgaaaggcgaagatatcatcgctgttgcctcgttcgttcaccttcatagttctgtttcgcgcctaaacattgactgatatctttttcttggacttttaacgacaaaattgtatcacagaatggctcaggatccactcaactcgcactgctctgagctcctcagactcgagaagatgccttcaatgtcagaggtcaagggtggtaagaaccctttggatatcgccctgaccgcttgatctttctctccgttatctctgatcttttcgcctactcttatgattccgcgctgtatgatcaaactcgtgatttttcatctatgtttccttaccgttgtacttgataaatatgcaatcttactttctgcttacctactccaaggtggtcataattcacacagaggagcgaagagtctgtttctggagcagaaaggttgatagtcgcccgttgatcttgagtgctgatagtaatggtgctggaatgctagggttgactccatttcaagtaaatctgtatcaatctaatcttatcgtataaagaagcttattttgcgatgaatttgctgcacgcaacacactcagacaaacaattcctatcatgaggatcacaaatttgtttctctatttctttgtctcttcttctaataattcctctgtctgttcatgtctctgtctgttagctgtatagccttcacttatgactttcaagaggggtttcatatgatcaacagtcaggcaaacccatcaaactggctatctgcaaaggaggaatcaatatcaaaagctgatggaagtctagaagtcggatatggagaacaatcctccgtatcatcaagtgtactggtgtttgatacagctgccgccgtggctctggtcgccgccaccaaggccgataccaacgctcaagctgcctcagactacctattctgcctgcgcttcctgatttcgctttttcttcccctctgcatccttattctgttatacattcgtcaacgcttcaatttctttcctgtttctacgtcctgggatcattcataactatatatgtatcctctcgtttcatatcttttgcgcgaggagttccgatatgtgaaagaggactatctcactcctctttgaatgagagtttccctggctataattcttctaggaacgcgctatccatgttccttgtcagattgcgaccagaatccagtattgcatatccttatagagaagcttcttcagccagtgaactgcaagtcgagcaaccatctgatagaggaaccctaagtcccttctccgacacacccaatcaagtagaattacgacagttgtaagctttcacgtaaccacgttgtaaacccatgtagccggcctgggttcatctctgtaaccagtgccgctttcaccacagagatcgcaacgccttcttcttcctcttctctttctcaccatcgtcgttttcttttttttacgaaaaagacaatggcagacttcaaacccatctgtacgttttcgtcaaaatatgacttgactgatcttatacgtatctctatctgatcactccttatcattttcttgttcgggatccttgatcggatggaatggcggggtgttctatcccttctgtttacatcttaccaaacaaaacagcctttgccgagcatctacaactaacagcgctcgggattcaacctgcttcaatctcttttcaaacactcactcttgaatcggatcatttcatctgcgtaagagatcagaacaatgtggtcatcgttgatctgaatgatgccaatcaggtcatcagaagaccgatcactgctgattcggcggtgatgcatccgaaagagaagatcctcgcgttaaaaggttcgtgttcttccacttcttcttcatatagcatcctcccaggctgtcctcttctaggagctggtaatgtcatgtaaagaaacccagcagacgagagacgaatgtcgaacccaatgaggttttgccaatagagatgtattcggtcatcgtgtgagatgaggaaagatatttgagatggggttctccgaagagattgaacggtacctttccaaaacaacgcccaacatgatccctctagtctgtgttctcttcttgaggccctcaaacctgaaactgatatggattgtctaccttcaactatctagctggccgacagcttcaagtgttcaacttagctactaagcaaaagctgaaggctcatctcatggacgaagagatcgtgttctggaagtggatttctgccgaaacgttgggaatagtcaccgagacggcggtccttcattgggatctccaaggagaaagtgcccctgtaaaggcaagttcttcctgacttcttcgcgacttttttatatcacaataatgtacggcggaagatctatcattggatacggagtctaactcgcctcctttatacacacctttctgtcaaatagattttcgatcgattaccaggacttgctggttgccaaattatcaactatcgatcgacagcagatggcaaatggcttgtgcttgttggaatcggcgcgaacaaggacccctctggattcaaggttaaaggaaacatgcaactttactcacgagatcgtacgtatcatctctttttttctcactcgccatatgcttcttttcttccctcattttaccaaggaagaaactaaacaaatatcttcccgaatcatcaggtaaggtatctcagcctattgaaggtcacgccgccgccttttctcagctcaagttggacggagctcctgccccatcaaagctcttctcttttgccgtgcgaactgctactggagccaaggttcgtgcttccttatgattccctgttttcagattcttccgccgtgcaacgttcgctcacctttctgatgttcttgtttcttctagcttcatatcgtcgagattgatcacgctgcctcgaatccgccattcccgaaaaaggctgttgacgtgtttttccctcctgaagctgcgaatgatttccctgtggccatgcagatctctgcaaagcacggcatcatataccttgttaccaagtacggtttcatccatctgtacgacctcgagagcggagcttgcatctacatgaacaggatcagtggcgagaccatctttgctactgctgagcacgaggcaaccggaggaattcttggagtcaacagacaaggtcaagtgttgagtgtaggtttagacgagactactgtcattccgtatatccttcgtaagtggcaatgtctaccatgtatctcaaagtttctccgacaggaaaggacgctaatctgtttttttttgctttggtgtcattcaggaacccttaacaacacggaactcgccatcaagctggcttcccgagccaatctgcccggtgctgatgatctttatgttcagcaatatcactctctcttccaaagcggcaactacggagaagccgcaaagattgctgccaactctcctcgaggaatcttaagaacacctcaaacgatcgaacagttcaaggcagtccctgtccagcctggaactttgtcacctatcttgcaatactttggaattctgcttgagaagggtgagctgaacaagattgagacgctggaactcgctcgaccggttctagctcagggcaggaaacagttgctggagaagtggcttaaggagaacaaggtatgcactgggtttgctcacacgcggatagttggggacgcgtataggtcacgctactgacaatgtttgacaaattacttcgtgttaattattaactcgctcaatagcttgagtgcagtgaggagttgggggacatcgtcaggacggctgacttgacgttggcgctgtcggtataccttcgagctaacgtgcctaacaaggtcgttgcttgctttgctgagaccgggcagtttgctaagatcgtcagtctattttctttcatatgttaccttgatgctgatctaaggtcttgttctgatctatcctttatatgctgtcgttcaccatcgaacaggtcttgtattccaagaaagttggataccagcctgactacgccgcgctcctgcagcacatcacccgagttaatcctgatcagggagctgaatttgcctcctctctcgtaaatgatgaggccgggcccttggtggacgtcgagagagtgcgtttatgatcatacaaatctgatcagtgattataacctattctgacatatcttctgttttccaggtggtcgatattttcatggcctcgaacatgatccagcaagctacctctttccttctcgacgcgcttaaggagaacaagcccgaacaaggccctctccagactagattattggagatgaacttgatcaatgcccctcaggtggctgaagccatcttgggtaatgagatgttctctcactatgatagacctcgaatcgccaacttgtgtgagaaggccggtctcttgcagaaggtgcgactgtttttacatatgttaaattgatcgcctcaaccgcgcgtgtcaattcaatactaactccctgaattatcatcggctgcctgagaatttctaggctttggagcactatgaagatctctcggatatcaagcgtgttgtcgttcataccgatctacttaacaccgagtggcttgttggatactttggacgactcaccgttgagcagtccttggcgtgtctcgaagagatgcttactgtcaacattcgacagactcttcaggttgttattcagattgctacaaagtattctgatcttctcggaccactcaaattggtcgaacttttccaaaagcaccgaacattcgaaggattgtactactatctcggttctgttgtcaatttgagtcaggaccccgaaattcactaccagtacattgttgctgctgcccggaccggacaaattcgagaggtcgagaggatctgtagggaaagcaacgtctacaacccggagaaggtcaagaacttcttgaaggaggcccgacttcctgatcagcttcctttgatcatcgtctgcgatcgattcgactttattcacgatctcatccttttcctctaccaaaacaacctcacttctgccatcgagacatatgtccagcgagtcaactccgctcgaactcctcaggtcattggaggtttgctcgatgtcgattgtgacgaagccacgatcaagaacctcttgtcttcagtcaccggcgctttccctatcgaggatttggttcgagaggttgaggagcgaaacagactcaagttgattcttccttgggtagaggctcgagttgcggctggtcaacaggatccggctctttacaacactttggccaagatctttgttgattccaaccaaaaccctgaggctttcttgaaggagaacaacctttacgagcctttggtcattggaaaatactgcgagaagagagatccttaccttgccttcatcgccttcgctaagggcttctgtgacgatgagctgatcgccgtcaccaacgccaacaccatgttcaagcaccaagctcgataccttgtaaagaggcgtcttcctgatctttgggcccaggttctcgttccggacaacatccatcgacggcagctcattgaccagatcatcgctaccgccgttcccgagagcaccgaccccgatgatgtctctgtcactgtcaaggcgtttatcgagaacgatcttccgactgagcttgtagagctcttggagaagataattcttgagccctctcccttctcggataaccgagctctccaaaacttgttgctccttactgccattagagccgataagggcaaggttgtaggctacatcaacaagctccagaactacgattcggaggagatcgccaggatcgcggtcgaacaaggattgtacgaggaggccttcactgtgtacaacaagcatgaccagcacggactcgctatgagtgttttggttgagcacgtcgctagcttggaaagaggttctcagtatgctactaagatcgacaagcctgaggtttggagccgtctcggaaaggcccagctcgatggactgaggatcaaggatgccatcgattcttacatcaaggctaacgatccctcgaacttcgccgaggttattgagctcgctaatgctgctggaaagaacgatgatctcgttcgattcttacagatggctcgaaagcaggcccgagagcctaagatcgacaccgagcttgcctactcgtatgctaagaccgaccgcctgcacgacatggaagaattcttggctaccaccaacgttgctgacgttttggttgttggagagaagtgtttcgatgatggtctctaccaggcctccaaactgctcttccagtcgatttccaactgggctcgacttgccacaacgcttatctacctcggagaaaaccagcctgctgtagatgctgctcgaaaagctggaaacactcaggtttggaagcaggtcaacgccgcctgtatcgacaagaaggagttccgactagctcagatctgtggtctcaacttgatcgttcacgctgaggaacttcccaaccttcttcggttgtacgagagaaacggttactttgaggagatcatctccctcatggaagccggtctcggtctggagcgggctcacatgggcatgttcaccgaactttcaattttgtactccaaatatcgacctgagaagctcatggagcacctcaagcttttctggagcaggtgcaacttgcccaaggtgatccgagctgctgagcaggctcacctctggtccgagcttgtgttcttgtatatcaagtacgatgagttcgacaacgctgctcttgctatgatggagcgatctgccgacgcctacgagcaaaaccagttcaaggatgtcgttgtacgagttgccaacgtcgagatctattataaagctctctcgttctacttggccgagcagcctcttttgttgactgatcttcttgtatcattgactcctcgaatcgatcacacccgagtagtcaggatgttccgacgaaaggacaacgacaacttgccattgatcaagaactacttggtttctatccaacatctcgatatcgccgacgtgaacgacgctcacaacgagttgttgattgaggaggagcaagtccccaccttgcgagacagcatcctcaacttctctaactttgactcgatggcacttgctcgccgcttagaagagcacgagcttctcgagttccgacgattggccgtcttgctctacaacaagaacaagaaatgggaagagtccatctcgctcagcaagcgagacaagctcttcaaggatgctatcctgactgctgccgagtctggcgagggggaggttgccgaagaagtcttgacgtactttgtcgacatcggaaacaaggaatgcttcgctgcaactctttacctttgctacaacctgcttcgaccggatgttgttcaggagctttcatgggtcaatggtttgaacgacttctacttcccataccagcttcaggccgctagggatcaggcgacgagtatcagcaagctcaaggcagagattgaggcgctcaagttggctcgaccgaaagctgccgaggaggacaatggaccgatattagctcctggtttcaacaagacattgatgatcaccgggggaggagggatgcctccgatgaacggtgatggagtttaccctcaggctactggttggggagcaggattctagatcttttttcattgttaaaaacaagtctaacttgtcctttccctttcctttacgatcacggtttctccattttcaaacttttcgtttccttggtttctacatttatataagcgttcttctcgcttctcgttatcttgtgaattttcttatgttataaccactttctctttctctctttctcgagatgaagtcttggcgcgagccgatgagaagcacaatgaagcaggacaggacacatgaacgatcacattaattcaatctcggcgctatgaatcagccttcttctttttcttacgaacttggagaacagtcaccggttgaagtgtacccttcgatacgtctcggccaacaagcgcgctatcaccatcagcgtctgatctctttctcttcgagtttgtttcgtcgtcggtagtcagacttgagcttgactcgattgaacgttcgacgtactccaaagcaccccactctccggtcaatcctctgattgagtcccagattatcttggaactactgatgacgagtggattggacgaaaacgactggttgagaagcatcgaaagaagtctgataaatagattcttgggaagttcgcctggccgtcgctttggttgggtatgactttccatagtagtcgggacagatatgggagtaaagacaagagtagctgaagcagaggtggatggtagaggggaagaggaaagagtggagaggataaagaatccgacctgggagccaagtgaacattcttgtcggaaggccaatcgttcgtagaattcgtcctgagggattgtagatagtctagcagaagcaatggttcgagcagccagtgctttattcgacacttcttcgtcgtcgttatcttctccttcgtctttgtccatagcattcttaggctgacctgatgcgtttggagttgttgaagaagaggtaatggaactagcagacgcagaagggagagaaggaagagctgaattcgaagagaggaggcttgaggatcctgtgcctgctccgggtgtagacagttcgagtagaaacctggtcctaggatcatcatcgaacgtaggaatcgttgaggcaagcgtcgggatcactgaagatggattcggggcttggttgtgcagaggatggggtacgttcttgaggtcggtcgaccatgtaaactctgtgcgtctgccaagggtgttcagagtctctccttttgacagaccaggtaggaaacattctaggtcgacttccgaaggtcccaatccggcaagtttgatcgagcgttctaaaacgtctgaccaccatctacaaagtgcccctcctgataggatctttttgatcttgccttctgtttcctccggatcaagtccagaatccgggaaaaggtattgccgttgacttcttgcaaacagatgaacttgaacggtcggtgtcggccgtgattgagggcacaggtaataagacaggaaagatgagatgatcgtccgggcgtacggtcgagaaggtagggatgaaggcagagtgtaccctgtagaatctgctttggagatgtacaccattgtatgagcttctcgaggaaggataaagatctgtgcttggatagatatcaaggcgatagggttggtgctcgatgtcgtggtgtgttcaacaccggacttggtcgcgcaagattgtgaagcggcatcatcatcagcagcagtaataggggaaggagaacttgatagatcggccggttcgagatgaatatagagaacgaggaggacgtcttgaatagtggtccctttcggatgagctgccagatgtgtgtagagagtatttgtccgacggggttctgattgaagcaaatggactgtcagtggtcgaggagggcaaagcgtgttcagcgccttaacgacagtgtctagtgcggacatttgtctcttcacgagggtgagtagaaacgaaggagagtgagcgagtgaaagaacaaaaggccggtagatatttgattatgaagcaacatgtagccgtcagccaaaagatcagccattgcacacgacgatcgatcatgagaactgacaaagcgaaccaaacttgaacggatccggacaaacagaagaacaggtgagaaggagaattaagaagaagcagcctcggacacgcagagatcaagcagtaaaggtgtttcatttgttggatgaacgatctaatgatctgacgcgcgggaatattaaatgacgcccaagacgatatgatgacgcgtcagtcagattccccgcgcgcgtgttcaatgtgacgtgtgtgtatgtccccaaaggagtcaatcgagatcggtgtttccttctgaggctcggatggtcaagctgaagatactgagagtcttggaggcttccaaagagctggttgaccgagaacggattgatgacgtcgtagggttcactctagattgaagctgttgacgcgcccgaacgcgctctgctgacgcgtctgattcgcgtcgcgtcgcgtcgtacgcacgtccctctcgtcccccttaaattagatcgatcaacttttccgctcgtctctctttttctctcttcttctctcccacaacaacatctctctttcccttctttcttcgttcattcctcgttcttcatccctcacacacatccatatccaaatacaccaccatgtggggtaagcttgctgttccctatctgtcttgcatttgtttctcttcgtttttctgttttccccgtccttttttctttttgctcttgttcattaccttcttttttccgtctcttacaaatccttaaacgacttgttgtcgtctacctttatccttctttccttcactaacaaactcgctttgctgaactcttcacatagtctacaagcgagacggacggaaggagcgtgtggcgtaagtgtttttctctttttaagcatcttttcactcccatgttggcccagctttctctgggatacatccttcgcgcgacgcgctcttcatcacctttccgcgtcattcctccctccttctgttttattggctcttcgagccaagtcctcattcgttcaacatcaacaccctcttccgtcttgttcatctctctcctttgaccactatttttcctgactgtcgtcaatcgctccctcatgcccttcctcaatcatcatttattgttgcactcaccttgaacagcgctgaccaagcatggctactcttctttccttccactctagtttcgacaagatcaccgctcgtatatccaaattatgttacggtttggatcccaactttgtggagccaattgagtaaggattttacctctcttctcgatcaatgcttcccatgctgagtgatacttcttccgcttcacatagaattaccaaaaaggtttgcatgggtgttcaccagggtgtcaccaccgttgagctcgatgtgagttctcataatctagttgtctcatcgttgacctgtttgtccctacctcaactgaccaccatttcctattaaaaagaacttggccgccgagactgcagcttacttgacgaccaagcaccccgactatgccattctcgctgcacgaatcgccatctcgaatctgcacaaggagacaaaaaagatcttctcccaggtgattgatgatctctacacttatgtcaacccaaaaaacaacaagccttctccaatgatctccaagcagacctacgaagacgtcatggccaacaaggaggcccttgattctgccatcatctacgaccgagatttccattacaacttgtgcgtccttactatgttgtttctcactatctgaacatatttgtactgaccctcgactttctatgaacagcttcggattcaaaacgctagaacgatcatatctcttgaggatcgacggaaacgttgccgagcgacctcaacacatgctcatgcgagtgtcggttggtattcatggagccaacgtcgagaaagtgattgagacatacaacctcatgtccgagaggtacttcacccatgcttcccctactgtacgttcgtttggtctttctttttgctattgctatgtatctgctgacatctctgtccttgttttggactctctcttcagctattcaacgccggtactcctcacccccagctttcgtcttgcttcttggtggccatgcaggatgattcgatcgagggtatttacgatactctcaaacagtgcgccatgatctccaaaactggtcagttctctttgctccatcatcttatgttaccagaaacttcgaaggctgaccgagatttgtgtcttaacagccggaggaattggactcaacattcacaacatccgagccaagggatcgtacattgctggaacgaatggatactccaatggaatcgtgcccatgctcagagcttacgacgccactgcgcgatatgtcgaccaaggtggaaacaagcgacccggagctttcgcgtgagctgatatctttcgtgtgatcttccttcaaaaaaaaaggttctcgcaactgacggcttctcctaataatttttgggcgattagaatctaccttgagccttggcacgctgatatttttgatttcttggatctccgaaagaaccatggaaaggaagagcagagagctcgagacttgttctatgctctctggattcctgatcttttgttcgtatccgccattttatcttgtgtaatgcatgattatcgtgactaaccctgttttcgtcaatttcattcccttatagcatgaagcgagttgaagccaacggtgactggccgcttatgtgccctaacgagtgccccggcttgtccgaggtttacggagacgagttcgaagccttgttcgagaagtacgagcgagaaggcaaattccgaaaggttgtttctgctcaaaaggtctggtacgccatcctggagtctcagactgagaccggtggaccgtttatgtgctacaaggttggttctctgttccgttctttcgaatttacttgggtccgctttttggtgttaacatcggtatctttgcactcgcaggaccacgccaatcgaaagagcaatcagaagaacctgggtgtcatcaagtcgtccaacttgtgcactgagatcatggagtactctgcccctgacgaggtagcggtctgcaacttggcttcaatcgcgctcccgacgtacatccagcacggagtgtataactttcaaaagcttcatgaagtcgtcaaagttgttaccaagaacttgaacaaaatcatcgatgtcaactactgtatgcttcctcctctcttgtgcctatctttgagggtcataggtatcacgctaatattcacatcctatcttcaaatgcttttagaccccgtgaaggaagctcgaaactcaaacatgcgacaccgacctgtaggtctcggtgttcaaggtctcgctgatgcgttcatgatccttcgaatgcctttcgagtctccagaggccaagcttctcaacatccagatctttgagaccatttatcacgccgctcttgaatcttcttgcgagatggctgccatcgatggtgcctacacctcttacgagggttctcctgtctctaagggagaacttcaatttgatatgtggggtgtcgagccgacgggtctttgggattgggccgagctcaaggagaagatcaaggtacatggagtcaggaactcattgttggtcgcgcccatgccgacagcttcaacctcccaaatccttggtttcaacgaatgctttgagccttacacctcgttcgtcccctttttggatccaatcgttttcttgaatctttgttgactgacccttcgaatgtatataggaacatctacactcgacgagtcctcgccggagagttccaggtcgtctgcccgtggttgctccgagatcttgtcgagcttgggctctgggacgatgatatgaaggatcgaatcatcgctcacaacggatccgttcaaaacattgcccagattccggatgagttcaagtccgtcttcctttaacaatctagagtttcaagactcaaagtacaaggtactgacatcaactaatcaacttggttactcagggcaatctacaaaaccgtttgggagatttcgcagaagaaggttattgagatggctgctgaccgaggagctttcgttgatcaggttagtccttctgttcattttctttctctttctattccgtttgatgctttatactgactagtcctttacctactcctttgttgatgatagtctcaatcgctcaacattcatctgactaaccctacattcggccagcttacatccatgcacttttacggatggaagaagggactcaagactggaatgtactacctccgaactcgtcctgccgctcaggcaattcaattcactctctctgccgacgccatcaaggaagccaaggaggccgcctcaagaccggcttccaagcccactcctacgtctactcccgtcaaatctagcccggcttctgtcaagggactcaccaacggggtgtccaagttggctttcgttccaccttcgatcagcaagcctactcctgctcctgcttctgctcccgccccggctttagttgacgctgttttgaagccggtgcaggtcgttcctgtgcctgcgcctgtgaccaacggtaatgggaacgggaatgctgtgaatggaaacgggaatgtgtcggatgagtcgggggatgaagagaaggaggtgacgtttgaagaggcgaagagactggctgccgagcgtgcagaggctgctcttctttgctcgatcgagaacaaggaggcttgcatgatgtgcagtggttaagcctctctgcttgagccaggagcctcacttcgttgttctgattactttattatatcatatatttacccgttcattcataagcatttctttgacattttttcgtgctagatgtttgttcaccctttctgcatttttctcttgttgatattcgtcttctttttcgtctagctcttttcgtctttttctccctttgattgatacacccctcctctctattaccctcatctatcgctttcttcttacaatacgtagtgtcctttgtacttgtgttttattcatatccaatgcacagtgactcgttttgatctgggaaaataaacagaacaagattcttcaagccacaggaagagacaggctcgaacggccacaatcccttccttccttcgctagatctaagatccggaaaaacgagcatccaccttcattttttgtgatcgactgaccgctgttgctcgtggtgacgacgacacttgggccttttccttcgggtttttcgtcaacaccacccgaacctgattttttgttgcacatccagaaaaagacgtacggcgctggtgtcggcggcgatgagtgagttgggttcacatttgttggaggggtcgggtgagaactcggattgaacgacgtagtcatcgacgacgacgacgacgagggtacgatccgccggttcgtgctcactcttcctcgttgatctgctttcagaacgcaaggtgatttacagtaacatagtggggttccttgatggttgatgcctggaggtccatcgagcgatgatgacacagacgacgaggatgggtgaggagcaaagtctgctctgtagaatctgtttataaacggtcggagacacccgtcgttaccaaacggaagacacgcaagagggaagaaaccttgcgaaaaggagcgaaaggagaaggagaagaagacgagggacgaaccgaaaagtcacagcaatcctcgctttatatgctttcctttcctcgggtgggatccactgccggtggacatcataagatggcttatagatatctaccgtccgttgcctcgggatcgaatgtttgtatccctcttgaacagggggatgcatgattaagaactggtcatgtagatgagaagaaaattggatggtcagtgaggaagcgcgcgatacgcactctggtcgcaaacaggcgaagacaaacggtattgtgtccgaggggaatatcatatgttcttggatctgcttgttggtcagctatagccggatcctttgagctcacagctctcaagcgaaactttcgtggtgttccaagggaaagcgaggcaatcgttggataaggtccgaggtcttttcgaagcgaatggttagaacagaaaaacgaaaagaaacaccgcaggaggagattgaatcgaaggcgtacatgtaagttggtctgcatgcggacccacactattgaaacccaaatcccatgaaaagcgcacgacagtcaagtatctttcagggttcagctttgagaagaaaaagaagggaagttctgagaacattgcgaaagaccgtacccttcctcaccgccttcatacctgttgcatgcggcgacacctgctttccaagttcccatccattcaccttcgtaacgagctctactctgaattgacgcattcacaattggctctagtaaatcggctgcctcctgaagcaaagctgggaattgtggaggtggtggcgtatcggaagacatattgtgccctgttgatattgaacgaggagagagcaagcagtcagagagacgttgatgtatcgggtagatatcacacgagcaagaggagtgatatctacagttcttggctgtttctgttaaggctgatggtgtgtatggtggtggattttttgaagacacatagaagctcgtctacattaccgaaagaaaagacgtatagacacattttaattgatggaaatatatcgcaccagacgtcgattcagaagactgactgtgtgtggactttggacctctctactcccaatccagtatgcgagttgcttccatgttttactgtcctcgatcagttgcaagaagagcgcgctcgccaagttcgatgaaagtggtgagggaggaactactattgctgggagatgttttctacgaagatggtctgttgctagagtcaatagaggaagagacgagttggagttagaggaaggagcggttggatttatgttggagtttggtgaaaagcgaatggacagatcaggatgtataacagatgatagctgaggtggcaaagcagctctcttgctaggtaccggaggagaatctgcccgagatcgcttcgactcagacactgcagaagctgaggaagaagatgactgttgaggagccaaccattgagctaccgaagtgggctggcttttcgatttctgctcgtgtttaccaattgaacggtcgtctgcgaggttggataagtgacgagctgctagctggggatcaccttcgtgatctaccaaagctctgagaagatcttccggtgaaaactcttgactcggtgggagcagtgagcaaaggatcatcagcaaaagctcagtatccatcgtgtatggtcgtgatggtcagttctaaatctctctctatccagaatcggtcagtttgctgatgatggttagtggtcggatggaggagaagactacgaaaattctgtagtcgtctattagagaaaattcagaaaatctctagtcgaattcctcctgccgaccgtcacccgaatcagccagcccagcgtcatcctctgtatcaatcaaccatcatcgacgagaatgagccatcggtcattcctttcttttcttttctgtctttccatcgccttcgtccttctggccagacaggcatcggcagcagcgctcacgacagaactcaatgcagatgagcgagcctgcttctttgcagatgtagatcaagtcggggaaaaaatcggttcgtccctcttgttaatgtgatgtcgtgcgatgggatggtctgctagttacgaccagaatatggttctacgtatatcagatgctttgatcagatcgaaacgacagtgtcgctcaccggttctttcgacacaggcttttactttgccgtacagagcggaggctcgttcgagattgactttgtggtccagtatgtataccaaccctttcattcttcagtcaactatggtcgaacatctctgatcaacgactcatccttcatccttggtggctgacgcgaacagtgatccggatgacaagatattactcgagggactggcagagacccaaggagattatattctcacagcaaacactgttggagagtactcgttctgctttgagaacgaggccagtctcactcacaaggtcatcgactttgagtacgtgtctatggccctgcttgttgcctgctttgaactagacttcagccactgacatcttttcgttgttcttatttctgggacaattcaacaaacaatttgaacagtatcatggtagagtcagaacctcggttggctcttcctgggaagcagacggctatctcggaccatacatcctcgttggaagaatcaatttacaaactcaacggacttctttcttcggtggtcagaacccagaaatagtatgtcctccctcgccatttgtcttgttcttgtttttctacgcgcatcaagctatttatgctagagatcaattctgtagagctgacctatctcttcatcgagaaaatagtttccacacgcgtaacaaccgaaacgaaagtactgttcgatccactcagtcgaggatcttctggtactcggtgatagaagctgtggctatgtgtctgatgtcgttgtaagtcttgcttctgtctctctgtggtggtgatgatgatggagggtgatgatggtgatgaagacaggtctacgtcagacgcgtttgctcacctttgtcgactgttttgtgcatcatatgcgatcttttccttacagtatgcaggtttacatccttaaaacgttcttctctcggacagccagtcggtatcgcgtttagacattgtggacattgtggacagaggggatgggacgagcgccggtcgtatttttttctttctttctttctttctttcccttcttcttcttatgttacctgccttgactgctgctactgatgctgatgatgatgatgacgacgatgacgagctaatgagcaggtcggctgccagattatccgatgaatggccacatgaagaagatgtacaaagagatgaaaggaaagaacgaaagaaaagcaagaaacaaagaaagacaaaatcaaacacgacaacttctcctttgaaggaaaccatcatggtcaactcgataagaaggccgacaccatacagacctgttagaccccatgtacttccttcgtcctccgcttccacctcggctcagtctcctgctccaaatgctccgtccggtccgggttccactcgggcccacaagccagttccaatcagagttcccagacccccaagacctcaagtctccttgcacaacaacttgggtcagagacctcaagccaatggtccgtcaggaatggctgctggagtcccgaaaggcccttctcgagctgaggaagccaatcctcgggcttttgtcaagattgagcctcggctgaatcaaagttttcctcccgctttgccatccaagatggaatggtatccacctcgctcgttggcttcgtctggatctgaaacgtttcgacctccaccagtgcgaccactaccaccggccgctcgatatgcaccgtctatgactcctcgtccatcctttggaacagatgtgagagcaactcctacaggtcctcggtcgaccatgccagctacagttcctccaccgccatcacaaccgcgtccggccttcaaaggagacgcaagaacaacgcccaccggtcctcggtcggggtcgacagcaacaattccagctccgccaagtggaccaagcatctcaaagtacaagcaggaggtcaaggttgaatggaagatccccaagttggaacctgggctagtgtctcctcccattccatccttctcggctcagcatggtccaaccttatcatctcgacccactgaagatcggcaagtcagatcgccagaatctgggcccaccatcccgtctcattcgcaattgcaacgacgagaatcaccatcgtcttcaaacccagggccagtatcgtctgtaccaaccgttacccatcatcagacgcccccagatgataacatccctcatcgacctcggtcatctatcggtcgggttccgcgcgagcctgtccaatcttcgcttcaacccgagctcaacctttccgtttcatcaacatcaggacaagcgtcggacatgaatcggcccactgaacccggcattttacagcaaaacccctcatcaatgggccgtgttccctcagttcatacgcctccaatctcgcaccatgtgtccccctcacccacacctcctccaatcccttccactttagcaccctctgtggccgtcaaagctgtttctggtttggcttctgaactctctactcctctgtctgtgcctactgtagaaattgtggacgaagacgctttagacagacttcgcttggcccgactggaagcagaagccaaggcacttcaagaaaggatccgactacggcaagagagagaagcaaatgaagcacgaattcgggccagctcaaacatcccgggagatggctcaaaggggacagaatcgaaagtaaggataggacatgtgccagtggatgcaagagagtttgagatcagacggttcctcgcctcaatgggatcacccatgtacgttgcctcgctctcttgtttcttacttgttttccttgtacttgttcaattgtcttgttactttgacaaaattctgcgcgcacggaaacacgacttacattcgacttctcttttcatttttctttcacaaaagtcttcacctcgctcatcacgcattatccaattcgtacaccgcaactttccggacattctatgaggcagcgaacatcatacgcgtcctctccctcgaggattttagacctggctatcgactttccctaactcctctcgatgaatcaacccaccgctccccatctctaccattgccgccgccaccacaaccaccgtccttacctctatcctctacgacgaatgctcagaattctcctcaatcgcctaccggacaaccaccgacacccgtgtccctcaatccaactctgtctcattcagaaacgcgagtggatcggtcatcgagttccagatcttcgtctctgaatccactgaatttctcaatcctgcctttgagtccttcagttgagccttcggtgccattggtgagcgatatcgagagaaggactccgacaaaaaggagggaacctatgagtgatgaggtgattgatttgacgaggttctcttcgtcgtcgccgtccgcggcgtcgtcttcagacagaatatactgggaagaagatacgaagagagatgtgagtagggaaaagagtgatgataaaggaattcagaagaggagaagaacgataggggaagacgaatcggtcgacgatgaggaacttcccccttctgaagatgataggcagaagagactgaaggcgcctcaaaaagaaccgatcaaacgaacaaaagagaatgttcaacagcaggagaaggataaaggaaaaggcaaagggaagagcagagaagtacccgcttcttcaactattcggaacccatacgaaggcccttcgacaggttcggcagctggttctcggcgaccgtcgacagatggtgtctccaaaaagctcgagctacatgtgcaaaccaagacaaatctagaattaagacggccaagctctcagaggacgaggtggattgcctctggcgaaggaatgtggatacatggatttacgaaaggtgcgtttctgttctgatctctatgttttcagttaacacgatgatgctgttgactctaatgggtttggaatgtgtgcacaggtgtgttcaatatatttgaccgggagacaagactgtgagtctctttctctcggttctctttctcctttccatcttctcttgtactcattcagttttggattctctcttcagctctgtcggaaaccctgttcagctatcctttccagaaggccatatcgtagaaaattacatagttgccggccaacgggtcattgtcggacatcgacatccaaagatcgaggagttcgcacctccaagcataagaccggtccagatctcgtttatcgagcttccaaaagatcgtatcaattttagaggacagcactcgacaggacatatctctctgagtccccatcatgcattgggattgtccgctttagaagcgttaccgtcgaatgccttgaaagcaggtgatgggcctcgaacatctgcttttataactggagggttcgatcattatggtgcgcacatacagttttgacagcagacggcttcagatgatcgatgtgtactgtcgaagcttacgctctttgtgactttttttttttggttggtcggcccttaaaacgatagttcgaatttggaaactagatgaagaccgaaaatcgtcatcgtgggcaatccatcaaggtcattcggctggagtgaacgcgttggcatataatcattataaggtaccatttgaccttccttgaatttgtctacaacctgtctataatctccgtcttggttatatcagagagatctaactttcattgaatttcataccggatagaaacaaattctaagtggaggagcggatggtcgaggtaattctatctttcaatttcatgatcgatgactccatgcgcattatctgatgatatgtcttgttttatatcagtcctggtttgggatgcaaactctacaaagctcggctcttgggagcttcccaaaggaggtgacccagttacacaactacacctcagtacagatccaaatttactcactgtggaggttcgttttttcttctttgccatgttcttccttaggccgtttctaacctgttcattaattattcactgcgccatcgattgatagttccgaagggcaaaacctttgtatagagtgttcgaccttcgaacggacaagactcctgtgctctccatcgaggaggctgaggagacaaacgcgaaaggaacgaccaagttttcgagagggttctacaatgcaaaccaaaagttcttcgccaaaggaactaaccaggggacggtcaaggtatgacatcattctcaaatgctcatcaagataaactgaactctgtaacatgttcttatttattatcatcgtcagctttgggatcttcgaaagctcgaccgtcaaacatcaccgagtaacatcgtaagtccatcggccttcactgacactgtggacaagtggcgatcaagcttccatccacttacgacttctcctcacaagaagagtgttagagaacttgagtggctaacacagtgctcgataaaacaggttcaactacaaccgaaaggaaccgagatccgacaaattgtttttgaggatgaaggaagtgtgctgttggatctgaccaaggaaacgctctgcgtcaggcgatacagtttttgatcttcttagtcacacagtctaatgattgcagcatgttatcggatacaggttggcaggttgacatgcacatgtcatggacacaagagaaatgaaacttgattcgtcatgaaagacaaaatgcttagagagaaaagaagacgatgctagtggtgattatgatattgttacaattgttctggtgaaaagagctccagcaagttaacccaagtttgaggttttgtatttgctgacgatggactaccagacgaagatacaacacacgtcagagatattcaggtactagactcctacagagcgaacgaggagggcactgaccttttgctgagcattcctagacactcgcctgtaagtcaaaatcaatcaaattaaaagcaaatatgagtcatagtcgagattgaaccagtctattagattgtcagaaactaattcaacacatacatataataatcgataccgctttatgaaggaaggaagggcgattgaatcgttggatcaggaacaagcttctatataaaggggcaaaaggtgccaatggtgcttactccgcctaaaacgatatgcagattagcaggtatttctctttagcgttatcaatgatgtgaaatgttacctacaaatgcaatttcccgaaggaactcctcatcgtgactagaaacgaacattgaagtggaagagaatacatgagcttcaaagcgcttgataaaggaagaagtgatcatcaaaagctcctacgtgatgacaattagttggaagtttccactcgatcgtctctcctcaataattcttgagaaaacaggcagtattggattagacaagatgactgattcaagaagccaaacagagcagaagcttactgagctaatgattcagctagcgatcggatgttttcctgagtggagaatgaaaagttagttgatttgtcgtatggacgaggtgagttccctttacttactttgtccaaattggttgtgggcctaaagatatcaacatacgaatcagccaacttctcaacatgtgacgaagacataattgaagggatttactcgtctaaggcaatgattccgcaattgtggccaaatgaatctgagagtgctagtcggatgatgatcgaagctagaactttctgaccagcactacaacgaccgcgcatatccatctcgacctgatccttgaccatgacgacctaaatgcaatgcaagtccttttgaatacatggtctgatacgccggagactgaaaataatgacatactcgatagttataacttttcctggtcgtagccgtcttaggttcttcagagtcacttctgatgagaatttgatcgatatctgaaggatgtaccaaacacgaagccttcagctgatatatccggatgattttttcaacatgacgggtgatcgttacctgttccttgataagtcctgttccataaatatcggatgttgtcattgatctccgccatcttgacactatggtatctcatgatagcactgtacaatcgatagaagtcagcagattgcccaatgacgattagacatagcaaaattgaatacctatccagcgctttgccgtatttttctagatcgatgttggcaagatcggaagtctaaacgaaaaggtacagtaaattaggaaagatcggtctacgataagatgttttatttgaggacatgtacactagaacgtactttgacttcgataagtttgctcataaattctggattgatgttcttgtactctgtgttcagagtgtccttcatctccaaggcctgcgctcgaagagaagagatttctcctaatagagtcgcgtgctgacagaaagaaaatccaaaaaaattagatttgattgtatgctacctaaaaaactcaagacttacttgagaggtcaactgctgctcttgctcctttgccttcttgtacttcctagcatactgatctctagctcttgaggcttcctccaaaccgagtccttgtatctctatcttggcgttcctaactcgatccttgaattgacgatgacgaatgttatcttcgatgttctttcgggagcggtcggactgatagatttcagactcgaactgcttgatgacctcatcatggtgagtgattaaagttcgagaccgcttcagatccccctcctttctcgagatctgatcattcagatctgacaaacgacgaggaccttcgcttgctgtccacctaaaagacagacagagtggataaatgatatgaccagataactatcactgaagcatgtgtgatgaggacgtactcttcaaccgcctctgatgattgatcaagattcgcgatggcttggacaagtgatgctaaacgctcctccatcgtggacagctcattcgtgaagctacttcggaactttgtaaattcttcctgaagtcgctgaatgggtacatctgcagcagcgaccttgtggtcgacatcctatggtaaagattacatgaaattattaagttatataagacttgtcaatatagaatgtactaggttgacttactgcaagttgttgcctgagatcgtctatcttctcacgagatgtgacaagtcgtttttcaactgtctgaacttgtcgaagatctgcttcaagagtaaccaaacggaggttaagattgttgagctgattacggtatccctgaccttgtttcgataagtggtcctcgtccacgctgatctgctggagttcttgacggagtctctttcttttgaaaacgggaaagggaaatgaattcaattcagcttggtatgcgactggaaagatgattaagttaatgagaaaaatacaaacaggtcgatatttgccttctgcaggtcatcctcaacatcgacgacaggtctcgttgatccactggctgtcaaacttcgatccaattcttctacgccctgctttaagctagaaatttcttctagaagtctggcgagttggttggaaacttcccggagctcttggagttgagtctctttctctctgagtgattcaagagacgcaagggcctgagaatcggaagggcgaaggacatcagtatcatttgttgtggaaataaataaaagttgcgaataacaaaggaatgagtagaactcaggggtactttttctagatctgacttggtttgttcccttcgcttctcagattctctgatctgctctgtcagcctctccaactcttcatcctctagagcatgtatccgtctttctggctccttcaactcgttgagcttccctaattgatcggtccatccatctaggtcctcttggtacttttctgtggagtcttcgaccgatctcctagtcttctgtttgtggacctaagaagttttgaattcaaacaaacccaagatatgaaaagtggcattgagccgcaagcgcaacaaaagcaaagcagaatgttaaaacgtttcttccatgaaatgggacttacgtaggccagtatggtcttcatgtctcgatcgtccacagatcgattacaacctaagcatacgtgtttgctgttgatagatttttcaaccatctcgaagagtgcaggaagttgtccagcatatgcgatatccctatgacaacatttgaacagttattaaaaaaccgaggtcgatccatctgtgatctgttcaagatgtgattatggtggtatagatagtaatatcacataccctcgtgcaagctcaatctgttccaagcagatcttgattccagaagttagatcctcagctccatcaacctcctgtatagccgcatcaattttgtcttttagatctgtttgttcagacccaaaaagacaactcgaagtcaagtctctgataggaagttcgatttatagtgatgacccaccagacagttcatgctttgcgtctaatagcttgtccttgtcccgctgaacggctgcttcagcttgagcgaacactctgtcagctttcgatctgtctcgttcggcgtctgccacttcaccgtctttatccctgttgcacaaccaaagagtatgaaacaatttagatctgctcgcaaaaagaggtgcaaaacagtgaagagaccaacgatagagctttaacaacatctcgaatcatcgttcgctgaacgatacttttccctaccaatctttgaaacttttcagtattttccgttgtgctgtataccaccagtattgaataaaatcagtggctgaaccgtatctagcagaatttccttgataagcagaggatagctttgccagaagatctactcacattgatgctgcttccgcctccttttgcatcagcccttccttcttgatcgccaactttgtctgagtggccgaatgatgctgaagttcactcagctcatccgtcattaaattccggcgattatcaagagcattgatttctcctctgatccttcgcttggtttcttcatagtttgcagtcttcaacccaagctcaacttcatccaagcttgtttgctgagtggctatgtccgcttggagagctgagagttcagcttcgacagaggagctagtttgagtgacccctctggcatcttttcgaacctgattctcaagctcatcctaatggtgagaggcaaagcagatcgatacgatcagtgtcatgatgggtgcgcaaagagacgggaccacctcagaaactgaagacatgaactgactatttgactcttaaagctatttctactgcctgattcggcagctttcacattattcaagtttatcaactcggtctgcatccgagcttcttccgcctgggtttcctcctgtcaacgttacaagtcacgttgagaagccaacctacgatgagtaaacttggcactaaggctcggacatgaggatgactagaaagaagatctctctcatagacgtggaagcgtaccctcttgttcttgagtattcgttcctgttctctttttaggttctgtaaagtattcttcagctcgtccagttttgcttggtcctgataagggagacataagaaaaccggagttagcaaagtgatatatatctgttgtcaagttaaggatggtaccattagtaggacttaccaagggagtgtcgtctgaatacccgatatcgaatttggtgcagatttttgccgccaaattttcttgggttgagagtgccgtttggtgagcctatctctcaaaagagaagaactcatcagtaccaatttccacgtacccatatagggatattggaccaaagaaagactgaacaaacagtaaattctgcatcaagccttcccctcttttgagcaagattcgcgaaatctctttcaagtgctcgcagtacatcctcttcgtctcctctccgattcaatcgtgctgttcggagctgtttcttatcagcaagcgtttgatcaaatccatgaagctgccctctaagctcttcttcgctttctgtgaattgatatgccatgttcgatgtaacacactcgtcagctttaagagtctctcaatagctgtgtgaaagacatttgggtagaagagaagaataccggagctaaccttgcaataaactcattgtctcctcataattcatgatctgttcctcccagaccgagatctgatgcttcaggttctcctgtttgttgaacgtctctgcaaactgttcggcctggtctctgaagctgatattgataaccgccatttcctgggctttttggcctagatcctcagcttgttggtctttgtctttgatatattgagtgacctttgctaattttgttcgaagctagaggagatgaaagacaactcggtgttcatgtgttgatagaagagggattagaggaccagagaatcggatgacgaacaatttcggatcgatctttctccatttttaaatggttgagcttttctttctctaccttgagatcagctgccctatcctttctgatctttttgatcgaatcaagcgcatccgtaaacctggaggtccatcaccaaaatcagccaacatgtatgccgatcagtcaatcaccctgatcaatgcgcaatgagctttaagaggattaggggaataaatacatccactcacttcgtcgcttcgaaaatctcatcgaacttcttcttcagtgtcgcgggctcactcaacggccagtttgactcctcttggtgacagaagatgacgttatccagtatcgctctggaaacacctagcaaaagtggtacttcgtcatcgatctcgctacacttcgtagatatcgtgtttctctgtacttgaaccgagtcacaccccaacattcagcgcaactcttcttccaggaggtaaagagtgaaaataatatactttttgattcgattcgcctgcctcatctttggataaaatcccttctagtgtcttcatgctcaacccggtcttcttgacggagaccgataggttacgagtgacaaccatccgctcgctgtttgagttttgaaatctcagtttcaccgacgccttgacttctttctctcctgccatcttttatttgtccaaataagagagcatgaatgagattttttccgatctctgaatgttgttcttccttttggaagtcaaaaacttacctttgggtcatgaacaaatgcgcctccttttgtgttcggaggaagttcacccgttgttgcatacttcaagcactcgataatggtctattcgaatcaacccccagaacccgcaggatatcaataactgatatgaagacaattcgaagtgtttgactcccaagactcaagctcctaagttgggctggtgtaatggcttatgtgaaaatactgacggtcttgcccgttccattagcgcccacaatgacggtgacaggagtttgaaactctaccatggcggacgagttgttactacgaacgagaaagaaaggtgagtctttatgaattttcagccttatagatacagtcccaatcttgattttcggacatactcaaaactcctgattcctctgatgacaagacgatccagggacgacctagcagagttaatgaagatgtgattgatgaaatgcgtgtgtgtgcgagccagaaagagtccaagatgagcagcgcgttctttcatctgcctatccatctgtctctgaatacagtaaaacttggctaaacacgaacatgatgtgtaccagcaactctggatggagaggacggtatcgacgatgaggggtgtatgcgcttcctgggttccctcttcaaagggagaacgagagatggaagtggggacacgctctgtaaagatatttgattaatttatcttattacaactttcgacgcgttcgatgcgtctgacgcgtctaagataacatctatgttatgttaattttcatatattaaatcagttatctcggctttcggaggcttttcttactgctgcaaactaagggggaggccacagctcccatcgccttttgcacgaaccgacactctctatccttttcctccctcgtcttcccttcgtacaacacctcttcctatatacatctctaagcaccatgtcttcctggcgatctgtcatgacgtaagtaccttctcgtgtgtctaggcctaagattgttttgaggtgggagaaagaagaccgaacgagggtatctggtcaagaatccaatcagaacgatcaaacgaaagatcttgaaagaaaaaagaagactaacgatgggatttcccattcattctgtttatctattcctccctttattaattgacttgcgtatgaacgaaacagctacaacaggtacacttccgttgctgcccgagctatccgatctggtttgaaggaggctgagcgagtcaaggctgacaagcgagccaacgttaccctcaagaagcagatctggaccaagggagagccctctgagagcgtgcgttcttggttgatttatatctgttccttttccatcatatcgtatcagaagatgtctctcgagaatggaccggatgggaacgggaatggatcttcgttgaacaaagatggatgggaagggctagtctggggaagagttgttactttgagcctctcttttaggcccgatactctgcgaggttccaaattcatagagcagcgagaagaagagcaaggaacggagaggattgtcgtgtttgggagtaaaaccatacctgttgaatgccgaagggaatataccttttgagtattcaagatgagatcaagacagacgcggtcaccctcttcgagacttcctggtcgccctccttccgaaagcatatgtctttcttcttcctaaacacgaggatatcaggtcgaactaactcagcatccactactttccaaattgacaggttgtcgtcgacgtctccgctcccctcaagtctgcttccaagtctgcttaagatgaagagagaaaattctggaacaggctttccaaagaagggttccatgtgttagataggtcgttggagacaaaagaagagacggctgttggtgtttgggaggagaaagcttgtgtgcaagataggaaatgtttctttttgtgaacattgaacgaaggcgaaacgagagtttccttagtgagtgaaaaaagggttggacggataaagagtagacatcggcaagaaaacaagaagagaggtgaatgaatatcggaagcgcagatttcgctgggaagaggggatacttcaccgaccagtctaacaggttggactctccaagagaatcgtccattacggaaagaacgagaagactaagagaatcagggtgctcattgaccagaaaaatctcagtaacggtcgtcgtcaatcttatcgactgactctgactaatacaccaagacaagtgattggttttatgcaggctggaatgaagagaagaggacacgactgtaaaatagagattagaggttacgatggaagtcgatacagagtagacgatagacaatggggaatagagaaaagagagtggggaataaggaaatagacactaccgactacagactacagactacagactacagactacagactttctaatagggaatagacaccggatcaggtccggctatggggagatcagctgctgcgcgtaaagtgatcgtccgttcttgtgaaccattcgttcccgcttctgttcctgaattgagatttcgatttctgttcctgttcctgttccaccttgccccttttccatcccgtccgtccatctatcgctccctccttcctatctatcctcgcctatccatcctcttctcgactctggatgcaacccattccgaaagtgccaacctcccagacggagatctcggtcctccgggatctcggtatcgagaaagaactcgccagactctcgctcaaggtgggtcttttttatccgttcttcgctctttggtcgtcaaactcatcgtgcgctgattttctatccatccgtctcttttcgctcttctttgctgtggtcaattatcaccggtccactccgaaaatcatggctaccgtcgttgtgttaactcttgggaaacatagcaagcgaacgggaatgtggacagggcagctgatatcggtatgtggacgacacccatcgtgtatcttcctactctctatctctccacccggttgtcgcgtgtctgtattctccctatctgtctgccaagactttcctggccttatgagggacaacggacctcgaagtctggatcgagggttatgtgtgtgaccgagtcaatgttatttgggaggctgtgggatctgcttggctatcatacataaagtgttcgtcgactaacactcctgattgtactcttcctccactttgtcatccatgtttgtccatccagctttcacgatcatgaacagacctagcgaagaggtgagaaaacctctccccctttccacttccacagtcacttctgtcccatccaatcgacacattatcattcctaaatcaagtggagtttctgaagatgaggatgagaatagtgagggcgacgataacggtgaacatggtggcggaagcggtggtggtgatgagaatcaggaagaaggaacttggtcggatgtccgttcgtcgacggatcgtcgacctccctttagaacatttaacaatggtagcagtgaggattcctctcaacagacctcttcccgcccttgtgctccaccttctttatcatctgcatcgacgatcacgcgcaatccttctggcagcacgacgctcgcccggccagccggcagcggtgtcagagcaaattcttcctttaacagctctatcgcttcatcctctcgctcgtcgtcgcgctcgaaaccttggtctcatcggctgacctcgaccgcttcatcatcctctgcttcatcttataaatccacttcgcctcataagcgatctcccgctgtcagtctctcatcctctcctccaggtggttcttcaggatcatcctctaggccgttgagtcatcaggtcatcaggtctcttcctcttggttcattggtcgctctaggcgatcaaaagcctgacaaggtttacaagcctcctaagcttaacaacgaggccatcagtcagttgtcttgcgttcttcctttgctctttttgacttgttttttcctgtttttgacttttctgtgacttggacgcccttgcttatgatctttgttccgtactttcacatttcacgaccaaacttagaatacgatgcagctgccaatcagttggtagccgacctgtttgccagaagcgacggctcaaacgtatcgctcgcctcaataaactcgaacaaagactcttcgtccgacaccaaaagctctcgtcggagtttctttggtcggtccagatctgaaaaaaccgccaatcaacgaacaagctcaccctatcgatccaccccggctattcaacttccgacagcgatggccagcccagacattgtcaccatcccacctactccaatcaataacaccccatctgtcacgtttgaggaagaagacagtcgaggtcgatcgaccagacgactttccactcgttccatgtctcctttcttctctcgaactggacgaagtcgatctagagccaacagtccgtcctccgaagttggacaactgcgcgccagacagggaacatccgaattggcggattcagattcggaagacgaaggagacgactcagagtcaaatgcggactttgcttcaggtgaccttgatcaagctgccgtcggagtcgacactggggacatagacaattgggaggacgatggtttcgacgaagagaccgagctaaacaccgaccacaatgctgagacagagatgatcgcttcgccttcgagtgagggttatatggtcccctggtcggatctctatcaagaaattgagccagagtgggttcctgtgctcttctcatatttgatttttgtttactgattatgcttcatttggattatcttccactcttctcacaggctgggtgaaggacccaacgttgtcatccctgccgcagactcttacacaatccttcggaatcaaaccgctccgtccacaggactcaaattgaacatccaacgaccagatttcggtagggatcgatgtacaatccggatagaacagggtgatccggagactgtgttggagcaaaaagcaaagaggcaaagaagatacgttgttgcttcggatctctcagaagagagtggttacgcagttgaatgggccatcggtacagttgctagggatggagatgaggtaagacctctttttccgtatatcctcggatttagttttacttgactcaccggaagaaaccctgaacatttttcatcttttatttgatagctctggatcgttagtgttcaggagaacgaaagtaaaggtaggaaaggttccttcgttcgactgagattggctcgtttccaaatgttgacttggatccttctttactggcctcttgtttctcaaactattcaagtggatcccaaggatctgtcttcgcaagaccgttccgagaagctcaaagtccagagagaggtatatctattgtgctcaaatgtctcttttcccttaatcttctttccaaactaacgacatacatccttgctcaatttcttgtcgagaatttagcgtcaaactcttgcctcgttactcatcaaacaagtcacccccattcttcaacgaacaaacttgaacctgacagttatatgtcaggcggttcacacaaaaaacgcgaggcacatgttgttggatctgattgatttcttggagccaacgatcgtaatcgttggtagcagagggttgggaaaactcaaagggtcagtacaaattacccttatatttctttgtccttcttttgtgataccaatgctgaacttttgagatggttataactaccacaaatgccccgtgagcgtagaacaattttggggtccatgtcgcattaccttgtgcaaaaatcatcggttccggtgatggtagcccgtcgtcgacttcgaaggttcgtcctcgtcatttttcaatcaacacttttctttgcggatgaacgcattgtactcacctcattttggtacacttggattcgacagaaacttgaaacgaaccgacccgtcgctccttcggaacggagcgcacgtcccgctatcccgggcgaatgtcgagaagctagcaacgggaaaagaaccgaacatgcaggacgcagcagacatcgagagagaggaagatctcaaatcatccgaggcggacgaccggacaaaggcattggaagcggctctttaatcttctatctctttcgaacctttctctcacaaccattttgcttttcaatctgtcattttcactttttctttcttctctactacgttcttttttctcctattttctcatcatctcggcaatgtagttccttgttgccccctattctatctttccttatacagtcatatcatcatgtcctgttttgcagccagtctctctgcctccttctcttgacttgtcgacagagttgcccttcggaacaaggcagagaaagcatgcttacgtaaccctgcgatcctctcgtcgttctcacccttttcctctcaccttctccgcttcttccgaagtagtccaaagcgctttggtctcgaatgaagacatacaacatgttggcatcgtctaggaccatctttagaagctcgacttcggttcttcatgtgaggtgttacagttccgcctctccacttttcggttagctccctatccttcttctgtttctctaccatcttgagcccttcgttccgacggagggccgggaggatcttttggttatccggctgatattcgcctcctattccttcggttgatcgttcgttgccaacaggaaccgaacgatcttcaattcagatcgagggtgtcacctatccgtcagatgattacacc

SEQ ID NO: 427 - DNA, 10462 bp, Xanthophyllomyces dendrorhous
gattacaccaacgcctctcctaccattttgtctaaactcccatacggactacataaacaaccggatcacccactgggaatcattcgaaacttgattgaatcccatttcgataaattcacaccggtcatccctccgtccgctattgtctccgtcagacaaaactttgacgagctgggatttgctgatgaccatcctggtcgagcgaagagtgattcctactacctcaacaaggacaccgtgttgagaactcatacctccgcacatgaaatcgaaacatttaaacgaggattggaaaaatggttgttgagtgcagatgtctataggagagatgagattgatagctctcactatccggtcttccatcagatggagggtgcttccgtttggggaccaaaagctctcaaagaccttccgaaagagaaccaagcactcagagatctgattgcttcgaacccatctccattgctgctcgacgatcctactcaaccgttggatgcggtcatcaacccttcccaacctgagcacgacgaggagactcttcaactcttggtcgacaatttgaaactctctttgaactcgatgatcctcgcactgttcagatctcataccgatcaggcgggtgaacccttacagatcagatggatcaacgcgaccttcccatggacggcacccagctatgaggtcgaggtgatgtttgaagggaaatggttggagatcctaggatgtggtgtcgtcaagcaagacgcattggtccgatctggttcgtatccttactctatatcttctctcctttgtctttccatttccaatctgtgacaatgctaaattcttctgctgcctgaaaatcttatcatccactcctataaaacagacgttcctgaaaaggtcggatgggcgttcggtctaggtctcgaaagactagcgatgattctgttcaacatcccggacatccgtctgttctggactcaggatcctcgatttgcggctcagttcgcctcctctcgaggaatcactcagttctcgccttggtcaagatacccgtcgtgtaaccgagacctgtccttctggttaccggatgaatcgacctcaacggaagagaggctgcatgagaacgatgtttgtgatatcttccgagatatcgctggggatatggttgaaagtgtcgaaaaagtatggtaccttccttacctcgcggccttttttcttatgtgttcgtagattgatctctctcactgttgcctatcaccgtagtttgatgaattcgttcatcctaagaccggtcgtcgatcgttatcctaccgagttgtctatcgatcgatggagaggttcgtgaatttacaaacatactcttctaacttacccaaccttctttgcgtgctgagccatttcatcctgacgactatttgtttttatttgttttgtcgtttttctcgttctcttctgtttggatgtttggggggaacatgattgggaccataggacactgacaaacaccgaagtatctgaacttcactcaaaagtaaacgatgctctcattgccaagttcggtatcaccattcgataaaaccaacttgttgtgaacgcaaagaagacaagaggagaaaacatgctttctgatcctgacaactattgggtgtggagcaaataaagtaggaatatatgaatcaatttcaaatggtggaagtgatgcaaaagcgcaagtttgacgaggatcaaagaaacagaagagaaaagcggtttcgaactgaaagcatcgaggagaggctgttctatgatcaaaaatactgaatgttcagagatggaagagctgaggatgaacatgccaggaggaacgaacacaatatgtagagaactatagctggttgaaacaaaagagaggaggagagttgagaaagatgtaggaaagatataagaaaaacatatctggtagaaccgtgtggtaaaagtttaaagaaaacgatcaagcattacaaacgagcggacaaggaaaacacacgaaaaggagcgcacttctcaaacacgacaacaagagatatcaaaagaaaagaaacaagaaaggagtggcaacaagaaaaaaccctttatgggagggaggtgaattccaaagtcacatatagtagaacgatatgatggtcaatcttatgaaatagattcttcgttcgttgctgactcagctggacctggccctggattgggaggaagaatatcttcagaaagagcagatgagctgttgctgagtggagtagccttagacggtcgacgggctcggactttaggcaacttgagcgaaggtcgtttgatcaaccctcctcggctaccctcgtacgcgtcatcctcggctgagagaagggatggtcaagatcaagagatgttaagttgttggtctctcctttctcttgaggaaggaaggagaaaaatgcctaccatgtcgctttcgatcgtctgacgagtccaaacttgaactcattcgacgctcttcttctaccatatctaaagtaccctgaatgatgactgcgaatgcagtaaaacgtatcgataacgacgagaaattaaaaccctcagtgagtcagagaaaacagaaatgaacgcctacagagaaactagatcaagtttcaggaagagagcaaacatacctcgataagcaaacacgaactgcctcaatgtctgacacagactcattctctgctctctcatgtcctccaacacgttcaaaactggatcctgcaagtccgacaacgtgacatcctgtgtgctgagtgtacatctcgggggtggtagtccctcttggtaactcattgattcagaaggtgtcgctactgacgtcggtgtcgaggtcgacgttgtagtcgatgtcgatacaaacgaaggcgagtcctctttcaagctgtttgaaagtaggggtgagccggtagagtggaacgtcgtgaacgaaggtcgttttgtgagattgaacggcaccgagcttcttctgccattcgaaccgatatgcatgttgcctaggttgatgagcgatgtggtcgaaccagtatgtgtagagaacaaggacgaattctcatccgcatctgatgtagcgggagaaccggatcgagatgtgtccttggaattataaacggccgagtaatcgatatccatatcactcaccctaggaccgttcgtcgggtcatccctcgatcggggtctcgaagtaggtgatcgggctgctctgaggtcaaagaacggtgagccgggcggtggcgatgatgtcggtgcggaagatgcgaatggagacgaagatgagaccgaagggttcctagatcgatccagcgtctgtttcctgtctctcgacggtttggcttcccgtttgagttgcatctcgtgcttgattgcatccagcacggcatctaccacgacgtaagaaccagttctgccgacaccggccgaacaatgaacgacgatcggaccaggtgaaggttgaccagtgatatgtgcttgaacacctgcctcatcgttgatctggttgacttctcggatcaaatttaaaagatcctcgggagtctctgggatatcgaaatcaggccaagaaacgtattggatctgagtaatcagtcgcccgggttcttcagggtggtcatcgtgagtcacaaggaaagatcgctttatgagtggtcgaggctcgctcgtctttggggcggcagcggcgaagaaacctcctcctccgtcgtgaccaggcatattctcttcctctcctttaacttctagtaactgtaatgtaagccgtccgaattttcgatcgctccagtaatctccacatttgacctgtccgccttcgtgttgtttggtcaacctatcatcaggtccgtcaagaaacaagatcccccaagaacgtcaattgttggtaaggagcgacaagaacgcgacagagacccggcttacatgacgataaccctgacgttttgttcccaacataacgtccagaaatcttggtatgtcgaaggcaaaggtccctgggtagcgatatactttttgttcgtcgcgcgaggctgcacaagagaagcgttaatgtagtccgatccatcatcatgacactttgcttccagtcggactcgagcatggtcgaacggccaaatattttggaacctagagatgacgcgtaaaatgagcacttttgtaattagcgcaaatacacaaacacgcgcaaaagagaggcatccgaacggacctgttcttccagcctttctccaggccggcggtgatactatacgggaatcgatccaccttgttatcgcccgactcgtcgcttccggcatctccaaactttgagtgatgattcatgattccctgtagtcgtttttgctctcccagctcgactttgtaaaactgctgagcaagtgtgtccgccgcctgtgaaggagaagctaggatgatatccctcaagaaagagggcagatccccggctcgttcgacggtcgacgaagggagatcgaggggaattcgttcacctataccatgtgagagctcgatattctgtctgatgttatcaaagaacgggttggctgctttgtgttggagcccagccgtctgaggcatagtcaacgttttgccagacccgtccataccggggagagtaaatccgacggtgggtgcgcctccgttggtcgaaactgttagaaaaagacaaacgttttagctccggttcaagtttgtgtttatgaaagtttgtgtagctcaacgaaccttgctggaaggcggccaactaggtttcagatcgatgcagagatgttgttgtagcggcgttcatcatgaaaaaggaagtcagtaacacgtcctttcttgatagcatgagcaagaaaagattacgaagaaatccaagaagacaaacgaaccggaagatcacgaccgttcactgatttggagggtttggcctgttccgccagaggggaattgtcgaccaagccctgtgtgtttgattttgagaccgcagcaaaaccgcctctgacgatacagagctttcctttgaagccgtctttctcaaacttgtttaacaatccagcaaggatgcctccttcgcccgctgactgtccgtcttgatcgtagcagataatccgagtgatggcatccggtcccttctgaaactcccatattcttgcctgatcggattcttgatcaagcatgggaacgagcctggcgagcgtaaagttagctcgacggagtagagtcgaaggaatggtgatggggatagcagtaggaacacgggagtgtgtatagctgttgtgggttcttaggtccaagatcaaataggtgtgaggaattggcactggaatatcacttggatccaacatttggatatggggattcgatggggccatggcgctgcgggaggggaaagcggagccgaaaatgtccaaaatggaaaatcgcaacgatacacgaaggattagcatccgagaacggggtgagaagaaaaggcagaaagaagaaggagagaacagagagaaaggagaaagaacagagatggaaacgcacgactttgctctacggctggcgatacttccgcctgacggaccacctagcattcgatttgccgttgatgagaacgagtgtggtgtcgagttttggactggaaggaccgatggggaagttgagagattgttcaaacgctttccggtaccagtgacctcctctcctttcgaagattttcctgacgttgacaaactcatcctctgaaacctactggccatcgctggtggaggggacgatgcgatcgaaaacccggttggaccggttcggctcacaccaggaaacactccgactccattggagccacctgcagcactaacttcaccagcatctccactagggaaattcaatgaaccgatcgggttgaatggcgagtctaacggaaagagtgacggagtaggagcgccagaggacacgaacaagttctgccacggactgatcagaggggtcagaggggtaggcgatgtgaaaggttgtctgaatgcgaaaggctcttgagccgaggcagatgcggtcgaagaatgatgaaagatgtcgtttgtgttgctggtattagcggtggtgatagaggaatctgcagcaggagtggaaggtggaaagaaagatggggtagagagatcgcctaaatttagacctgttcgcctgttcgtcagcattggtggtggcggtggaggagacatcgactttggagaagaaggcagctgcaaccgaaggtttgggttgctttgctctgtgtctacaaacatccttggtattggctgaaatttaaagagggagacggggtggggtgccagccaaaaggattagtaaaggagactgtatgaaatggacaagcgaggtgctgctgaaggcccagaacaggaaaaaaaaaaaaagttccagaaaaaaaaggaaaaaagcacgaaagagaggagtcgaaggaggttgttgatagaccgatggaagagacctccacggtgtccttggggatgccacaaaggaagacggaggtgggaaggtgtcgttggtagtatgaagaacacttgtgcgataaaagaccgggccaactgttggcggtgaggagggagaaaagaacgtaaccagtcggttgattacgctggaattattatctccggcgtaaccattcgtgcgtcactcatgacgcaatcgttcggcaaggtctctcgcgtttgagacacaaacatgtttgggtatgtaggtagcgctgcgaggtgatatctgtgctgtggggtggtgatattgctgtgaggtaacctgtattcagtgtttggaagcagttggttccttcgttgaaggatgacagtatgtcaccataggattgaggtcgaggcgggtcgctagggagaaggtagaaaagtggcagtggtcaagccagtcgctcatttttttctagtttctcttcattcttcctgcctataggtgcgacagaggaataatctgagtatttttttttaccagaccttacacctctctcttttggccatcaatgtcagatagcacgaagagagagtagagagtgtaagagaaggatttcagttctctcactgttaggccggtatcttatcttatctatcctggttttcttttctcaccaacaagtcacccctcctcgttcataccgtattccttctagtcatcataatcttccctcatcaaacctcacccatcgtccgttgagcttatgctcttcaatttggtctgatctatattgtaagaaaatccttgtgatgttcataaacccccttcttgattgcattgcgggttgagggcgccaatgctcatgatatcatgtcagatatttcctctgtagaagagagctccttctccctcgagaatggcttgtcaacccagcaacgacgtgaaattggtactgaaatcatctcacaagactgtaaccttcagaacgagatgatatttgaatgcaaagcccttattcagtgccgagtctattctatttcattcatttcagtcattacttttgggatacttcaactgtctgttcttgcactcgtggatgcctgcttcgtcgttcgggccattatctgatacaccatccacatacgtcccactgcatagatttgttgcttcttcagtatatccgcgatcaacaatgttaacgatgtacagtgtaaatacgataacgcggtcggcaagctaatctctcacaaaaacaccaccatcatcatcgcttgtaaccatttgcaaaccgatgacgcaacttcaataaatcaatacatacgatacaacttgaaaacataaggaaacaaataccgttcacgaaggagtggaagatctagtgtccacttccttatgatactttgatcttttcgaattaatcccggacgacatccgagtccaggctctatcgaatttatcggatcatcaaagtacaggtcagtttttttccatcttccagatggtcaaagataccgaattagaatgaccgtaccgctcgtactggttcgcgggctggtgaataagaaccacctcggtcagatctgatgggttgatctatctagaggagacaggaggaagtgcagcaagtgcgaagaggaagaagattgaaacaaaccttgacgacgaccccgagtttttcggcgcactcaatcacgaaatctgcattcctaaggagttctctggctaaaaagacgacgtctgcttggccttcctgtagaacatcctcgatttgctccgcggtggtcaatagaccaacggcgcccactctcagagacgtctcgcttctgatgacttccgcaaagtgaactacaagagctatagttgagtgccttgggtatcttcatatgaagaacaatgagagagatggcaagatctcaccttgataaccaggtttgatctcgattttttgtttggaccaaagcccaccagatgaggtatcaatcaagtcgattcccagagtcttccaaagtcgggaacgaggttcatcaatactgaaagaaagatcatatgtcacaaacatataaacactcacctcaagttccttactaagcatgacgctctgaacgagtccccactgaacccactctccagagttttgatctctctccggtccgtccgcccagtcgctagcagaaatcctatagaacaatggccgatcccagatcgctcgaacctctttggataccagtttggaaagcctgattcggttctcaaaagatcctccgtactcatccgttcggctattcgatagcggggacacaaacgaatgaatcaggtacccttttgtgtttccaattccatacatgatcagcatctacaagaaatccatctttttcctggtatacaacttgagaagctcaccatgagcaccatgaatctcgataaagtcaaatccaatctttttacatcgctcggtcgcgtccttgaaggcttgaaccaggttctcgatatattccttcgaggcctcgataggctgcgggtatgtttcctggaaaggaatagcagaaggtgcgtatacttgtaccatcccaacaagatatacaaacatcagcttcatccctcctcttcttcccctgcttcatcacagagagtatacatccgaaaaagagacgcaagaaactcagaccaaccattatcgggccatcctccatcgtcttctgaagcgacgtccgactgaggtccagcaggagctttcgctacccacggcgcttttgtagaggccttgcctttaaggtttgatcaaaagtcgagttgaattttggtcattttggaacagataaatgagtgcgatatgtcacaacttacggccagcatgagcgagttgaatcccaatcttcgttcctgtagtttagaggagagtacttatgttcagtccagtgttgcgacactaatgatcgggacggggtttcaaaaaaaaaagtaacacgagggaagaggcttaccatctagagggtttgaaaccagttggacgagctcacaccggtcaatacctcacaaccgtgccattagagagagagagagacatgtatggagaaggtgaggactgacgggcgtggcaaaactctaccagccgctttagcggctctatctgagaatccttccagattccagcatcctgaggggtaatccttccctctggcaagactgcatgagcttccagacatatcgcgcctacgccgcgaatggcaaagccctggatggaacaggttaaaattcgagtgtttcagctctatctgtgagccagaatcgatcagtgaagatttagggttaaaaaaactcacacctatatgctgtggtacaacgattgatatcaacaaatcgttggcgtaatcaccgaaagtctaaatatatgggacaagccttaccacaaaatgctgtcgaaagataagctgatcagtcctatggatctcactcaacgcggcaagggcttacagatgagccactcacaaagtcggtttgatgaccatcttctgccgaatacatacacataggactcacccagagccggttctgttgacgacagacaaaccagtcaaactagctgacctagcctcggattaatgaaaccaagagcatactttgaaagtcacatcccggatattaagcggctcgaaacttttcagtctcggacctccaactttgatggtgtgttccacgatctctgacccaatggccggactgttgagcggaaggaaatctattttgtgttgttgtaaaggttacgatggtgtgagcgcgcacgaagagagaaattgagccaagttcttcttcttagtcactcacatggcatccctggaaccggctcattccgagaaagagacattcttgcgtcgactgtttgatcaatgttggctgtgttggctgtgttggttgtgttggttaaaggaaacaggtatcatgtaaacggatgagtttgtcatcccaacagattatgcatctatttaggacatggccgaaaaaagatgagtaattagggttatgacaaacccggcatagtcacgtgatataa

SEQ ID NO: 428 - DNA, 55756 bp, Xanthophyllomyces dendrorhous
ggcagcttacgtaaatcagccgttggaccccataagccctgttttcttcagctcgacttttcaacatccaccgtcatccttttttacacgctatccattccaacctatccattccttcttcgggcgccttcttcgttctgttgcttctgtagttgatatcatcatggtagctcttattgctctggccgcttctctggcagtcaccactccggtcttttcccgtgcgctcaccgttcctcaacaagtgtcgtcgttacccgtcgagccgttttcccttccactttcccatacacatcattctagacgaatcggcgaggacggtacgcttttagagtggctcaggaaggagcatgcaaaaacccaagcaaaatacggccttggcgcaagcaaggccaagagggattctggggtttctaggttggtctttgttcccttgttcctcgtccttcctttgtctttcggacttgtacatcgtagtacagccacctctcccgctcaggccatctgatgtgatacattgggatctgcagtcttcatacccattgtctgctatatcaatcatgctgatctagaccttctctctccagtcttcaaaactctgggttggacgcatcttattctgcttcggtcaatatcggaacccctggacaatcgttcaatttgatcttggacacaggtaggtccacgttttgagaactctctatatattccaccgtctcagacagcattgacggactgtatgacctgataaaaccctgtttgttcaatcaggctcttccgatctatgggtagccgggaacgattgtacgagcgggtgcagcgggataactacttgggatccgtcgacgtcatcaacattcaaaaagtgagttacgaaacgccatcatattcttgtcaattattcatattgtcagacgtttgacatcttgaaacttctcagccttactaccgatttcaaaattaagtacggatcgggaaccgccgaaggttatgctgtcaccgataccgtgaccttggccggaatgacccaagtggcacaaaacatgggtatgtatcttgtacatgttctcgcgtcgttcctcttgatgaaacgttgtagtcgatcgactgactttatagttgcgccttcctcaccatacagctatcgtcaccgccaccgtttctggattgctgaccgctcctctgtccggtctcatgggaatgggtttccaagccttgtccaaccttaatcaacctccgtggtggcaagctcagtcggctgattggtccaagaaggtcttcggtttccgattagcccgatggagagatgtcagaggagccacaccattcgaggaggagggaggctacgtcgatttgtcagtatcattctcaagatggtcagaccacctagcttccgacactgatgactgcccaatatcttccgaccttagtggagcgcttaactcgtcgcattacaccggcgatatcaattacatcacagttcctcaccaagtctgtacgttcgaggattatactccaatcatcatcgactaatagatctgaccaaacaaactctgttcgacatggaaactagactggcaaatccctgtcaacggtctctctataggcggagttgccatcaagctcaacggggtttccgactctaccggcagctcgtcatatcctcaagtagctgtagacacgttcgtccaatcctatctcttcgcgcttgtctttccttccgttttctctctagaaccatcttttaagcaacttgtttctctcgttttaccatcagcggaaccactttgatcagtgttcctactactaccgccgcctccttctgggcgaacgtcgatggagcccagcagatctctgtctttggtcttactggttactaccagttcccgtgtagcacctcgctcaacgtcagtccaatctatcctgaatacctttctattatatcatccgaactctaacttacatgatgacaattgccttcttctcacacatatgtcattcacaggtttcactgacgtttggctcggtcacatatttaatcgatagtgccgatatgaacgttggtccggtcgacgcttcaaccaatatgtgcttgggtggtatctacggcgtacgtcttagctggctttccttgtttcgactttgaatacaactaattcccatactcacattaaagcttactaatcaatttactatgaatagtctaatcttgaaagtaatactaccatccagtggatcttgggagacactttcctcaaggtgaaatttccattcctatatatgtccatcttgcttctctaagctatcagacactgattggtagtgtctcattgtttctactgcccgcttcgttccgacagaacgtctactctgtctttgtctattctggtgctaacactggaagccaagtcgggttcgccgctctatccgagtaagcgttacgttttgtgtctcctttcagtcttagtatcttgaacgttaacgtatcattctgtaccttctaaattttgaattacaaacagcggaagcactgttacgaccggtagtccaactaccaccaccaccggttcgggatctgcagcaacggtcaccagttccggtagttcctcccctaacggcgctccagcacacgtctctatctctagattgaccatcggatggagtgcggctggtgtggctgcgttggctgttatgttgatctaacaaaacaaaaaaaaacaaagcccaaaatcctttttttctatcgcgcattcttcctacttatccttctttctcttgccgcctacagtgttttctgctccgtgacgtatatctcatctgtatacacaagaaatcattcggatgcatctgtcttaggactttttacacgagcgtctttttgccttcctctttttcgatattcgttttgattgttacctactgtcttccaattgtcttcctactgtcttcctcctttcttcttgcttttgtcgcagtccgtctgtattctcatgccgtctttacatttcttgttcactctgcttttgcatcgaaacgagcacacggacgagacttactttcctcacactctgatttcattctgttcactggttctttgtgtttagactattctggccatgtatcgctcagtttgatttgtctacatttggtatgaaaggcagttcacttggagttgttgagtcagagctttgaaacgtaggccgtagtgtcttcatgtctcttttctgtcactttcgggatctgttcgattgatttcgagcatcaggaggatttcattcaaattcatttagagaagttaagacaaagctacatattccaacaaatagaaaaaccaaaagtcagtttccttatcttccaagcagtcatggctagccgttatgagatcagaagattgggataggtaggattctttggttgctcagataccgttgtagaagatgtttgacttcataacagggaggttatgaagctccctgatgcagatagtgtgaatacttttcgtcttcattgcaagaataagacccggagtgggtttttgtttttgacgttgattttggattgtgcagaaatgtttgtgtgatggtgtccaatcatgagagagagtacttacaagcaagtcagaagatgaaccagggatgcgtttgatagagaaaaggaaagaaagaaagaagattgaacaatcgggcttatataggttttcagaaggacgaggaaatttaacgccgcgaatcacgtgtagggtcacgtgcgtgacacaattcttccctctggtgattttactcaaaacccattccgcgtggccatcgtaatgaagaaacgagctctataatataacctgtagaatgttagttatctgttctgatcaagttccagagcaggagagcaattgcattccagaacatgttaaccctcctcgcacatcatatacgatgagacatggttaggatactcattggctatcatattatattggttcgtcaaagcaaatgaacaaagcaaaggagagaagaatccgtgtgtttctatagctaggtattcagctcggcaagacgtttcagctcagaaagttcgcccgaggattgacaaagttggtagaaatgtgaacttggattctgaagaaggtttcgaggtgaatctaattgaaaaaaaatagatcgagatcaacgtgagacgcgtcaaggtagattcaagaggatacttcagtccgaccgatatttaccgtattccatgacttttccctttaaaaggaagagaaccttgtcatctagaggcatagtataccataatcccaggagcttgttgtgagccatctacttcaaccaggaccaattgactcaaaagatagggcatacactgaatgattgtccttaaccgatgagcaattacgagcaacgtagagtcttggaaggcttcttggatggtcgccgtcaacagatgatcggtcgcaaagtcgattgaactggaaagaagaaagcgtctcagaatatgttctgattggtatttttgacatgtcatgcaaatcagtccaaaagatgagacacatgtaccttgtcgcttcatctacgtaaaaccagcgagggatgcattcgagtaagcgtaatggaaatgagcaagttgggaaagagaaactctgcgaacctaaaatcatgaccttagaacgacgcaaaagcgctcgagcaaggaggagaagctgtcgttgtccctgagagaaatttctatcgagtaaaagaagtatcagtgggatgtgagtcagtaagaacctatcaaaacaggaggaagacgacacatacgatccatgctgagcaacctcattgtctagggaagaaaacactgagtcattctgtccttcatccatatctggagctccgttggtgtcggaagagtctttcagcagatggactcgtcggagcgcatcaaatatttctgaatcagtgcattcgtcgtagagatcaagggccgaccgtagagtgcccgacatgattgttggatcttgagggatgattgtcaaacgggatcttacagcatttagcatcaatctatcgatgcgatgataattttggagaaccaagttcagcatcagaaaacgaacgatgtagtacatacgagaaggtcagaacatacttgctgatgtcaagatcatctagaataatttggcctgaataagcttccataaaacggaaaaaggacagtgccagactactttttccagatcctgttggcccacagactcccaccttctctccggcttgatgaaaagagaggaaaaacatcgcgagaacgattcacgtgtatcagaaccacttctgcttcttttcatatgatgagtcgctctacaatagatgtactcacgtctaacgtggaaggaaatatcactaagagcatcaggcaggtggggtgcatatcttacgcaaagattctgtacccgaatctctcccgccataggccacgcggctggtggatgtacgccagctgtactctctgacttaagtatcgaaccagacttctgatcgtcctcggaaaactgcttgatacgctcgacagcaaccatggtgagctccagagagacataccgaagcatgagatcaagcatcccagaagagatgctcatagcaaacgtgagagaaaagccggctaaggcagcatcttgagttgagtagagcaggatcaagctgtcgcacagaatcgtaggtcagaatgaggacatcgagggtttaatctgaaggtgacggctatcagacacgacacataccctgcggacccaatcagaattccattcaaacctgtaaaggtggttataagccacagatagacctttacgagagtacgtatcagacaacgttgaccaagtttgtcatagtacgttcaagactcacagagaatccgtgaaagtatctagaggtttgtgcatctacgttagatagcatccggtccatgaagctcgaagaggaaccgaagcttccaaatgtttatgcagacaggttaatcatgatccctacaggcatactcttgaatagatagcaagatagaagctcacgctctgacaacgagaatccctcctccactgataacttctgaccagagactaaacaatggcgacaatgacacgctatccaaacgtctcaagtctctggtaatcttggcatatctggagatttatatacaacaataaagggacattgatacataacaattgtgatcggactcatttatgctcgagagacgaaccttattccaacgacgactatgataggggctatgacggcaatggcccataggaatgaaggcgtaatgatagtaatcacaccaacactacttgcaaggctcaaagctaattacttcaaatatcagccaaaaccactgaggatcagcttaaaaaaaaaactacgtactgtacattaccactcgagcccaatcatctctgattagtaagagaatggagaaacatatagaactctcataagtgtcagagcaacagctcatacagcacgatgtacacatacggaagaaacccgtccacccgactcatatccacactgaacctgttgagtaaagttccatgagcggtgctttcaaaatatcgaagtggctcatgaaggacgtttttgaggagacctaaaaagggataaaaattgtatgagccgagaagcaacaggaggcacattgacatgaaagaggattacgttgatgaattatagaagaggctctagtcgttgccccgttatagaggatgatccatctcagagcgcttgcaatcacgccgaaaaatgttatgcacgctagagtttgatgaacgagcaagagtgtgttcagtcttctagaacaaagatcgaatccgaaagctaagcggaatgaagtcaccgtagatggctaggtagtagtctaatgaccgagccggatgagatagtcccgcggcatcagtccatttcctgagccaccaagcggttaaaagatccaaagcctgtgtgcctagatacacaatggtgaacgctgtccagtagaacattccacccttttcaaaataatgtttagaaagaccaaactattcaggttcaaatacgcgagaatagcgaagcagaggtacggaaaggatagggggagttctaagcagactcacacaagacgacaagaaatagatataagctgctgatgagatattgccctcctctcgcgtctcctttttgatgagcttgacaggcgatttatgtttggtgttattatcattgctaggcagatcctcgaaggtggattccagactctccaccaattcttcttcacgctgagcttcctcatcttcctcccgaagaaagtcctgaaagtgtggagatgtggcgaacgtgtcggaatctcctgagtattgaacacacccattatctagggcaatctatcatttacgacgaaagaagggtaagtaaatgaagaacatatggtagaggggtgaacttaccacttgtgtgcttgccgataagcacagagacacgtggtgagtgacgagaacgacagtccggtcagctaccataggtcctttcaaacatttctcgtaaataatctgagcggtgtgtgctgttttgttcgtttcgtaaaccaaatcagacgatgaattgtagagatttaccaattgaaaatataagcgttgtactgaccgtcaacagcactcatgatgtcgtctatgacgagatgctttgctcgagaataaatcgctcgcgccaaggatatacgagcctagaaacgggacattcgaagaccaagtcaatttctgaatagagatgtcaagctagatgagctggagcttgccttttggcctccactgagtacacgcccgttctctcctatctcagtcaggtctttatccggaaagatctctagatctggattcaagctacacacttctagaacacgtagatatcttgaccgattgaaaggcaggccaaacagtatgttggactgtatggagccagattgaagccaaggagtctgtgaaaggtgaacagagttgagacatgtttagtcaatgtgcaaatagacatgcttaaacgcacacagactgttctcacttgtggaacgaatgcacttccttctaccaaccattcctcctctttgatcatgatatcctccgaacgaaaacttgagtctaaggttctaggaaaccctatagatccttctaacagatcggcttctcccagcagactcagcaatagtaaggatttcccagaagctaccggaccgcatacaagtgtcaaagcatttggggggatcgagatagagatggatcgaagtgagaatggacgtagagaagtcgggggactactagtagtgacgtcagatcgagatgaagggtacaaaatagttgcatcgatgatcctaaaagagttgtccttgaaattctcagtgcgcgccacaggttgaacctcagacccgcgtagataacccgccagacgttgaaggctgaccagtccttcagttagttttataaaagttccaggaaggatggtccacacctgagtgagcgagttgaagatagctaaagaggggaaggctacggatggtataagatctccatgttggatcttggtgaagatagtgaaagtaatgagaagacaaagaatcggtagagagcccctgatagacatgagaggacgagaaaaagaccacatcgtcagcctcaatccagcagatatgatggcaacagtactgaccagatcaggttgtataaagtccctagatggtaccgcaatctctgcaacctaacctcattgttcctcaacatccctaattttttttcccaatggtgttctgcagcctcaaatttgacagtccttattcctcctagaacctcatccacacccgcaattctttgatctcttgctagacttctccttctatctacatcaaatgttattgaggctaggcttttgtttaacggaatactagctgtattgagtaagattccaacaaaagctgatggtccaagcaatctataaaggagagtcgtccctattactagatcaacaaaggcgataattactccagctgcatcgctcccaaacccagctagccgagcaacgtcaactgtaaacaagttgagaacttgggtcttgcctacacctcctgctccttcatcggtagaagtgggaagcgcaacgatatccattcggcgaagggtcttctggaagagaagagctcgaagttgaatctttattggctcagatacattctcaagatcccaataagcctggtggctagaaagaatcccggagagtgccccggtcgctgccagcgcgacacagagagtaatctgttctttggtcggataagaagagttggactctgttggagtcggagaagatgctatttggctgagaatgaacgaaggagaaaggctgggaatataactctttttctcaagagattggatgagaagagaaagaatgtatgcaggtagaaaggtgagaagcgccttgatgaccgccagtaagagcaagaccaagattcctgttcgattggtattccagagcaatcgcaagagaagtttccagctctcagtttcgttagtgtgcttctgaccggcaagcagtttatcgaacatgtcctttactgctggtctggacaagatttctctggaccgtagctttctaggcagatgaggaagatcggatggatatagaagtggtttagattgcgaaagccggagaagaggcaaaggctatatcgacacgccaacgggtcaaaacgatcctagagattagaattcaaagaagaaaacgggtgaaagaaggtatgaataccgacccattggaaaaacagccagcccaacacgctactgcttgcagatccaccaacgtttcctttgcattccttctctgtctgttcagtccctgtttcgctaatttggaagtccttgtcgaagtcctgagggatgaattgcctctcaggttcgcattgagctgttccactcagaaaaaacaaaataatggagatgacctgaagatatgtacttccggcctgaaaatgggtaaagtatattggaggaagcaacaagatggtgcttggcagatgccaccgcgctctgcctagtgaggagaggggtaagaactatcggttcaaatcaacacaagagagttgccgatgggtcctagtcagcattgaggatttcagggataggatacaagtgatccacctggacttgcccagtagagacaaaataaaatgggcttcaaagaagatgtttggccatgtccgatgctgtacgacagatgaagcactgcagctatcaactcagccagacaaccgagaaagttgagtatccttcgccggccatcagagacaatccaattggattcatcgataagatccacctgatctgtctgcatcagaaatttcgaccaagcgaaagagtcaacaagagcgagatgattgtgagagaggaagtaaagatgatgtaagttgaaactcaagaaggttgtttcctgacgaaagactgttgaccgcgttttcgcttcgaactatcatcaactcacaatccccatagactttttcctttcctcttcatctatagcctcttgattgctctcatatgaacaacgacgagtttagctacccaggtggacttccatatgatggcgatgatgaatctactgtcccactccctcgtccgtcagctgtcgacaacagcgtgtcttcttcatcgcgtgccgatttattagaccgtccgttggacgactttatccaggatgaccgatcttctcgacctcgaagacagaaccccgcttcgaattcgttcgacagaccgtatagacaagccagaccaagaaactactcggatgaaccacctaccccgaaaatctacctgttgagtgagctgaacccggtcatcaaccacaagatggtctgtcctccctctcgatcatgtttctcctccttttatattcccaactgtactaacatatgttttatgaatatcctgcaggcttcagatcttatggagagcaaaggccgtgaacgtgagatctttgtttctttgtctttcttgcatctgttgaattctatctgaatttgttcttccgtcctcatttattcatccgtctagccgagctcgaagaagagtctagtctgcctcctcctccattggacgatccgtccatccgtcgaaacgcgctctattttgaaggatcccctttgacggagctaccaaccgagaaagtctttacatacatcacttcgttttcgacctctcttcccctgggaatcgagtggatttcggatgaccgactgtgcgcggtatttccttctcagactagtgcctctgtcgcgctatctgcgttgttgctgaaacctgtggaagaggtgttggagaactcgagatcactgttagacgcgacggctgactctcaatacgtacctacgttcctctggccggcggagatgaggcccggaccagcaagatcaagagtcgatgagatgggagaggggaaggacgatgcggtgatgagggctaggatgggcatccgatgggcgaaaacgacagacaagaaggctggaagggttcgtcccgctattttctttttctttgctggctttcctattttcgataggaactgacgatacttgctgtcctgtctgtccttcctgatttatgcttcaataccgtgttcatcatattgctggacaccccgaaaaatatccaggcacacaatgcttcatcgttctatcgaaagcacggacaatctgccggtcgaccgaaaatcgagcatcagcctggtaatccgacagatgaccgtggagacgatctcctgtccggctctttcaccattgattcgaccgaccggcatgataacgaacgtcgtcgtcgtcgatcagatcgatcagcttctccccgtcgtcgagagacacttcggacccgactagaccgttcggcttcgcccgacgctgtctctggcgaggggagcaagatgcgcgcattcggaggggaccttgaaggccgaataggtgaattccatgttgaacgccggagaaacatcgagtatgaccccagacggtccgaccggtggactcgaaacggggaggaagaggtggatgactccctggtgcctgtacgaatgagtcgagtcaaagaagatgaggaagagagaagagacggtcggacgagtggaggtcgaggagggagaagaacggagcaaagaaaaccggcgaatgcggacgatctggacaaagagcttgaggagttcttgaaaggccgataaaaagaaggaaaagaggggagtctcaatgaaccatgacgaacttgatcagacgatccattgatcagcccaagacaactttatagacaaagagtaatcactgttgcaagacaacctgtgcaagaaaggtcaagcaagagacaaatccgttcaagcatcagaacagcacaatctcatccatcagaatccattgagtatacactaggagcggacggaaagaaggtgcaaacaaaggttacatccgtcgtaaccaacgaaaggttgactttccgagttcttcatctctctctctcgttggcatcgcccattccatcagcatcgatctatccgacgatacacacgcactctctgtccagcatcgataagacagtatccacgagaatgcctccccgtaaccagccgactaatccggcggagattctgccatctcttcagtcactcgtccagacaaatgcttgtacgtgttcactttgttctttccctcatgaagctcctcatgtgcctgtgtgtctgcttgcttcagaacggtagcatcgattcactggattatctgatctggtctgtttggaaatatcaaacttgtgttctcaaagactctgcacaccagaagaccaggacgactgctgcccgactttccgcacatggccatgtggacgctgcaacagaggtcctgttcgagatctccaaggctctgctcaagaaaggcgaggtcgggagtggagttgatctggcagtgttcatgatcaatactaccgagagcaaaaacgaattgtttggtgacgttgttcgaggttagtcttgaagcttgagatagcggtgtccccgaaaaacgtttcctagctcacactgccggcttcgattctctatatgacattctctctggcggctaccgagcaggccgagtcaccaacctcatcgcgctttgcccatcgacagccaactggaggaagaccgttgtggacgcttcgataaagtgggtgaatttcactgtcacttaataatgatctgcagttgctgactggacgcgttctgctctctcttctcgattgtcaatcgtgcttggtagcctatcgactaaggccccgaatctatctcctgcaggagatcctctactacttcagtacattggagagttatattacaaggaaaaagattttgtcaaggccgagcctcacttgatctcgagtggaaccagagattcgggcaagatcctcggagccatgggtttcgaatggttcgtttctctaccttcaggtctccattcaagcatagcgttcaaatgattgtaatcttctctatctatcgctatatctcaaacatccctacaggtgtcaagaaggagcagtggatccctctccttacctgctccgactagtccttcctcacttactcctctcgcctccatcaatccttcctgcgcgctccacgctcgatactttcctctcccatctactttctagcaacccatcgtttttgatagaacgaatcccattcccctccgccgacaacgccgatgaaatcttgtacacgacgttacctgtcgcaaactaccttcagcttttgatccggagcgtccagaggagcggaagtgagacggccaaagtcagctggactgagcttggaagcaagtaccgaagctggggtaagccttggttacgagatgaacacatcaaggaggttggtatctttcttttcattttcaagaagacatgaaagatcttcaccgagcaactagctgacatcagcttgtcgcttcttcttcggctaggctgtccaatatatctcgacaaacacgttcaaaattcctgcaccacgaggagctggtgggaataacatgatggcggacctgatgagcagtctgtttggtggaggaatgtagacatggccaaactgagcttcgttttccattctaaatcttgataatcttggttcaagctttttattaatatcataggaaagataaaacgatttttggatggtcaaaatatgatgagtacaggtggctttgttcaacgtgatcaatgatgacaatgagcatggaacaagaataataggtaaagaaccatctggggaaagaaacatgtgtcgtgaacattactgtttcaaacacgacaaagaagcagaggccagttgcaaggggagggaacgaacggccacgtccgaaccggcgaataaattgaatggctcgttaatcatactcaaacggactgattggacgctcatccactctggtctacgcgatgattcgcacatatgagatcgtctaggaggcgctcaacattcaaagtgatttgtaagagaacctctcatcaaggagtggactgtagaaagaacgaaacagaacaaagaacggcttgtttgtcatccaaaacggttttttcttgcttagtcaggttcgctaaatggttttttttccctgaaatatacattagtcctttggcacttctttctactctggtaaaggactatctgttccctcacctccggctcttgttatccctacatggactctcagacacttctagaggcagagcgctcgctcctgtcggctaattggtcgctcagctcgtcctcttcctcttctgctctagatttggtcaaacagactaccgaggcagcttatcaacaagttctttcctctcctctggcttccaaggtccttagctttactcccttcaagacattctcttcagagtccgactcggcctcattcgaggccacatatgatattccttcccgacttgtttctccctggtctcaatctcctccggaaagtttgtccgaggccgaatgggagctagttatcctctccgttggggtgtccttccttcaatccttcatacaaacgaactatactgggcctctgctctcattccgaattctcgacttgttgccgtcctccacgtttccagagtcggagggaagcgctcagaacgttgatcaggctgcgatctcttcgttgtcataccttggtgaacctgcgtaccacctagctcagaacccggctttccttgttcttgcttcgaggcttctctcccctccgaacggttggaagcatgtcaagagtggcccttggtggttgctccgggctactagagcgcatcatcaaactctaatgctcaacggtcctcttcctcttcctgattctgttctgccaggagcgagcagccttctctcaccttcctccgagcttcttcctctttcctctcctccggtctcactcattcaagatcttcgagcagcactaacgctagagatcggtctcgttcaccaccttcttctcgggtcggagaaggaggcgtccaacttgtttatcaaggcggccaaagacgaggcacgtcttgaatgggagcttaccggtgcgcttggtaagcgaactaagtggcaggagagggagattggtcagctcgtcgtcctcgctcgtggccgacagagaaaagaatgggttcctttggagggggataacgaagttggtatctatgacagggccggcgtcgttcccacagagggtgtcgtcaacgaagcttccatccaggactctactgaggaatcagatcaaaaggatacatcgacgaaaaactctctgattcccgagaccttgctcttgaacgatgacactctattggagaagactgagttcactcctacgacggcttcttctggatcgactgcttctctttcttcaatcgatccctccaacccacctgtgcttcatccgttggatcagtcgcatcttctttcgcttccgttgattcagtcccagcagccggaatcgcagttgacgacttctcagcttactcctttcactgcggtcgtgctttcttctcctcagaattggtccgttcatactaccgcgcttcttctgaggtccagagccgaggcaggtaggacgaggacggtagagcgttcagttttgcagttacaggctctcgtcgaccagattccattgaatgatgatggaaaggccaaaggaattgctccagccaaggaaaggcttaggttcttttgggtccttgtcttgccatccaagtgggacatggaaggtgaactcgccgaaaggttagtcagtctcggtgtcttccgaagtgctcttgagatctatgagcgattagaaatgtgggagaaagttgtggcctgttacaacgtgagtgaattctttcctttctactttcacattgttttgggtttgtcaggacgatactcatgtcatacttcgctctatttgaatttggtagcacctggagcaacaagaaaaggcgcttgccatcgtcaatgatctcctctcgggatccttagtcgaacaagcccgagtgaccgcgctgagtcgaaccggttcggccgcgccgtcgcaacgacatcaaatccggatgtcggtagcccgacgagctaccttgttatgtatgctggctgatcttgaacaggagggcaagctggaaagatacactcaggcctgggagggtacgtccttcgttttctatgtcatatgctcgcgagatggtttctttcccttcaaccggtattaaaatacattttgttgccctctcttctcaataactatttggtctaattgcactcagaatctaaccacacttcttctcgagccgcccgatcgattgccgctatacattacaccctcgacaagcctaaggatgccatccccttttttgaagccgccctggctatcaatccgctgtactctcggtcttggtttgttctcggatgtgcttacgttaaggaggaaaactggaaagacgcagtcaacgcattccgaagggttgtctctatcgaagaagaagatgccgaaggctgggccaacctggcaagttgttatctccgaatgggtgacatcggtggtcttgtaagtggcacatgcaataccatattctaatctgtcaattagatccatattcaaatcttggtttgctcttttcaccctttttttttgttaggacggtctcaagaaggtcgctgcaggggaggacctggatgatggcctggataatgaagatgttgatgaagtgtctgagactgccaaggaccttgtgagtgatgtctccatgtatgttgagctctatgattcaactaaccaaggcaaggtctatcaaacagaacacacagccagatcgaattccgcatgccaacaagatcctcgcccatcgtgccttgggtctgggtttgaggcatgctcatcggaactggaggatgtggtcgaattatctcctcgtttgtgtcgatctaggagagaacaccgaggcgtgtcgagctttaacccgtgtagttgaagaaagagccgacaaggtcggtgaggagtgtatcgatctcgaggttctcgatcgacttgtcgcctctgtcactcgggatgcagctcccggctcggccgaggctatcgaggaggcttcgtccggagcagagcgggcgcatacgtcaaattctggtcgtggtcttcttccgttcttgtccagggtgcttgaagatgtcatcctggctcgaatcactacatcgcctcgaatcttccaggctcatgcaaaattgctactctggcagggtcgaatgggtgataccctcgatgcgcacctgaaagcgtaccgggctaaagtcagctcagacgacacagttgagagagacttggcgagatggaaagaggctgttcaggatactcaggatatcatcgaaactcttatcgcatttggaccgagagccctagaggaggaagagaaagctgtcttgaagagcgatgaggaaggagccaagttgaagtggaaggattggaagttccagggaaggagtctagtccgaacgttcatgggtatgtttttatttgtcgatgctctcgtctcacaagatgactgactgaaactggttttctcctctcattctatcttggccatggttgtttcttttctggaaccatgctttcctcaggtcgaaccaaggattcgttcgaagatcaaccagaatgggacaatctcaaagaaactctggaggatctgaaaaacgcgtgaacaataaatgaatgaacacgtccagacagacttcatgacagccattaattatacaccataatgataacagtcatatagacatggacgagaacgatacaactactgaagtttgtatgaacaagccttctagatgagtgaagatccgtaagcgagggtgtatagacgacaaaatactgcgccatctatccatgatgtcaccgtcgttgcgacataagtcaacgtcttgtgaaccagccagccttctctaattccctccaaccaccatccacttgaacatctaatcttgccatccgagccttccttatcaaccaatccactcttcaaaatacatcttctatcagtcagtctcttgccgcactcatttcagttgggaattactctcgtgtgattgtttgctagaaggctgtcgttcttactgctgttcttccgtcgtgtaccgctatttagtggctttcaccggatccgatattatcaagatcatctttgcgatcctccttcctcccgttggagtcttccttgagcgaggtacgcatgtttttgagattgttccatacagagagtatttagatcctcctagttgagaaatcggtattgacccttccacatcgctttgtgctcacctgcgttttaggctgcgtgagtcatcacctaagatatccgggaaggcatcctcattcctcaccacacacagcctgactgattcaattttttttatattgactctgtaagaacgctgatttctggatcaacgtcctgctgaccattcttgggtaagttctgtgatgtttctatttctagatttggtttgagtacgtttcttactcattcacttcctttgacggctttcgtacctcaaagttacattcctggttcgtcatttcttgtttgatctgagggttcatgacgatggtctcctgctgatatgaaaattcatggggtttcgtcttccatccatcaggaatcatccatgctctgtacatcatcttgaaatattgagcttgaaacattgagccaacgatagtcacggctatatgctgtaaaatagaccgtcgttcgttctctgtttggcccggtcattcataattcagacactttcttctgagtcatatactgtatctcgttacgttcttagcatatgccgtttttttgatattatgactgctgtaattaataatgaaaagtttctggcatacgacctgatcttggaatcgaaatgagagaaaatcgacgaggaagaccagcatatatagatgtaaatacacgtagctgtgatcaaacaagagggagtttgaatgacgcgggattagacttggtcgatctatatcgcaatatgaagacctaaagagaatgaagcggtccaggacacaaattttcaagctcgaccccgacacagatgctcagcatgtatgttgcctcaagactaggaaacaagggaataggcaagaggcttcggttttcaagatgcgtagagcgaagcttgggagtttactcgacggacacggaattcagagtctggaacgcgtgagttgatcgggctcgtaggaccgcgctcgagtttgaaaactttcgtctctatgacctctgatatccgagacctatatcatcatggaaggcaggcagaagggcgaaactccgagtggcttgagagatgcgctaaatcacggcgtaggtgagcagaggatttagcaggccgggagagcttcatttttcgatctttgtgcctgaccctaagaggattgatttgggtatttgatgagtcggtcacttagttctgatacgaggaggagaacatgagaatgaggattagtggattatacaatgccgtgctggaacgaggaagatttgcacataccaaaccgtaccgtatgaaggtcgctcaaaatgacttgtttataaaaagaaagagtgatcaaccccagatgagccagccccagatgatccagcaaaaaaccagccccgatacccagccccacctgatgtctttctcctcatcattgtccgacttgatatgatcgcctgctgaacacgctgactccggtaaccgggtttcaatcaaatagatcttgtctccgggaactgtaaaattgagggcttggccgttgatatacattgtttctaccgacggagtttcatggtgagttgtcacatgaagtatcggtttagccatccttcgggcggtcgacatcgtcccgacggaaggtgtatcgttgatgggcggcactggtcaggttctttggacctaggctataacagcgatgcttcatttacatatacttatgtgaaacttgaattttgtaaatatatcaaaaatatcaaaaattcaaactatctgggatatttggtatttgagaaaccaacgactcaacgaccaacattcacacactgtacatcaaacttggttgattgccccgtatttatcgcttggtcatggcttttgggaaacagaaacgatcgaacaagaagcacgactcgaaaccgtacgaccatccaaactcgaacgctgcctctgagcccttgggtgcaactccgttcgctcctacggacgaagctctcaagggagaggaagagaaggaccttgagtcgtacttgtttggaaagaagagagctcccagggtcgacaagaccctgttggagctgaacgtcgagaagaacaaacagcaggatgatgcagtggtggattctgttatgggtgggatggcagattctgaggtatgttctaattactttccctacaaatgatgccccttccgttctctgtatattttgtgtttgaagattgatatggttgattctcgactgtatggcgctacttttcatacgtgccttgattgttcaaactatgaaagctcttcttcatggacgcgcctggccgttcaaaaaccggtgaggttgaccaagaggaaaccaatcctctagatgcccccttctctgacgatgatgaggaggatataatggagagcgataactcggactctgattcagagcccgattctgagtctggctctgaatcagattccgattcagagtctgaatcggatagttcatcttcctcgtcaagcagcgcgagatcagtcaagaagtctaattcgaagaaggcagcgtggcaggacccagatgacgcaaacatcaaagtctcgttaaagagtcaagccaagttgaagaagttgaggcaggacgcggatgaggatgtagttggtggcaaggagtacgagcgaaggttaaagacccagtatgtacaatcctctctttctcattggatccagaatacctgcgtatatgtattgagctgattgtttcgatgaacaggttcgaatcactcaatcctcgtccccagtgggccaccgcatccacttcgagaggtatcgccggtcaggatccgcttcagtcactactttcatcctcctccccgttcatcgcttcatccagggcccgacaatctgtcctgccttctggagagcttgatatcgaacgtatcaaagacgtcaagggtggagaggaagggccggtccgatgccttggctgggctccttctactggagatcgagatatcctgacagttgctggaagtgatagacgggtacgaatctacaatgtacgtaatctctatctaggttgggtttatagattcttcatgatgccatagaatgctcaatcacaccctcgaacgatatccccagatcaacggtccttcgaaccctttgctatcgacgattcacattccttctttgccgatagacaacctcaaattccacccacatctaccccaagttcttctttctggtaaacgacctttccttcatgtgctttccctcgccacgtcgacttctgctcgattgccattgctcccgccgtcgtccaacatacctgccccgaaatcgctctcgtccgtgtcgttctcgcctgatggaaaaattctcgcctgtgctggtgcgggtggaacggtctaccttgtttcttggggagctggaggacctcagggtttgattgctatgttgaagaacccgggaggcagcggtaagggagatggtatcgatggacttcactgggccaaggacggaaaggagctctggactatgggcgcgaacggaggagaggtctgtgtatgggacgtcggagcaaggagatgtatcaaccggtggagaggtaccaacggcggtgatggctggggtggatttggagctaggattctggaaggaaacgagcgagccgggctgtgtgctgttgggtaagtatttattcacagagcgtaatctcccatgaacgtcgcgagaattaaatcaatcgaacgttgtttgttttcacccatcagatcatccactggaatcgtcaatttgtacgagaacgactacacaaccgaggccgctcctccgaagttggttaggacgttcgacaacatcacgacctctatctcgtcattatgcttcaacccggacggtcaaatccttgctgctgcctccaaggagaagaaggatactctcaagctggttcgtctttctttgactaaactcgttgtactcttcaacatgaactgacctttcatacaacattcatctttcttcgcgtatcgaacaaacagtaccacaccgggtcgatgacaacgttccagaactggcctacggcttcaacacccttgggcgtggtcactgctatgggctggagtcaaaagagcgagtatctcgcaattggaaacaagagaggaaaggttttgctttaccgagcgcgggcctacggtacatattagaacagagaatatcgatggctatatacatgtgtgctttacatgctcttaaatgaatctgcaaattagaagagtctaccttacgtaacgtggtatccaagtcaggagaatcccgggtaagcccggttaatccttaccggttcaaccctccctccatcaaactcgaccacttcatataaatacaacgttctcctttcttcctttccactttcatcagcccagcgttccaagatcttgtctctcgtaaacatcctatcacaaacactaagaatcatagtttattatcatggcttttcctcgccccaagcccactacaggagagaccctcgccatggttcgtgtcgatgtgtcatatctgaaatcgatctgtccgagatcctttcccgcgtcgattcggatggactgattctcctgttcctctcttctcctctcctatggtaatatcgactcccatctgataggagcgagctagccctccatttaatgttcgaaaggtatgtctagttccttttttctctctcttaaatcgacatcgagggtacgttcctttctcacgtgtacttttcgcattctgtgcagctcgccgtcttgatgcacaaaagtgagaaagatctggcaagaaaggaacgatttatggccgaggtaatacatatgttcccttctcttgacatgatatccctaaccaaatactggacggttgtatctaactagttttcatgggaatctttcttatcgcggcgactatagattgctcgaactccggctttccggctggatgatattcacgacctatcgaaggatgagattcgagagagaacaatggaaaagtttgcaatcatggtaggttttctaatggagtttctttcttttctgcttctaatggcttgggtgatgagagcttccgattaatctcttttcaaaacaaacaattaaggtccattacgtgacgaatgaatctttagaaactttcaacctcaggatgcaactgattggtacgttcttggttgaacatctcttccgatggtctactttgacatacacgctaacttggtctgtttactgtctgtttggtaggtatcgccgatcccgctttttgggttcgttttcttctcagaattcgagtgatgaatttgcattgaccggattgtacctgaacgaaatctatctcatccgtagacaagattcggggttcactacggtttgtttttaggtgcagtgagaggtggagcaacgactagtcaattgaactactgggtcagcatttttgcattctctattcggatcaaaatgtctcggcggtgcgtcactgactcgcaccactctgatcactaggtcgagaaaggtgttcttggcctcaatggagttatcggatgcttcggtatgaccgagctagcccacgggtgagtgttctgtttgtggtgagcttctagcgttgagtgaggacagtcaaattgaatgatcatcgttattctcttttatcttgtacatcagttccaatgtggtgcgtcttcttcctccttgattctcctctatatagttgtatcaatatgccatagatcagtaattaatgagttttcgtttctacaggccgggcttgagaccactgctactttcgatcgttcatccgatgagttcatcatccacacccctcatattgttcgtccgttcttagtctgttttgtccattcaagactatcttcgtgcgttctcgttttgacaagttcgtttgggattcttctcgactactcaagggtgcaactaaatggtggatcggaggtgcggcttccacagcgacgcattgtgctgtatttgcccagctggtggtcgacggtaagaaacacggagtcaagacgtttgttgtccagttaagagataccaagtgagtggcagtgattcattcgaggatgaagaacatctaagcttgtgctttcactattttcttactcgattggactgtccatctcaacaaaaagaacattccagcttctccctggaatcaatatcggagatattggtaagaagatgggacggtgagtgtctattcttcctgacgggaccgaggtccatcgataagaagaatatgtctataatttgctcatctggttcttcatttgcatggtgaagagatggaatcgacaatggatttatccagttcacgtttgttagagtacctcgaagtcacgtacgttctctattgatacactttggtttctttgtttgatcaggcctaacattccgtaccctttttttcgaattctgggggctgatgtaaataaatagatgctgatgaagtacacccaggttagcaggacgggcgaggtgttcgagccgccgctcgctcaactcacgtacggagcgttagttggcggccgaacgtcgatggtttcggacagtgcgaattctgcaaagaaggcgctgacgatcgcgattcggtatggagcagtcagaagacagttcagtagcggaggaaacgctgtaagtaatttttttttccctttttccatcatgtttcatcttttctttctctcgagggtagcccatctgaattttgaaaacgttttggtgtaactgttcagatcgagacccagttgctagattatccgattcatcaacgaagacttatggtaaggctccccttccttttttctactcctttctagggttaaggataggaggaaaaccaatgcgtcttcttcgtcctctgttaaacagcccctactagctcaggcgatcgctaatgggtttactgcccataagatggaggaaatgtatggcgagctgtcttccgctttggagacattggaacctaacgatgtgagtgtctgttttctgttgtcctgctttttggtggcttttgttgtcactgacacgatttgcgcatgcgcatgctctataactcagccaaacacccaggatgtgttggacaagctgaaagaagttcatgcgacgtcggccggtctaaaagcgttctgtacatggtcctgtctgagtacaatcgacacctgtcgacagactttaggtggccatggatacagtgcttattctggtttcccctcgatgtacaacgatttcgctgtccagtgtacttgggagggagacaacactatattgagtttgcaatctggtagatccctcatcagtagttataccgacgcgatcaggggtaagaagctagcacccggggtatcctatctggcccgaccgaacgtgtttgaggcaaagtcttctgggaagcttgatcttgaggacattgaccagggttgggcttgcgtagcggcgaatctggtgaggaaggcggcggaggattatgagcgattggtcaaggacaaggggatgacaaaggagatggcgatggaaggttgttcccagggcagatttgtcgccgccaaggtaggtttctatcgtatctgcctggactggcaatatgagaattgtgagttggctgacgatgacattgcttctctaggctcactccatcggttacatcttccggatggtaagtcaagagatccgcgttggatgatgaggaagaacgttagctcattcgacgtacactgtgctgaattttcgttctacctacccttttcaaagttcaaatccgcactcgaagccatcccagcagagtttgagaacgagaagaaggtgttgttggtaacctgcaggctgtatggtttgcaccagatcgaagagcaggccggcggtttcctcaagtgtaaattctttttttgacggcagctttaaatacaagatgtctgctgacaaggtcttctttctttgttcagacggctactttgagagaaaacacctggatgcgattgagcttgaggtgaacgacctttgcgcccagcttcgggctgtagccggtgagttactatacaagcactggatgccctacgagaacggatgaagtctaacggtgttgcaatcaattgcgtcgccctggtggtagtccctgtggtggatggtttcgcgttgagtgatcatatcatcaactctcctctcggccgatgggacggtcagatctatgaggcctactttgatcatgtccgacggtcgaaccctcttccgaagagtgagtcctggatgaaggagagagacagaggaacgaagacggaatgctgatcatgaactcttttattcctgaccagtccatccatactttgaacggctgatcaaaccgttactcgagcgacaacccgcgaccgactttggcgggccggagatgagaaccgagctggatgaggagattgccgagctcgctgctgaggccaagcgggccaagcagacgaatgcgtagtttggatatttgggcgtccgagtgttttagtatattgccaaacattcttattcttatttttgttttcttgtgctctggttgtaatcatcattgatgtctctgtatataccttgttctctgtctggctgaggatgagtgtggcctgaaatcgagacagaagagcaggctcgagacaagagtggaagaagacctggggaagatatatacaggagattgtgagagacactttacgaggattactacagaagctctatatcattgccacagaagctcgatgtcgatatcttggatgctgtacatccataggtcgggtactatacgggtacaccatcgggacacccacaggcagtacggatgatacattgagaacacgcttacgactagactgtttatatgtatattgacactctatacacacatactgtgacacgcacggacgccactcaaatacacatcgatactactacacacacatttcctccaagtgcactcagtgtatgaagagacccaagatcgggaatgtgttccgctgagtcgatctcgatctggacgagaggagagagtcgatggatcgggaaaatgtaattttcaggaacaggccatccgaggcggcggcgaggaggagaaaaaaaagaaaggcaataaggcaataaggcaataaggcaataaggcaataaggcaataaatcaatatggcggcgccggcagagaagaagctaataagccaataagccaccgaaaaacaccagggcatcagggcactagggcgccagtcattctaatccaccggccggtgacgttgtggatgatcgatcgagcgagccagggcaagcctgctgcgcttttaacctccagacctcccaccggtcgatcccagttcctgagcggggagaacgcaagaggtccgtgcgagggtgcgtgctcgctaattcggtctctccaaaggaacaccaccaccagggaaagctgaagagtttgtcgtttggtctcttgtcttgactgctctctgtcgtccatcatcatcatcatagatactcacacttacattcccactcacacatcatcttactctgtacaacgataccattacaagcaggtttgactctctgcttgaaaagatttcgtgaattctgccatcctcgcatggacttgttgcctttgtcaccaggccagcggcggcagcaacttcaagagcaacagcaactccaacagcatcaccatcagagagaccacctccatcatagggattctcgatcggtaagtatcgtcctggccgagtatttctcgttttctctctgtctctctgcctgtttctttttcttctttcttgtctgttcactgtccgttttcctcgtctggtttcggtcaagtcccgtggctcacgctttcattcatttcttctctttgggtctctccctctatcttttgctcctcgcagtcgtctccccgggatctttctgcccaaccatcgtctcagtcacctcgtcctacccagtcggccagtcaagatagctacactcaaattctggacctttccggatatcctcaccagccattccctcacactttcaatatccaaccagagcaagaagtcatgtcgtccaccagatcggccgatccgatcagaactcccgatcagtcatctcccgatcaaaccttgggcgatcagacgtctacacagactctctcccaaactattcctcaaccggtcatgtccaacacaacccgtcccagtctttcgttgacatcgtccgctctttcttcgtccttaccggacacgtctgctctgccttcgctctcactctcgttattcccctcctcctccgtctcctctgttccacacagatcgtccaacctagtggcctgtcctgaaccacatacggaccttccatcgccatcggaaaacagcaaagccgaccgggaagttgaggatgacactgaagcagacgacgaagaagacgaggataacgataatgacgacgaagacagtgagagagaacacagacggtcgtttaaacggtggagagatcggtggaaggttgttcaagattgtctcaagtggtgcgctcgtcttctttctatctgtttattctttctttgttcttgtctcgttgacatagttttttgtgttttatctgtcctgccttcccacacataccggcatactcataaaattaattcaccactgcatccaatctctcagtcccctctgcccgccggaccacctgttgactcagccagagacgatcgtatgcggtcactcgatctgtcacctccactactcgctcgcaggataccgatgcccggtcccaacctgtttccttcctccacagaccatcagaccggacaccttacacgctcagtttaaaccggatgttatcctctccaagcttgtcgagcttgtttcggcgagagcaaaggcgattgccgagggtaggctgatcgagatcgaaggttctctttctgaaaccggagaggaaagcgaggtcgaaagacttgcgctcggttcatccgatctcggtccctccgcgcggaccacgcccaacccttcgccgctcggccgatccactctcgacccatccacatcgcctgtggccgaaagaccctcggcagccaaacgagccaggcgtcatcaacgtaccttatctgcctcctcttcttcttcttcttcttcctcttctttcgcagcgtacagcacacccactgtcggtcttcatgatgactccttgcctcggccttcttcttcttcttctgtcccactcttgcctttgccctcctcatccaacctgcccctcttatctaccctgcctggttcgatctctcgatcgccctctcctgcgtcctctgtgagcggtcgactctcgcggacttcgtctttaaaccgccaaccgacgcatgcagcatcctctaggaaaggaaaacctagaatgaaacccgtttcgcccgctcaatcagtcgattcctccgccgatcatcttcgatcgataagaccgacgacgaggacaagaacgaggacgaccaaaaagtcgggcatctcagtatcgactgttggaaaacaaacggacagctcgtcagacacgttgggcatcggaatgttcgaaagagatctattaggtctgttggaatgcgatatttgtgctagtatcctctacgagcccgttactaccgcctgtggtcatgtatgtttagtcttttcactcctcttattctttcttcctctcttgctgacacaccatactttttgacctttctcagacatattgccgatcgtgtttgtctcgctcaatggatcattcgctcaagtgcccgatctgccgatccgatcttcagatgatgagctctcgaaatatggccctcaacaaagtccttcatgtcatccgtaagtttatgtcctattacagtcggctcaaccgcctctccatgctcatactttcctttctccagtcaattcggcgtttgcagcagaatgtacagaacgaaaggcgatcctggatcatatcgaacaagaggcctcacaagacactccgatcttcgtgtgtacactggcgttcccacacatgcctactattcttcatgtctttgagccaaggtacgactttccttgacttcttgttgtaccaatttttgatcaaccttgaatgaatttccttatgtttctcctaattttttcctttctcgtagataccggctcatgcttcgtcgatgcattgagtcaaattcgcctaggtttggaatgacactaccacccagaccaggctcgggcgtcaggtatgggaccatgctcgagatcagaactgttcaggtcatggccgacggcaggagcatggtcgagactgtcggtagctggcggttcaaaatcttggagacttctactctggacggatattctgttggcaaggttgagaggttggtctttctgctattctcatgttacgtgacctcaccttcgctgcattcaaccacacatatttatcgctttttgttttggggttgatacaactctcgatagaatcaacgacatcacgttcgaggatgaagtcgagttggaaagagcagccttagtaagagctaccgccgctcgacaagcccgattgcatgcctcgtcttcctcgacctcggcccattcttcatccattccgacctcgtcgtcgacagaacattctttgcgaacagacatcggcgaagatctcattccgaccaccataccgacttctccgtcccgaacgacaactcgaccaaacgctcgctctccacatccaccccctccaccaggattatcatatccggaaactaaccctgatggaacactcaaggatacaccggcggatatgtcgacggtcgatcttttgctcatctgtagatcgttcgtcagccatctccgctcaggaagcgcgccttggttgctgcaaaggttgaacaacacgtacggaccgatgcccacggatcctagtctctgtagcttctggatggccagcgtatgtccttttctcttcgctccttttctgccaatatcactgacgggtctgagcatctcttttttccatctgaacaggtcattccgatcgacgaattcgaaaaggcaaaactcttgccgataagatctccgaggttgagacttgcgcttgtcgtccattggattgaacagcttagagcttcttggtggttctctaggtgtgtctctttctctctctctatctttttctttctcttgtcggttatctgtttgtttgttttttaattcaagacgtgggaagagatctctaggctgactgctgtcttcacttttgtgcaaatagcggttgcgtgtgcaattagatccccctcttcataactcattatttcctgcctttcgactcccttgctctcaatcggttcattttacatctcagtttcattcaaattcgatctccccatttgatttctttcaattcttccatttttgctcgctcgtctcgactggaccttcctctctcatcctccactcactacctcatcagctccttctcgtttcttgttttcactctctcttcgtccaaatccaggtttcgattcatcaatctcaagttcaatccacgggtttctctttatcttctgacgtctgttcgttccatatagccagctccaagttgtataccttcatcaaacccatctgtcttatcgtttcccttgtcctaactgaatacgaaatacaaaacatcaaccccttcagcttttttgcacacgtctccgttctgtgtttcgttaaacctgccttggctgcttctgctcgatttgaactggcttcctgattctctgattttgaagatgggacgtcggttggtttgggcggctttgcgagtgacgaccatgtttcaacatcttggattttgtgtgccgtgtatcttaggtatcatccatcgctcgcctatcttgatagttattctatccagctcggtgaagccggctggagttacgtatgctcaaaatttaatgatcatctagtggacaacagaattaaaaaacgcgaaaacgaaaacacaaaggatgttagtacagaggctcgtttcgactttgaaccgagtccggtcctccaatgcctgccgttcttctaatgtcaaatcgtaagacgggggtgactcgtggaaagagggaactcacttcttcacccggacgacctcctagattgacgaccgttcctttccaaacgttcttatcgtccttctcttcaccaccattcgaaccatcaccgtctccctctggtttcgaggccgcggaaagaacggtatgacgggcatcccactcgatgaccgacggatggactgtaactctatatgtggttttccagcacatgttcgttcgttttcccgatcaaccaatcaactgatcaaagaaccgatcgaactaaagaaagaaaaacaaacaaggggagggagtggactgactttgaaggtagaaagttcacgatctgtaatgtttcgagtgacgtacacctgtttttatttcattttattttatcccccccgagcgcccgaagttccgataacccagaaagaaacatcacatagcagaaggatgacaagatacgcttcaggactctctgtatgtggggaatcaattgaacgaagaagggacgataagaaccttgagaccgcaacgtatgtttggcctggtgatgccatccggaaagaaaagaaaaaaagagaactcgatcagttcgtaccgatcaaatcttaagaacgacgttgcctcccctccttaagtcttctttcctgactctccagcgttgtcttcgtcggcgcgcacaacgtgagtaggagaaaggaagagaacggacctttttcgaaagcgcgagctaggtcaatctttacccttgagagtgtttggccttggctctgtataacgttccgatcgcccagtgtggtttgttgttattatatttcaatgagtaaaaagaattaacgttagcatcttggtatgttgtccagtgagcgcaagagaaagagggggaaggaacgataaagaccttgtgaattgacatggcccctttctcattggaaaagattaaccagagaatcaaaagttcatcaaaaacatgcgtactgaaagcaaaagagaggagatgatggaaatgtcgtacaggccagaatcagagggacttgtcgtctggttgcctctgttatgagttctcctttcgtgaagcgttgtactttaaagtctattggaggcatcaacatcttctgtcccgagacaaactttacgtgtaggaccagatcgaaatatcaatttgagactcaataaggacagggtgaaacgagaattcaagcggaaagaattgcacagacctgaacaagaggccacagacgttcatcttctgatgaaggtgcgttcgctggatccctgaatgaactcaactgtccgtcccactttccctgcctagttgcaaccgtaagtaacacagcgaacatcaccgcttccgagatacttcacccataaagttgaccgaggcactcacttaacaccaaatgcattgtacatcttggagtcttgaacaagcgcattgatctttggttgtccaagccgagctctcttgttacagctttcaccagtggtctcttctggttcagtttcctccaacttagcgacttcaatactgttatcacccactgaacagaccccacaaagaaggaacgtcaagtcaacacaacacataggaggagatagaggagtgatttcagttcagcagttggcgtacaggctttctcgattgactgaaagtcgatcaccttccccagcgagccgttgaccagcttcccgttcgtcaagttctgttcaccgtccaatcagctgtgtgtttagtcttcactggtgagagaaaaggaagcttatgagcactacatggtgtaacaagagatttctcacctgaatgagcatgacgaccgctccgaccttgagagtgagctttttgatggctctgcaatctttcaatagtcgatcacatcgctctggtgtgacaagacggtgattgtcgtctttactgaatataacggatccattgcctatggtgagtatgccgacatctggacacatacatatacacggacactaacccaaggatatctatcggttcaaatcagtgtatcagttcaaggaaagcttacagaagcgttcaagaataacaactgaccttcagccagaaatatatgaggcgatcccggcaagtcatctaatctttcatcattggcggcttcgactttatcctttgttggatatcttctatgcagaaggagacagatccagacaaatgagtaggtcaagtgattatcgagaagtatcttacatctacatacagttcggaatagatgccatcctcataatcaatctttcttttgagactaaacaggatccgtctggcttgtttgtcgagctaatgtgcgcaaaatcggtccccactcggacggacacggacgtgagttggtcatcctgtgaagagagagctcggagaaagagcacgtacttgacccttcctcatttggtctaggacacgcacgaacgctgataaagcaccaaaacataagaccgcttgctctcttgcataggagctcaactttaggagaaaaataaacacacaccatcatctttctgccggaaaacctagcggagatatataaattagccacaaaatcaacgatcgtctcgtggagaaactttaagtgcaaagaaacaaacctgcttcaaagcaattgttttgggtacgcatgcatcccacgtgagggcgttgaacgcgaacacggccagcccgtcttctggcactggtggaagttggaagaaatctccaaccaaaaccaactgtaaataattcagagatcttctcggacgaaggatgaaaaaatcagatgcatccccagcttacttgaatccccccgaaaggctcctgattccgtcgtgtaaatcgggcaacatactccaacttgtcaaagaatcgtccatcgatcatggatatctgtgaacaacccttggtatcatcagcaggtgattcgagaaacacaacggctgtggaacatacttcatcgatgatcaggacatcagtgcttcgccagcgttctaaagctcgacctgtttaggtcgccgagatgtgacaaggttgttcgaataatgatcgaatataattctgaagagatcatggagaggggacgtgagcgtacgatgattcttatctctgtgtatcccgaaggttgaaaggcgaaaatttgagattggccacagatgctaggatatatttagtatgatagatctagaaggtcataccgatgaagcatgttctctcccagcgtcttggcgtcttctaaacccagtcctactcctgcccaagaatgaacggttcgtcctctgattccaatagcagctatacctgtcgaggccgtcactgctacttctctacgtgcccatcgaagctgcttgatgatcgctttgagtaagtatgattttcccgttcctgtcatacgagccgccgagtgaaagtaaggcgacaagaatcccgcatcaggtatcaggtttctagagtccgaggccgaaccagagacacaaaagggttgttcacataccggcagatcctgtaaagaaaacactagttccttccatgactaggtctagtatttttctttgctcctggctcaatgatccagagctttttgacatgtctgtcctatgcctaggctttagtatcctctctggatcatccgttgaggccgcttttgagattgaacactgttcttccagtatatcataggaagagtccacgtcgatcgagataaaggaagtgggtttataagaaggttctactggactttcttcttgtgaagagtcctcttcctcttttgccttcatggttgttcatgtatgagtaggtcgaactttgttctttttttgatcgctcaacttttggacgcgacgggactgtgtgcgtcgataagactagctgattagataaggatcagccaatcggcaaatatcacatctttgcgcaagcctgttgcagttactttcaaaggcaagagagaagcctgaggctgcatccgagagagagaaacatgtagaattctatattgatacacctggcattgaaagaagcagaagatacaccgaacgcaaatacatttccaaatctctaccaaccccctcgacatcagtcgactttccagaaatagaagggaccagaaggtgattctccatccgttgagtttgggatagaccaaactccgaagatccctcgtcgaccacctaaccctccaacctgaacaccctctagagaccatcgatcctctctgtcgtagctgatggtaaacctcgctcgaagctggggaggtgagtcaggtgaaaggaagaactcggctcgaacctcagtggcatgatctggactagacatgaatgaagatccagtgtagtgaagaggatgaaattttgtggaaaatggagaagatgaagaaggggaggtgccaggtgagctaacagaagacgggagtttggatttgggttggcttgaagcaggaggattaagggtcaatgtgagattcatcaaatcgccagtctgtaatccagattaaatcttcgtttagaaggatgctacgccatcctatgattaagagaacagagactcacatgttcctgttcatcactcagtagtggaggaagatttcttctaactgtcctaggataatttctacatagaccattttagagtcgtatagccagaaagaaagggaaaatggtcaggacgggacaagagaatgcgccgcacacgaccaagaatagctaacagcatacgcacagttgcatgaatactggataatccaagaaagcgtacatccctttccattttccacctgcgttcgcccagtctccgtcgtttttagtagatgtaccatcggcaagcccctttggacgtgcgtgctcaatgtcccaaggcaacggctgcccaaggtctgcctcgagaacatcttggaagtctgagatgttgtatctcatcagagtggagattgagttcaatatatcccaattgacggtaccatccgcattaaagggtccccgattgggatacggtgagtaggataaaacggagtaagttatcttccgagcctgtctaacgagtacgttaggtgcgatctcggtacgtggatcaaggtgaagttgaaggatagtcagaagtgtctgtgcctctggcgatagaggagggaggggaggagaggttggcaggagccgtttggacagggcttggatattctttgacttgtggggagccggagcagcggtgtgtaacaaacgaactagagagagaaagactgatctgaacgtgatctggtttgatggaactcaatcgaattcagttcggcaagatgagagatgatcagcactcgttggataaagatccatcagaaagagcaaaacgaacaagaagagtggtagaatggtatcttgatatagagatgaaggtgatagcaaaagagggatagactcacctctttctttggatcatctataaaaccgttctcccatcgattcaatgcttccaccgctccttgaaggttttgtttccaatcataagctttgtttccattggatgaactgtccgacgagtccatccctggatcaattgcccaaccactcgtccgagggtcgtcaaacagatttagataaagtgatctccaaaggtaagtcgaactgtcgggtccatagatgagctctctagcctgagagcaagtctgagcaaaacccgagaccgattccgtaggaagcaaggcaagaatctcgaccagaatcttcataatgtccagaaggtggccgaagggtttttccggaagtaagaggagagaaggatggttgcatgatcaaggaagagaacattacaaggatatcagtacagtgcagcggtcatgacgctgctcgactggaaatccgtcagccatcagccatcagccatcagccatatagaaaagaccgtcttacctccggaggaatcttaaagatggttggagtgtccatttagattgactagcacgacggaatggttggtaggaccaaacttggtagatgagcgttcttccccgaccatggaatttatgacgacgaatttaagagtggccaaattccccggccagcgccgaacagatgagacctccactttggaggactggctctttctcttcatccttcgttctacaatccttgctctcggaatgttgtccaggtctttgtctcgcacctatgtagcacctgtgctcagtggcacaccatctggtttgatcaccagtagattggcttcctttcattcctctgccttttcctcgtccttgccgccaccgtcatctgcaccaccaataccgcagaaaccctctgctgaagacgaatcagctgaaactccttccgcttcggcccacctatttcagcaggctctagaagaagaacgcgtatcgaaaccttctaagcctagtgtttcctccgctcgattgctcgccgctctcgaggaccaaccatggacgggagatgagcctctcgaagcgaccgtgcttcgaatgctagtcgataaacacaaaccagctcgatcgggcaagattcgctcatcggatgacaagattcgtgaagaagtccaaaggggtgcgctgaaacgaatgatggagtttggatcgggaggaggaaccaaggggatgggaggttcagctattgaaggaggtggcggacaggaacgactaccgactacagatagccgagtcgactttgttccccgagtggcaaaagatgggtataccagagtagctggagctgaagaagaagaaccatggccgggactgaaaggaagcccagatcatcgaccttggcattcgacctatgtttctcccactctcgctacctctcctctcatcaaacggggaaacgtcacatccgatcagccatcgtccgtcgaacgatcggcccgatcaaattatcagatctcaacggatcctcaggcaagagctgcccttcggagggccagaaagcttcaagagggcgccgttcgactgggtagagccagagaaggggctctggactatggactcggaggaggtgagtgggcagaaaaggacgaggcccatagggtcaacacaaaaggaatcggtaaggtcggagaggaggatggaatgggcggaaaattagaggttagagttggagctggtgatgagacattaggcgctgggtggggatcattggtggaactaaggatagaggtgcgtctcgatgcctgcttcatttccaaattgttctttccttccatcgaacctggtctgatcaagtgaacccatctcaacagagagcaagagcggagggacatttcaagaatcttccaggacaaggcgctcccattccgcatcatgtcgaacagcataatcccttcattgggcgtacggccttctttatgtaggtcaactttctccccagttgaggatatgtttatcgtatatgtggcactggcatgggagtcactgattctctctttccgtgatcaaattaaggaaccggatcgtccagaagaacgaagcgcttcccatgtggatagagtaccaaaaaggtaggcattatcgtcctcttctccacttctcctcttcttcttcctcctgaaacgagtctcatctgatcgggtttctccgacgttctccgtatgtcaaataaactacagagcacaccaggaccatagaagagtttcgaactcggctggaagactttctcgtcaagcgattacacgttcatccacggctaagaatgagtttgagccctgagcagattgctcagctacgagtagctgacgtcgcggagaacggtgcagagcgaagctactgggaaggatcgctgaaagaagtcaaccaggttggacgaagggcagatggagtagcgcgtgtgtattcctctcactctgtctgtatgaattatcaagatccagggctgaccgaagctcacactatctgattcgtatgttcctatcggatttctcagcgccaacggctaggagagggttagtatcattttgcttgatgtcttctatccgaacgacgatctcaacttgactcatctctttgcttttgatatcgtagacctctctcgatcgaaccagagatcgaacgagcctatcggacagcatcggccatcgtacatgccgagctacatcggcctcttcctccacctgtcaaagacctcgacaaaatcggatccgacaaggtcagttggaagatggatcttccggactggatctgggaaagttggttggtcgttctgatccgcgggttgagagagagtctgtttgggggtcgacgaatgcttaattctcagggggtggaagagtcaagaggtactcaagaggggaagaaaagctagttagatatcttttcaccagatatacactcgccatatataaaacaacccaataagagagtatcgaacataggtctcatagcgagattaacacccccattgggcttatgtataagacggatagttgatttatatatataaatgttagggttaacccaagaaactagaacatgattcatgtcgaggcgtatctacaatcatctgatgatcatattagcataagatccattcgaaacaatacgcaggaataaccaagcaggtcttagttgataacttcggatcgcatggatgaaggcttaacacaaagtctgccttgatcgccatcgccaatatcagtcgagtctagtctagtctctcatgatcaatacagaccacgcgttggttggagacttcacagaaaacatctcggcgactgaatggcaggttgaatgtctcacaaggggaacctaatgaaaggaggtgtttcactctcacattcactttgcagccttggtgtgacgtctctatcagtcataagtcaatggacaccagacgtctacaaagactcgtttgaaccagaggtaggaccaaatgtgccgttcgattgtaccaagccgttgtcaggaccttgtatgagcaaactcagaggcacacacaaaaacatgtaaaagagtatgaatacctccaaaaagaaaatagatttgtcaaaaagaatataaaaaaagccaggaaagatcgagtgtaggaaaggacgtaaggctagagatcgtcatgtaatggtacttggaatgtgaagaaggcgagctcaggaaaaactcaagaaggcgaggaggcaaaaggagaaaggctgagtgaacaaggggaaaccaaaagctttgtcaaccgttcgtttttagattatccaattagtttcgtcgcttgaggttcacgctaagccactcgagacctgagagtcgtcgcacgaagaacaaaaaaggactctagattagttcatgaatcatctactccgagcgaaacagagaaatatcgtaccctcgtaaagaccgtcaccagaggtagcacaggtggcctggatgtaccaagtcctctgtcgaagtccgtgaagtccaagcttgtcggtgatctcagcagcattcatagcgttaggcaaatcctaaaagaaattgaatttaagtacaacacgtttgtcagatacttatcaaagagaagcgacgacgcgaagagggatagaatgacaaacctgcttgttggcgaacaccagtaggagagcgtccctgagctcgtcctcattgagcattcgaccaactacagtatgtgtaatgatggtaaatcagatactcttgcgtatataaacagctgtttagcactagtatgaaacagacatacgctcttcacgggcctcagacactcgatctcgatcgttggaatccaccacgaagatgataccttgggtgttctggaagtctgtaggataaaagttgatagttaaacacggtccagttctgtaaagcggacagaagcactgatgacgttctgagctgttggaaggaagaacaacaacttacaatgcctccacaaaggtcggatcttatcctgtcctcccacatcccaaacagtgaacgagatgttcttgtactcgacagtctcgacgttgaaacctagagattgtggcaataggtcatgtaatcagtaaatcgtcgtgacgagagttgagttcagagcatcgtgttcgtgagtgaggtgcgagaacactaaccgatagtgggaatggtagtgacgatctctccaagcttgagcctggaaaaacgaggagtagaatgtaagactttgcagtgggcgtcgataatgttgcaaacttaatacttacttgtacctggaaagaagaaagacgagagaaagaaagtcaataaagtttgagatctcaatcgactgccccaaccgagttgttttgattccaatcaagacttacaagatggtggtctttccggcggcatcaagtccgaccatgagaattcctgtaacgatcacccagtgacaacaattgaaagtatgttgtgagaaatgggagctcaaaggacgacatggcgatatggaaaaacatgcgggtgataggcagatgtggccgatggagagggactttctccaagacctcatctctcacagaaggcccgagagggtcgatcatcaggatgtcatccggttaaaaggagaataagatctccagacaagagcaatggaaaagggaatggaaagcccaagattgaaaagagatcttgtttgtttggtgataaagatctacgtccactatggatagcctcgtggatatcactatcattctctacagtcttgtttccttcccaagactaggtcggcttgtatgaagcctgtatgctctgagaaatgcatatacagaaggtctagccagagatccaccatgtgtctgtcggtccgttccacccagatcggggacgcgaaaaaggagatggcaggcgaccagaagaaaaacatggtggaagaaaaaaataaaaacaaagcaaagaaaccaaagacacgtacgcatttccttcttgccgaagaggccggagaggagcttagagatggagagtcccattatgaagatggatgtacgtggatgtgtgtgttgtgggaagaaacaggtctgagaggatgtgaggtgcaggtgtgggtggaagggagaaggaaaggaggggaggaaaagaaaaaggacaagattcagggcggacgtgtgttggagccatcgcccgagctcaagccgcccaacgaggtttgcctccgaaactccgaatgggtttattaggaattttgttcttgtttcctaatcggccattacaaaatattccctaatgtcctcgaccggtcgtcttcctagtcactcactacacacgttttgtagtgtgcacactacgacttttcaggaacaacactcaaagtacgaaccgactaaccaaccatccgactaactaactgactggctgttcaactaacccttctgactcagagtgctcatggtcggttcagatcctatcatgttgagtgtgacactgatactcttgttcagctggctgagcagattctttccttgctgtacccatagaaaaaacacgtcgacgttctctttcttggaacatcagctggaggcggtccaacccgatcgagaaattgctcctccgtagcccttactcaagatggaagatcgacttgttcgtcctgtttcttgttgaggtcctggcctagaagaaccatcggatttgtatatgtgtcctttctctgtcatcttagactaacttgttgtcagatatctccctggctgtcctacttgacagtggtcgactgtgctgatggaacataccgacaaatgatcacgttcgggttcaaaccctcgagcgtaaacacaatattaatcacacatcttcatggtccgtttgtctatcgggatatttttctactcatcaatcaatgatcgttgatccgactgaccaggagcaaatgtgacgttttatccaggcgaccatgtcttaggtcttgtacctctgctggccagcatcctatctggcgtgtctaattcgaaagagttcgttgcaacattaagaacacggaacccgtctccaaaagtatgtcgtcccctgtttcctcaaacaattatccggccgtgttggcctatcctcattatgttgatgaaaccaatctcatcttcatagccctcggtcaatatctatggacccaaaggacttcgttctcttgtccgaatcacactctccctcacctcgatggagcttggcggagtatatactgttcatgaactcttactgccaggagaggaacttacttcgtgcgctgcagaagacatgcatctaaacgaagtcccagggaaaaacattttcaaaggcgagaatggatgggaaaacatatctgacgatagctttggtctggtcatcgacgcaggagaaatccttcatcgtggtacgttcaaaccgaactttatcatcctcaatttatccaagccatttctaggctcgtctcgcttggtcccatccttgactcactcgtactgtgctgtcaatttgtcatcggttacgcgcacacatgtccgatgcttcagtaacttctctgggctacgtccttcgttatcctcgcacaccactgtgcgtacctgtgacatacctcgcttcactcaaacagcatggtctctctcctgcgctacttggaaagatgctcagaacgggagaccccatcgaactgccgacgggtgaacagttaaatcacccagggtgggacgaaggctaccatatagccgtccttggagatacgtctgatgccagtgggatgcttcgactagctcggggagtcaatctgtatgtactcagatgctttctgatagattaaccaaacacacaattgtcttctcgtcctccgctcatcatttatttcgtctctctacctttcaggctgattcacgagtgcacaaatgcgcacataccaaaagatccgaacagtatcacataccccaattcgaaaggcatggcacaaacgtttgattctattcgagagaaatcagcgctcagaggacattccacaccagacgtcgccggtggttttgctcgggccatcatggcaaagcatctcgttttgaacgtaagtactgagatttttcttatttgattttttttttgtttccgcttgttaagaaacccctccaaggacaataccaaaactaattttggcgttcctattctttggttgaccttagcatttttcaacaatgttctcgacctcggaagaattttcacagatcgctctacaagctcgtgttgctctactgaacacggccgctgttcccggaagtgacacaaccaatcatagtgatggcaatgatgctcaaggagatcaggcagatccaggccgacgaaaggtcatttgttctgaggatggtatgcgtctgaagcttaaaagtgtaaagggggttcgtgtagatgaagtcgacgtagatgatgtgttggagatcacaaggtcaacctatcagagttgatagatgcatttttcaagattaaaaaataacattatctgctcatcgaagagatgcgacgaaggactcgaacacaatattcagggtcaatacagatactaagaccaagctcataacacatttatgataacggatacatgatgaaactttcgtgtgatttgcagattatcggcaacttcaaactgagacctcaggcagaacagcacggacgtagtcgagtcccaaccaggcactcgcctcccatggtctcagcatgatagccctctgtgcgtcactcttcgccgacatcttagcagcttcctcagcagattggtctccaatagtagcagcagcttcagaggcacctgcaatcgctcggagatgtagagcttcccaaccggtttcaacgtctccatcggtagcgtaagccgctttagcgagacgagatccacgcgtagaatctcgctgttgaaggtggagcttggagagcgcgagaagcggttgggatgacgatgggtacagatgagcagctcgagtgagcgtagcctgcgcagtagtaagatcgttctacaggaacataaatatgtagagtatcttagatcccacatgactagaattcatagttgtaaaggaagaaggacgaacctttccaagatgatgtcgaaccaaaagccagtccagatcatcattaggatccaaagccttcttcttgtcctgaggaagtccaagaatctccgacagagtggcatcaagaagggcagagtctgacgagagtgtggctacagcagcaagcgtagccacggcctccaggttggtagagtttgatgagacactgttgaatccagaggtgtgcgttagtggcactaattactcgaaaagggcaagtcttgtttcagcgaatgataaaaactcaccactctagcaaagtctctttggcagcttccttctcgtcagtaccaccgagactccataagacccgagcaagcatgaccgagacctgatccttcatcctgtccattgggtcttcctgcaactcgtctaaagcggattggaacatgtcgatactctcgtctagctcgccttggaagtagtgagccagaccagatccaaacttagcgtgcacccgtaatcgacgggcttctttctctgtatcctccggagtaacaagtccgagggtacctgagaacgcttcaatagaggcagtgtaatcaccaacagccaacttgagtcgaccaaggttggactgggcaatagcgaactggcgctctgttgtcggatcttcagattcttcatacacggattctaaaacatccacacacttcgagatctggatagaagcggcctcgtagtctccaagacgttccgagatgagggcaagcaagtgaagagctgtagcatccttcggccgctgttcacagtatcgttgaagagcaaacattggagcagcgaggatagactttgaaggaggacggataggcgcggagaaaagatcgtgagtggtctttgagaacagaagatttgcttcaagctgagaaatagcaaacaacgagcgggttaaaaattcagcaatttagccagatcgcttttcgaacaatatatcaagtatcaacaactaaccaaagagtcattcgacagctccgcagcatgttcgaagaacggtctagcatcggcacttcgtccagctttcaaggtcagaataccctgacccatccaagctagagaacaatcaggatcaatagtctgggacttgaggaacgcctgagctgccagatcagtatctccatccttgagataaaggaagccaagattgctccatacaatcgggttctgacgtaaaaacataaaacgttatctgagctgatcagaatcacacagaagaaacgccacgaaaaagactacataccttgtggttaatctctagagccatgataaacgcgtgttgactaagccgagaactggtttcaaacacaatagttcctagcgagacccataactgctcgtccttgggtcgaactcgaagcgcagccttgataacgaacgtggccctcttgacgcaagccttcttgacctcttcctcgctgtcgggaagcgagcatccaagatgatgcaacgcaatagccatgtcgtgcgaagcagaggcggaggacctatcgtctccgacaagaagctggtgcctataagcataagcgcaagccgcgagcctgaggatgaatgaagcatctactttcgaggctgagagaagatgtgcaggagaagcgacaccatcaatagatgcactaccagcctgatcttctttagccaacgtctcgacgaaggggaggaccgtttgcttgacctgttcggtgttgaaggaaaaggccaattgagatagatgtacgcaagcatccgccaggagcttccaagcgatagctccaaacccttgtttggcatttagaatggattgcacggtttgcaacgcgtgaataaacgagctttctgctcgagcgtggtaaccagccatagcttcctctatagcaatcgctatggaagaatgagccagagcaatgagcactcccacctcttctggtcgggttgttaaaatcttttcgaagcattgaaccgattcggaatggcttccgagttgagcatagacatctccggtcacgaaggttacgagccagttatcgggctccagttcagacgctcgggaaagagtcttgagagcggcagcctgtttgcccgatttagcgtaagcttcactgagctgaagccaagaggacacgtccgtggggtcagatcgaagggcaatctggaaattttcaattgctttggcgtgtgcgttccgagtctatatatggataacacatatgtatatggtttcagtatgattgcatatcctttctaagaagtccagatgggacaaagatagacgaatgtcaattcaacttactaaagctacagctcccagagccttccaagcccagacgttttcaactaaaaaccttcctttcacctctctctctcgtttgtttgctccactgttctctaggccaccctcaagtccaccttcaccctcaatgactcttttagagatgatctcaaccagttcccactctttagcatcggcaaaattatcagccagtcttttagccgcttcgccttgtcgggggtcaagctcaaaggcatgctggaagcatcgtgaagctcggacagtgtccgaaggggaaacaatatcggagtagtagattcctagagaggtgaacgaaggagcataggttgggaagtgcttcaaggaagcgacaaacaaatcgtgtgccgtttggcggttttctaaacaaattggagacaagatcgtggacaaagaggaagatgtcaatttctgtaaaccgctttgaacagactgatcgaaattcacataccaggcgtcatctcccaggcacacatgcccaacttccagagcactctagccctttgctcgagagacctctcgtcctcaccttttctctctccaagctctgtttccagtttgaacagcaaaacttgaccctctttgtgttctcccagtttgaatgagcaccaagcggcctcttctctcgcttcttccttcatctttccctctccattatctaacgttgctaacgccttatcgaatgcgaccttggcatcggcccaatcagctctggcctctaacacataagccttgcctatcagagctaatgagtcttctggtcgagtttcaagaacaatgtcgagaagaggttcagccgtaggatggtgcttgggcgcatagaagtgcacgtaagaagtcgccaagatcgtttgaaaggctaagcgagactgagtgaatttgatgccaattcggcgctccatggaggctaccacggagagaccctcaagagaagtcgtgattgccgattggtaatctctttcaaacaaaaagatttgagagaggattcttcgacagaggagggattgaggggatccatcgatcccgtcctatggtatcaataagaaatcaatccaaaagaagtacatgatttgcgaaaacttcagcctccacgccgccatttgcaaacgaatcagctgcttctgacttacaaacatcaatttgaagggatcctctccagaaggattcgttgaaatttcctcagtcctatctgtttcggcgtcttttttgctcttgttcttccggcccttcctgtcttttccggtctcgttatcttcaagttccgggacgtcttcgagcccgaagtactttaagtatcctcgcataaacaaagtgagatgggcatctggaaatagatcaatatatttcttgaagtgggtcgtaggatattgatctagaatgtccgcaggattataccaatcataatatcagatcgaacgttctccgtgagaagatgagaaaaaaaacggataaacgtaaacaagactgaccaatcgtctcccagtcaccccattccaaatccaccttccaagcatctctatcgttcgattcgataaggactgctcccttcgcgaggtcttttacttctttcctttcttttgccttatacggggaagtgatagggagcgcgtaaaggagcgcaagatggaaactgaacagcttctgctcaatctccctgtattcctcgagcgctaaagaagggtgatttagcatgctctggtacagctcaggtaaggttgattcgaccgcattttcagcaaagacggcttcttccacctgactctttgtctgtggttttccaccgccaagtcgcatccgacgcttttcgacttctttagcgcgtatctgaaggtcttccttctctgtaagctccactatctctttcagaacacaaagttcgtcttgaagtactgtttgaacgtattgggtagttgtggatgtcggctcgctgggcgtcgggggtggcaagagggaaagagtatggtagtacggagatgaggaccgaaggtaggacaaagcggcaatcaactaggtattgcatagataacttgagatcaatctctaaatcgtggactgaagaacaaagcatcaaaggtagagattgagccttacctgaattcgagtgccttctgctcgagtcaattcaatgagtctttgaatagcctctcctaacttggtactctcctccctgtgagatgtggatcaatcagcatcaggatttttgtgtccaaggtgaataacttggtcttacaattggtcgtagattttcagttgcctttcgaacacgtctctcagcttactccacgctttctgcttcgtatagaaatcagccaaaccctatcgtcatcgtcatcgtcattaaaggagaaccaaagatagaaagaggtttggttaatctgttgagcggcgacaacgtttagagattgtttcttttgtgaggaaaataggaatggaacatacctgccaagcagtcggaagatctgcagagacaactgtagcttttcgatatgcctataagatcataaagttcaagaaagaaatacttagcacatgatggtctcagtaggggaaagctatcgatcagaaagtatacttacggcctcactctcattcaaattacccgtatttagattggccagacctaagaacaccaagctgtatagataaaagtaatcaaccaaaaacaaaagacaagaaagaagaaggcttaagtatttccatctttgcaactaaaaaagggcaggaaaggagcaagcgacgtacgcagtgtagttctcaggttcatgctccacgatctgctctgccagacttctaacagttggccaatcctttttcgagatggcttctttagccgattttagtttgctctttgcaaacgatgagctcatctaggtgtaactgtagataaatacggcgacggtggtggagagaaagaaggaatcggaggaaccgatggaaaagacaatgtcgatgacgggtgtagtttgttgttgccatgacgacaggttattcatcctttttttttttaccccagttcacctcttgcggtctctaccaactttctactcaaaacctcgttcgaaagaaaagggaatatatgtggaggccttgttttcgacaacccatccttaatatcgttctcaacaaatctacacccacatctaaatctataccctatcactcaacacgtttgatgtccgaccgtgtttgctctgaaccatctgggtttacgactcctctttcttcttcccctcctctcaagaaagctcgactaaacagtccctcgataacggtggcagtaacaccaccaccattattactacaacagcctacgattatggaacccggtgcaaacccttctgccgctcaggatacgaatggtgcaagtgaacgaccgatatccactgtagactatcgaaacaaggcctgcttggctcctatggtcagaacgggaacctgttagttcaagtctttgtccgcgcgcttccgttagtaacaagagataccaaagtatcgggttgacgttctaacatgttctgctttctttttgtgtgtgtttcggacttcctccagtacctactgtatgttttctcttcatgtttccagtacccttctgggataactaattgaccaagggtcaagggctctcatttcggggatgattgacacagcgcttgctagctcttcaatatggatgtgacttggtctggggtccagaaatcgtcgacaaagctgtttgtcctgaaaggttcttccggctgtctctttattgtagttcatggactgactctcaactccaaatggtcttatccacgggtgtgtagatgatcgggacaactagagtggttgaccgtgcgttctgttcttgcgcgtatctcttgtaataatcgaagattgaggtactaacaaagtctgaccttctcactgcagaacgaaccggattgatcagctataaccgatcagacaagctggtctggagtacgcacccgattgagaagccgtatctgatttatcagatcgggacgtccgacccgtaagacctgttttatgtgcttttctcttcacaagtcttacgtattgacttgattcgggcctcaacttcacatcattctcttcacgcgcgcgtgtatgacagagaactcgcggtgaaggcggcgttgacggttcaacaggacgtgtccggtgtagacctgaactgtggatgtccgaaaccattctcgacacattccggaatgggggctgctctgttgtcgacgcctgatctgctgtgtagtatccttcgggcacttgtcggcgcactcgacgtaccggtgagttgcaagatccgattattgccctcgcaggaggacacgttggagttggtcgaccgggtttgtcagacggggatcaagtgtctgacaattcacgcgcgaacgagaaacatgagaagctcggagaaggcattgatggaacggttgagggatctggtcgaggtggcagaaaagtacggaattccggtcgtagcgaacggagatgtaggtgggatgtgggattttgagaaaatcaagcgcttaacgggtgagtatatatctttctctgttttcccgttccgctcggatgagctgtcccactcatctactcttgtttgtactcgtcccattttcttactggctctcactcttaggagtttcttcgatcatgatcgctcgagcggctgagagcaacccgtcgtgtttcttgccggaccggccgttggacacgtctacggtggtggttcctgaactcgtcagaattgttcgtctggttcatattttgtctgtttcatctggtatctcatcaaatacttacagcttttgttttttggttatgtatttctaatcctattccatccttaacctgatgatgttccctccccaaaataaaatactaaacaaacacattgatcatttattgtttattcgtgatcggctcaaaatgttgcctcgttctattcaaacaacaacaacaaaaacgcggacaaaacaaatgactttattcttcccctgaaggcctaccattttgaaaacccatggggtaatacaaagtttttgctcggccaattctctccgtcgcctagcccgttatcagttctatcaaaaaccgaatccaaggcgctccgggaacgtgggactcgatgcaagacgatagaagatctggccgaggtatatggtgtctcgttgaaaagagtcgaagacgaggaggatctcgcgaacgaaggcgatggtggcttgggggcgatagtgttggcaaaagtccgacaaggcctcgaaaggaggagaaaggagagatcggatggggtgttgcctctgggaggggaaaccgaaaaggcggacgtgttggggagaggaacagaatatgttgagcgggacaatgacgggaaggtgttgcccgtgttcaaggtgctcggggagaatgcatgaacaatcgatatgcttacaagacgtatcacattgtctgagctatgtggggctcctttcagcatttggtttgcgcaaccctggtctccgaaagtaccccgttctttcccattcccccgctctcttaatccatcttccttccgatcatgcccttagactaaccccatctgcactcacgttgttctttcatctattctttcatctatttatcccttcattgtcgcgatcttctgacaggcaaaccttggtcagccaccgccactctctctaattttggttttcttcgtgctagttttccatgtctacagattaatctgtttcgcgttgattaatttaatccgcctttcgatagtgaacactactaccgtgattaatctagacactggtttcatcaatcttatttcgtcttagacaggagattgaaagacggattatgcacaggcagatctcccgactactcattcatcatcgtatctcatttgagtttcatcggtatcaaaatccccgcggaaaaggtttcacttgttttaatcatgcccaagtatgacgattgctgagagcagagggcagtgggaggtgtaggattaacacgatcgacggcgggtgagaaaagagaagttaatgaagccgaaagctcatcgcctttggcaggaagattttcagtaaggagaattaacaagaaataaaaaattatcttttcctttcagctcggcttctccgcagtttatgtctgcggacaattgtggggtttcaatggaggatcgatcagctatcatgcatcttatccataaggttatcaaccgatcagggtaacgtgctgcggagcgccgacgtaatattttacctttggccgaggagatcttcgatcgaggaataatttctgcgaaagattgtctgctgaatacctcgggatctgttggcctctagttcaggtgtgtggaccagccggcttggggcaatctatctcggttcttcttttgatctcactctgttcggtgaaaatttccctcagtatcttatgacgataaagctcactcatcttgcccactttactcgcttcggtcgactccacgtaaagcatactggggaaaactcccgcgatcgagccggccggcacgttagattcatctaccgtcgagcgctcccttttcatatccctcattgattacatgtcatcatcgcctgcctgctcgcccacccactcacctgcctacctgttcgacgtgcgctccttattgttctggccctgtcc

SEQ ID NO: 429 - DNA, 40761 bp, Xanthophyllomyces dendrorhous
atacaaaagtcccggccgaaaaaagagaaaagaaagaagggattgacccaaaagaatctcgatctcgttcctgtcccggtcactccctcgttcctgtcccggtcactccctcgttcctgtcccgttcccgacgttctctttacatccaattcttccttcttggccaattctccttcttggccaattctccttcgggtggattcttctctgtatctttatcctcttggttctccgtcatagagtaaggaaagactcatcttggtcgtcgttcattcttgatctcaagctgacggctcacgtctcgctttcttgttacgcgtggttgctatcattcatgtgattgaattccggtgtcctactcgctacttcatcttccttgatttcgtccgaacccttcgattgacttttacccttcgtacccgaacgtcacgttcgggactgttagccagcacacacacatcttcattctcacacacagacaccagaaatccttctccttcttcctttcgcagtttctgttctgaaatatattctgtcttatctctcccgcccctcacaaaaagcacatacacacactcttcacgctttcgtccatccttccttctttttggagcttgtctgactttctaaaaacacctcatctccgctggaccgaccctgccaactcttcctttcactatggcgcccgagtccatatcttctccaatcaaaaaaacaaggtcgccaaagcccatcagggtcccaatggacaactccctcacgcgggcaagaaaacataggcactctgcgtcctggtgcggttcgccgaccgaatgggatttcgaaccaagctctggtcacagtcagtccagtttctctcatatttgttgagaacctatccagggcgctgcggtctgttcgctaacacgtcgctccttctatgaacacctccttctctccgtttggtcggctatgcccgtctcacagtctcgggcgaacacgctcaatcaggacttatcccggcggaccatcagttaccggcatctttgctcgaccaaggacttacctcaaaaggacaaccgtaagaattcttcttcgtcttaactcttattctttctctctctcctttgctcctttgtcgttcatacttcaagcgctcactgtccgtctttgtttccttctccttcttcattgtattcccaatcatgccatctcagaaaacgaccgtaagtgtcaataaaaactctgttgccatctttctcttcggcatatactaacgtctgttcctctcccgatctgactatacttgtatgcgttcctcattctaccttccgatggatcacaagaatgaatgccttcttgatattcgcccgatggcgacggccaatactaaaagaagagaaccctagtctttcaacaggggaaatcagtaccttactcagtcaaaattgggcctcgatggatgccgtaacgcattttcttcatctttctaatctcacttatcaagcaaagaataaagcctgggctgattatttctattggtcattggtcgttctcaggttacaagagatttttacagttcccatgcactcgctttgaaggcgacattccaatctagatatcctgcctatgaatacactgtatgcaccttatatcctctttccttctctgtgctcttctagtgtcttaccacagtctatttgttcttctattcgttcttctgcccttgcctgcattctagcggcgaccgaataacacccgaaaacgtgggtctcgtggagggaaaacgtacatcagtcggcgagattcgtcttcttggaagtcgcctgacgatacgtcagcgtccacagtgctaggcggctctgcactcggactcgagagaatgaatcctagaaatcaagacggctcctcaggatggaatcgtaacggttacagcattggagaaacagagcaggattctgatacggacaccaataagcatgataacgatgggtcgtcctcatcccaatactctgaccattcacaaggtaatcgaccagcatcgtccattcactccgagctacctacaccacagcttccctattatcccctgacgacggagtacggtccaccaaacgagctgtcgagttccgctcctgcgtactataaaccggaaataactagtttttcctcaatgtcggcagctacttctgcctccgctactactcataacaattcctccgggacatatggtcactccccccatgtgttcgtcagtccttatggttggcgcgcgaaccggtctcgaccggtctcgacgtcactcatgggctcatctccatactctccttcttcttctctctcgtcgttctcgcctcaactgagcgtcaacggacgcctgcatggacatgggaaagttccggtcgagaacgggacgaaccagacgtacacggctgccacccaggattacccagtaccgcgtgcgtcatctcgtagaccggacgccttaattgagccgagcccggccagtcagagtcaacaactagctaccgcaacatctactgccgacccctcagccccgtcgtttcattcgagtgcattgtatcagccgtcagctagggattggtcaaccgaccctttcaggcgacattccgtccagagagctaggactggcccgttgcatgctcttgggtttttgaaatctgaacaacaacaaccacaacagtcatcctcgtacaaatggaccgaatcagacagtcatcatcgtccccattcggatcccgctgtcgaggacgagagcagatcggaaggagggtacagagccggaggtagtcaggctgagagtaggggttggaactccacttatcaggaagagtcaacctatccacctgctcacgctcaatcccacttacactctcactctcaatcctacactcactcccattttccctcggatcaaatgcatgcgtactctcctctccctccgctggcgacgacagcgacatccatagagccgtcttcgaccatgtcatcagctccgatcggagtgccctccacgtctggtctcctaaaatattcaaacaacgtctatccatctcactctcattcacagtcgttgatctcgacgagtgcaccgacaacatccttgtcgcccttcacatattcatcctaccagcaaaatacacaccaccttcaaccgctcgctcggacctcggcgctctccgctccaaaaacggaatacccaggatcatttgtcgatcagtcgtcgtatcatagctccggctctgatactgtgcatagagtaggcccatttgaccaggatcatatggccgatagagtcagggattctcagagacattcatatcaaacggacccgcaaacccatgcgaaatacgagtcttggtctgcaggcgtcggcgtagaagcgaatgcaagggacaggacgccgatgatggattcttactattacgagtcatgacggtatactccccagagacctgtgttgtctttcggttagccctttacgtttattccttcgtcgcgttgcttcgtgcgtttggctcttcgtctcgtgcttctttcttttctttgttcttcctgtcttaattttgtcagcttgagctatttctgttttttttttcgccttgtagcatatgatcttgtcctggttctcatcaagttaatacgtcttgttctgtatctctgtcgtatgatatctgtctttttcgttagttcctctattctacagacaatcgatcggtctcttaatccttattgtaattccagcttcatttcttccttctttttttcctatgaaaatagagaattgataaatatattcattggaaggcaaccgccattgatttcctctttgatgccctatgctttctttctccttgtttcctcttcttctttttattcccgctctttgtccctttttctcttcttttaataacaactttctcgtctgtttctgtttctgtttggggttggatctttagtattcatagaacgttcttttctttcgttcccttttaaagtatagggccttgcttgatccattctggtcaggcgatgttgtagcttcttaagatatatataactttttgttcatgctacttcctctctcttgagagtttctctgcttccgtctctccgctctctttcttggttttcttagcaagaatttcttgtacattttgttctgttctgctggttttttttcttccttgcactgctccgctcggcttttttttccttctctaggcaaattaagattgcatcgtgcttctgttctctctctctgtgtcttttctcttacgaacgtgatgtatcttcgagtgatcggtctgctatctggccaccagtcctctcctttctcctgtttccttgattcgtaaaacaatcgactcatgattgagcaggcaagggggtgagcagccgaagatgtggtacattctatcctatatatgaatagttgaacgtttctgatggtcggtacggatgatccgggagatccccagaagagatgatttacagcgagagtgaaagggagggagggagagagagagaatgtgtttaattgaggaacgataaacaacgatcggatgtcacaggacagaaaatgaaacacagaacagggcgcatatcagcccccagaacgacggttaacagtatcgtcggaccaagcaaaaaggtgggaagagaacgaacggttgtgtagttggaactttccacttcttgatgtagccggatcatgctcccccccatcgtctctcgctatccaaatctcgcatgtgagatcgtaggatctttgatcatttaccgtaaagtctaggaaacctaaatggtgcacacgtatatatatatatatttatgtggacgtacatgtggatgtgggtatgtatacattccgcaacaaaagacgaggtggatagtagtcaacgaacgttcgttagtctatcagtctgaatcgccacactgatcgaatacgaagattccgtaccttcgactctctcaccctatccaaccgttcagaaaggagagaattacttcagtcacaagcctttacgtgacttttttttcctaacgtttgttggtttgtatctcctgaaagatccgacaggaatgtactcacagagttcgtagccaagggctcagttctttttcgattgtttgtttgtttttaaattgttgcaccccaggcagatctcacagtcgattaatatgatacatagaagagaaggacatgggtgaaaataaaaggcacgacgcacagtagtaaacggcattgctgccaatgggtctttccagcatgaggactcgtgctcaacacggtgcttactccattggccggtgggggtggataaacggttgggccgtagataggctgctgggcctgttgcccgggtagctcgtttggcgaccagatcgaagcttgccagatcagttccgctgtcggatttggggtagtcgagggtggtgcagcaaactggatgtcaaacctgttgacagaggcaggcggacatgtcggaaatacgttcgcgaaagagatcacgtcagaacattggccacgagcgatgtgattgaaagagttgataggtgtaccaggtagctatgccgtgcatgagcgatgtcctctcgatcgcccaagatattggaattctaaattctttgaggtcctgataggaaaaaaggtaaaccataaatagtgttgattggcgtaagaatagcaaatagcttttgacaagcgtaaagggtttgaaattaacagaccttgagagatacgtcgtaaaagttgatatcatggattgctgtagtgcttgtggtgagttgggatggggggaatagacccaccacaggctgggcgaacacctcggccatactgacataacgacatgaccaagttgagttaagttaaagattagatataagcgggtacggtcatatgcatagaatagagccacttacgcaggttccgagagaatagacaggtccactccgtacatattctgtctaaagaaagaggcctagagaaagaaagaggaacctggtattgaccctcgtcttcttctcgtaataatcatttatgaggcgctgtgtactcataccttggtcaaagtttccatatagagtgcatcgtcggtaaacggggccagatggatcgcgcctccagaagggaacattgctgtttaggtgtagacgtgttcgatcaatactgacgttcttcaccatgaaggcagacgacagaaaaggatggaattacctcctccgggcttcaagaaattatctctagcatatatgtatgattcgacctaaaggatggatgccactagacgatgagccaagaaagtttcttcatgaccgaacagacgtactcaaacccaccattcgctcatggaggagtagaacccctatcggctcagacaccaacgtgtccacttttggccctttgcgagcctcaaccttgcctgatacgtatcccatcgatagcgccaaggagaagagaaggtcagtctttcagcgcaaacgagctccacagaatacatcgtcagagttcttcatacctcggttgactgtaatcttgtctttcaggtgaatattagcctctcctctgttggcttggtcaacgatcttgaagaacgacatatgcagaacgatgcagtcggagtacgtgtgataggagtcaggcatacggtcagcgtctgatccaagcattttgaaaaggcgcctgtacgatctacgggaactctgagtagaacatgaacgtacaagttgcaatttagatgccatatcacttgcttcacaggcatagacatgttttgcgccagcctagaaatagttacgtatggaatcaattttaacatgtttcgacgacgagaaagattgagacacaggctacaccaaaggacaaacctcgacagaaaagaacgacaggattcctgatcccgctccgatatccatcacggctacagaatgatggtcacttattattttaattcgttcgagtaggctgtattgaaaggaacccaagacgacttactcttgttctgaaacgccggaacagagttgcccaagatagctttcctagtgttaccaggttagagaggaaaaggaaggatcagcaacattttgagtagagtatagacacggaccagtattgaggtgaagagggacgaacctgtagcctgtcgtcctcaaggtgtcggacagcatgttggcttgattctgcaggctcgcatagtagctttgaatgagaagagacgaggcatgtgtaaaagttcaaaatagacacaggagatcagtctaccatctgagatgatgagagaaagttcggatgtagacaagaggaaagaatgcgaactgaaagtaggggtctagaccatcaagcaagaggatcagaaaagaggataccggggtggaggtgattttgttcagctctcgagacgatacaggttaaccgtcgaaagatccggtctccttagggtcgaagaaagacaggagcgacgtgtaaacgactgaccatcaactgtctctgttttgctaggtgtcttggtatcttgggctgacggcatgttgagagatggctctaccaacgctgctgctgctgctgctaatgatgatgatggaaggcgaagggaaaaatgcgcctgaacacatatttaaaagaacacgctcgatcattacgcgacaggcttcagcgaccgtcgctctgtaaattatgatgtacattctttctgctgtttctatatttcactcataaatttatttcatcttagtgtatgtatatatgaggaacagcaaggacaatcgctgtcactacattggcacggcgtcttctctggcctgtctctctccttcttcctacgcgagccgcattgatcaaagcgacctttcggcatttcgcacaatcataccttcctccacactgtgaaatgtcaaacaaaggataaggtctatcaaatgaggatcaggagacacgcatagattgatatggaaatgatgctcacagtttcattcgaaggatcgccctacgcgacgctgcttgacaagcctctccttccttcagtgtcatacggaacaaagacgaccgaggatctgctttctgtgtactcaggatctgaagatcgtcgatcaagaacaaggcatgcgatgagtgtcgtgagagggtagaacaagatagaaagagactgaccttctcgaccaaatcaatcttggcagcaatctcaccgctatccactagatatgttgcctctgtcaaaagcgaatcttcagaacaaccaaaagcatcggccattcttgacaacttgacggattgaaaaggctgatagtattgaaccaacgctcggcgacggatagaggcggttaaactagagacatggggcgaaagaaatggtgtgagtcgatgacgcgactgcacgatcccagaaattaggcaaaagaagaggatcaataacgaagttttgaaaaagattgctatatcggatgcaactcttaccgagtacttttcgagcagactcaaacaatctttgtattttccatccacaaacgcatccactagatcccgaacgtagccctcctcatccacataggctcggaagtcatcgttcaagagaagttcggacttgagcgctaaacgacgtaaggatgctagcgcacaaagtgagccgcagatagccacttctgtcggggaaatgacctgtacatggcacgcgtaaatttcccaagaacaacgcgtgttgagagaagaggcagctgagagcatatacgatgtggacatactgtatgagcccactcttcaaaatcacccttgacggccagaaactccctggctgccttctcatacgcacccaaccccagactagagagtgccctcgcgatctgtagtcttgtcaatattcttgtcctctcctctttccttctgatggcttcctcgaccttcgctgaaacttgagcagccgatagaggaacagatgaggtcggcgcggatggtacagggcgctcaagcgctgcctcggccttcacaacatagggtaacaattgattgtacgatccggaggcgatatgaatctaaacgttgtttgaagaatgatagataataaacatcgcatgtgtcaggagagctaaaggtgtgaccatcaacgtaagaaaaaaaaggatgcgaatcaagatcttgcgcacctcgataactctcatgcacatctcgagattctgagcggatgtcgagttatagtcccgcgtttttatcagatgttttaaggcctgttgattatctccgactttaatgaatagttttccgagatccatattgcacatctatcggaagagtgacgtgttggccatgttggttagtagcgcatccgttggagtacagggacgctagctcgttcgggacttacacggacgctctctttgatgagattggcctgaaccgatttgagttctgtttcgagtttctctagttcagaattagccgctagatctacctcttgtctccaaaggtcatcgtggtctcctccaaaagaatcgaaagaagcgacatcgaatgtctctgccttgatgacaggaagcgcaagggcggctgcttccgatcgaaggctcgggcaggaggcgtagatgagggccaaacgagagatcagagctcttcctgtagagtgttttgttttcagtggattatccataacacgctttgaaggatcatctaaacaaagcaaaagaggtgaaagaagttcagaaatgccaacctttgaattgagcaactacagatccaagatcgaaaggatgaagatcgtccaccggtacagtgttaagctgagagggctttgagtctgcatctggcgatggcggcctggcatctggagggaccatgtcctgatcttcagccatcgacatgctcgtgtcactgagattagttgagcgatgagtctgagaagagtgatggtgtgtacgtgtacgtgtatgtgtatgtgtgagtgagagattgagaactgaacgagggcggacggagtcgatgatacgaaagggttacgtaatattatcacgtgactcaaccacgtgataatattacgtaagcccaagtggaggtttgtccatctcggccaagcttcttttgtttgtctgctcttgattcttttgtctggagacaaccatacatcatcttgtttggttgaccgctcgttctctttatctctttcaaggatctcagcatgtcggctgagcctgtcgctacgcgttgtctttggtgcatctgatccagctaacctcatcgtttgaacgttttcccttttggatcgcacgctaatcacaaactcccactcaactactctttcttctttccttcgaagcttcagctacgatcgatctctctttacctacttctcccactgactgttttgcgcatttgatatatatatatatcggctggtagtataacatttttcgtatagctgttgatcctatgtcatatccttccatcaatgcaaagtctcgtgctctggtacgtacgtgtccgtcctctttgatccagcgtcttcttcctgattgtccttgctcttggcttcttcttcttttcttcagcctccggcaacaatgcctcctaggcgacgaacattcaaccttcatttacttgtccgtcgaaactcccacgagcttcctctcatgaagccatcgtacgctctcgacatcccctcagatatatctcctgtccggccttctcgacaactctcgtccagtgtcgacgagaccaaccaatctgtattcgatttcgctcactcttattcacatagccctcccccagctactcctcagcttcttcacaccaggagtgcttcatcaacccctcaatcgaggtccaacctccttccgacctgccttctcaaggaagacgagaaggtagaagatgagagtggtagcatcggtagccgatcgaccagcagtagtggtattcctatttttttcaaggagcgaggaggggagtatgaactttttgattctccattcacgccacccaccctgcccatcggacttgaggaagaagacaagatgaatgtcttcgggtcttacccgatctcaccccgcacaacatcgtttccccaggctaccgtccgaccccaacctcaagacttctactcacctcgtgataaattccctgtctctatgtcctacagctctagtttctctgttccgtccatatccgtatctccgtcttcgataccctgtgcccgtatgtcacccatctctcacgcaaaggcacccttcaacgcgatacttctttctcaaaagacaatgcagcttccttcgcaaccggctgggttcccatcaagccagcggaaaagcttaacactcatccaacttcaagtggccgcctcgacgtttgtcattccgatggagctgatcgcgcgttatccaagccatctggcaagattcatcagcggatgtaccgacgatgactggagggcgaccgatagcgatgattctttcagcgaggcagaaacagacttcgatgacgatcagacatcatccgaatcgagtttttcttatctatcgttcgttcgcctttcttttgtctttgcattcgatcctctctgtctagcacagctaggtctttctctataacaatccggtcccgtctcacgtctatcttgtaattgtaaacaagacaggatcaatcctccctttccttctcctccactcaacatccgagcgacatcagtaaacaaattacagaagctcggaatccttccttctcttcataggccatctggttttttcgtcagtgatggtgagatcgacggaccaactaccccacgagcagcgacgaccaactttgcacgtgtcccgcctcctcggccacctcgaccagagaccccaccgatgtcacccagtcgaccgtctatgcgtcggttagaaattcttctctgtcggtctccagagccctacattgcgatcgactacttcttctcgaccggcttgttgctgcctgatctgagaagcatgctggaaagcgagaatatgttgaaaggatgccctctttgtggagattctcaaagagcgagtagactacgggaggtagagaatgaggcatcctggctaggactcgactgcctggctcaggtctgtagagcggagaggaagaggagcgggatcgaggaaaccaggccgacaaagaaagtcggggatggctggatctagagacagcctggcgcgtgtcattccgaccttatcttaacataattcatgctggtcgtaatctcttcatcatccagtctcgttctcatttcatcatgcctaatttcgttctcgttgtgcttaatctcgttgtcgttgtggcttttcatcgatcacgtctctctccttggtttgtttctcacatgtagatagttgagcttgtgttcacctcaccatattcctgtttctttaattcgaattaatcttaatgtcctgttatatacaccttccttctcttaactctgattcaatgtaatcattcaacgttcccgaatgtgagggtttcattctcaatcctcacagatgattagatgtgtgtctggctgtacatcaagccaggatgtagagagtggtatgacgctagtggtgacaagctgtgcaatccctcagcctgatgtatgattctatgatcaactcacaacaaaccgatcaacatcgtcggcttctccgcacaaacaaataaaactttcttccttcgaagccaaacatctctctacgatatctttcattccctccatatatctgtagagatgtcctcgatttttaatctgttcgtgcttgatcgttcccgtggaggacagttcatctcgacagcattggttactaacatcgagccgaggtttgctttcttggtgtcaacagccgaacaagaagtgagttctttagggttttccgttctttcgatcatcctccttgtcatttttaggtgatgtttggtatatctgtctgagccttttttaattctacgctcctctagctttcaagcccaaacaagccccgtcagggtcaaaacaatatcaactcaagaagttcgccgagtctactttggtaagcgtctatgatgctcatgattggctgtgtctatgcacaaactagtgtagcctagctgatgttcgtcaagctgacgtgaacatctcactacctttgtctgcttgcctgtttgtagggatctggtaatttaagagcggctgttcgtcttcctgaaggagaagatgagaacgagtggattgcggttcatagtgagtcttgtctttgttcttcttctcattcggtttctacagaattggatagatggataatcggtgcgatgtttgttttcttactgtgctgatcaaacctaacgtacatggcaaactacagtcgtcgactttttcaaccatatcaacatgctctacggcacgatctctgagttctgtacgcccgaaggtgtgagtccaggccgatcgtctttctactgatgactgtggtcgcggccttccaatgcacagagcctgtgcgcgcggcacatgctgatcgtgtttgtatatccggacgcgtgaatatagtgccctatcatgtctgctggacctcggtaagtttgaaggatggtcgacgtgttgtttgcttagaaccggcgtttctgaagctcgcctgttttgtttccgctgttgacggtggtgcgttcgtacatgcgggcgatcacgttcccaggttcgagttcttgtttgaagacggggtgacatataagcgaccgacggcactgtctgctcctgcgtatgtggacgctttaatgaactgggtgcagagcatactggatgatgagactgtgttcccgagcaagatcggtgggtcgcgtcataagttctggcaaggttgattgtcgagcaaagagaccacgtcggtctgaccgccttttacctttcttgtgttctcccgttcttctgtttgctccttggccgattttaacctggtcgttgttctctctcctgttggtcaggtgtcccgttcccaaagaacttccgggtgatgtgccagacgatcctaaggcgtctcttcagggtctacggtcacatctacgctaaccactttgatcagatctgcgctcttggaatcgaaggtaccgtcctcttgtggcttggatttcgtgtctttgtcgggcaatgacgttccattcaggaacaacatctgacgatatcatctacctatttctttattttttttatatactttccttccatcagcacatctgaacacaaactatcggcatttccttctgttcgttactgaggtgagtgttcttcttttttttcttggatcatttcatctatctagatccaaaggtcaagcgatagccggtgctaaaccgtgtctggtctggtctgtagttccaactagtagacaaaaaggagcttcagcccttagccgagtttaacgatgccatcttgactgaagaaaagagataggcctgttggcggcttctaccttctctcttcgccttcttctttgtgtgctatgatcattgtcgcattgtatctttttctctcgccgattcactcctctgcgggtcgaaatctcatccatatatacctccatgttcgatattcgatatcccttgacttctataactctctacatatcacaaacatgcgagtgtccacccaagctgctgcgtctttgtagaacaaggatgatgaagaggaagcagcatagcgatcagtcggatcggatttatttatagtctaataagcgttttggttgagcgagacttctaccgagtgaccgcttctggactgattcttttttagagagaatattcaagatcaacatcctctcttgtagtgccgttccctgttctttttctttttctgttgacgacacgcggttgcaacaaagaagacgatcgaacggaagaggaaagaaaagaagaaacgcgctgtccctcagccagaaagagagagacaagctcacacacatcagtagtctttcccgtagagattgaagtaagagccgggaatggcaaccgttgggctgacttgactgcgggctaggtgagctttgaagagttataaacctttggaacttgtttccgtttgtttgctttctctttctttctgaccatcattccacccattctctccctcgctcgtgttttctttcaggcttcgttcccttcctattcctcttttccactctatccttcatcttcttgctcgcaactagctttgatagcagttgtcgttaatatctccaccaccacaccacactgcaatcttggaaagtcctgaaaagttcccacgttcgactctctctctctgttcttgactagcactacctatccggtctatctaaaccaatcactacccacgaagaatctcatctgctctttcgtaacaatgctcttccctactaccgctgctacccttcttcctctcacccttctgctggcttctaccgtggtcgaggcttcttcccataatgaccgtcgaagaatctctcaccgacgacggatcccttcggccctggaggtctacaactcggacgccgagaagatcaatgcccctactcaatcggtagaacgaagaaagagatcgtcctgctctgtgagcacggatgactcctcctcggtttacgcctcggcttccgcttccgcgtctgcttctgcccatggttcctcttctagcgctaccgctgcttcctcctctgcctctgtttccgcaccctcttcttctgtcgtaaagaattcctcgacggcagcagctgcctcgacaacctcggcggtggccgtccaggccgccgtgcaaagtgccaccgcaacttcctcttcagctgccgcctcggcttctgcaacatccacttcttcttggaagcttgacctcgaggctgtgagttgccgctctttttttcttcttttttttttttctcttcttaaaaccgtccaacttgatgctgatgacgtccttttggcctttctctcagtctggatcgacgttccttgactcttggaccttctgggactacactgatcctacccacggaacggtcacctatgtcgaccaagccaccgctaccagtggtaacctcaccagtgtcaacgccgcaggaaacgttatcttgaacgtcgatcagtgagtctctcattcttctcggctctcggtgaccgcccgttctgtcgatctcatctgtgccttgttttcatctcctcaggaccgaagtcgtcaccggtggccggaagtctattcgactccactcgacttacatcttcaacggcggtttgatcattgctgacattgcacatctccctaccggctgcggaacctggcccgccttctggtccaacggtcccaactggcctgccggtggtgagatcgatatcatggagggaacccacagtgtctcgtacaaccaggtttccgttcataccgcccctggctgcacgattcctgccgactttggagcgactgccgtccttgcgaccggagacttcacttctacagactgcagtgcggccaataccggtaaccagggatgtggagaagtcgcctcgtcatccaccaacagtttcggctccggtttcaactcgcagggaggaggagtctacgccatgaagtgggacgactctggaatctctgttcactactttgcccggagccaggtgccttccgatatcaccaacggttctcctgagccctccgcttggggaaccccgatggccaacttccccagtaccacttgcaacacttccacctttttcaaagatcactttgccatctttgacaccaccttctgtggagactgggccgcaggcaactgggccactgctggcactgccggtggatccgagtcgtgtgctaccaagactggatactcgacctgtgcggactacgtcctcaaccagggaagtgccttctcggaggcatactgggaggtcgcttccatcaagtactaccagcctgcataaagtgatcctgctctttctccctatcttgtcttatccgcttgcacacacgctctgtctttttatgtcggtgatacatcactgtccataagaagtcgaagtgttggatgtagatcgttctattgttatttctaccgctttctagactgcaggttcatagtctagtcggctctttcgatacttatctcggacggctggaccgtcttttgtgatatcttactggttttagatttctttgttgtgatttatggaatatatgtaaccctgtacccattctagatgtgatggcattcttatagatacgtggacatgtgtatggatatcaatgtcgatgtcagacgtggaggtgctagtgaggacacattggaaaacagaaagagttaagcgatgactgcatgagtgacgacggtgcaagtgcgtcatcgaccaaaaaagccatgagaatgtggcacgcgggaatcctctcaaaaggcgagttctcttttggtctcgagcctttttctttctctttcttttcccccatctttctcttgcctttctcttgagctagcaatcaatcaaacactttgcatcttactcactttgttcttccttcttagtatctcttgaaagtaagcgcttcccttcgtgtgctttcgtgtcctttaggaagtagagacgcttatctggctttcgcttctttgtcccttttcttttcttttctcttctcttctttcttctccctttttttgcacttcatctttcaccttctgttccgaacacactgcctcttagaatgtccactcctgcttcccagaaccctaccattcgaaaggtcttgaaccacccagtggtcactaactctgttaacactgttaaccagcagctcaacactctcgacaaggaggtcagttctgtttcgtctttcatcgtgtctttgagaatccctttgctcctgccagcctactcgtctcatctcagtggagcttcatcgcctcgtgctgatacatcctttttctttttcttcttcttcttcttcttcttcttcttcaacagctcggccgacaccagatcgctcgggatttcgaggcaaagaccaaggtccccaagacttacggtttcctcgccctcgctgctaccttctttgcttctggtaagtgacattttctcgcgcccggcttgaagatggggcgttcgaagctaacgtttctgctctttctggtatcagtcttcttcaaccttttcggtctcgctcctgctgtcaccaacatcgtcggattcgctcttcctgccttccagaccattaaggctctcgagtcgccgtctaccggtgatgacaagcagtggttgagtaagtggtcgatctcgagggtcttttttttgtgctcctcagatgatctcaggcactaaccctggtcctttcatttgtagcctactggatctcgtttagctttttcaccttgttggagagccttttcctccgaattgtgacctactacattccttgtaagtgtctggatttatctactgcgaaccttcggataagtagcatgctaactgtgtctggtttccatccaaatagactactttgtcttgaagacagtattcatcgtctacctccagctcccatctacccgaggtgcctccatattctacgataacgtcatccgacctgtctttgtccagaagaaggctccttacgtctcgaccggcaccaccagcactacttccaacaacacttccaccggtttctccaccgctacttctacttctcacgccacccataccgagtcggccatcccgtcgacctctgagtgtgagttcttatgttgactctctctgaagtttattgcctgcccttttagtccctcgctcatcagatacatctgtttatgcatacagttgagcgatccatctaagtttcgacttcctcgaggcttgcttttcgcaggctgtgtccttttcctttttcgtcttctctggccagtacactaggtttttgcattcgtcctcttcttcacgctgcactttatccttagtttcttgaaaactctcaatgccgtagtatgatgttttaccactgtatcaatgtttcttgactgtttctatactcttggttctgacgatatgaggacgtaagaactgtcgaaccagaggaatacatgcttgagagaatgtgtcaaaagccacttcgaaagaaaacgcacaccaccgagtgtgtttaatcgtcgatagatactaggttaaactataaatgtgactggcgatgacatcattccatctcttccgattatcagtcaatccttcgtcgttcgtctttatcgtctttgtccgatctgttctgttgaagcaacgcccctatccatcatctttcatacttgtctaaacaatggtacgtttcatagtttgtctaagagttcaacatgaactcttttcaacctctcagaagatctatcgctgagctcttttcgtgttgtcaaattcataaacaccaacacacacatacaggctcctaaacttcgcgtgcttggctcatccggatcggatgctccaaaggtcttatctccaaactcatccgagccgacacacgtctcatctgatagattcgaaggagacatcctcgtgcggatcaaagacttttctggagagtctgccgatggaaaggaacgaaagagcccggagggagagacaggtttctttaccgcaggtgagagggagggatcttcatggagtatctttgtcaaagggtctttcaaagaagagatcaatggttcgtccgtttatctgtcctgtccaaaacaacaatgcgtgtgctttgtccgaggagacggcggactgatgatgttccttttgggtggctctttggaaatcatcttcctgtctagcggatgacctggtgttcggaaatgtgttcgacaaaccgatcagagatagcctcccttggggaacgtcagtggctcttaagtttatgaatttcatcgatccaaacatgaaatcagatgtatacgcggacaaaccatgggcgctgtacgttcatgttctgatacactgtgcctatgtccctcctgtctttgctttgatcccctgtgctgatcgccctatacttgtgtgcgtgtatcctcagatccccactgctttcgacggtgccttatcttgtttggtcatcgtccaattcaaaatggtcgacagacgatttgaagccgatcaaggagtcaacatacgagagcatcaaggatcgtctgaaggagtcgcctgaagggaaggatacgctggatgatttggagagagtaagtggcggtaccgaatgggacgctggaaagaggagaagctggttgacgaaggaggctaaccgaaaggccctcaagatcaaaccctccgttcgtctctttgtattcaagatgtttgatcgcgttctttgaagggttcggtttcggtagactgattggctgtttccgataacctcatggatctcaggataccatcactatcggttagtatctaaaccgaaacaagtagcaatcgtacacgtcgatctgaacaattgaatcttggtgatctctttttcttttttttctttattctttctgagtcatcagactttgctcagggatatcttgacttcaacgatctgtctgtctctattcctgccgtcaagtttcatgtgaacctgctcaagtactgggacggccagtgagtattgtatttctttctatctattctttctctgttctcgcttttttgtctttgttttttgtcttcccgtgtccgtcaacgtcgcatccgttcaagaccggttgcactaagtgttcggtggactgatcatctgattgtatgacctcctactccatctccacatcaaaattcacatgatcacacccatcgcctcctacggggaaaaccaactacagaccagtgacatttgtgtgtcggaaccgatctggtagcaaggagttcttcaagatcatcttccaaattatcaacgtcgatccggccgagatctcgaaggcgaaagaagaaaatgagcaggacgagaagggcgagaaggacgaaggagaagatcagcagattagtgacgaggttgattagattgaattcctcgacgggcgctccatgagatcatcagtgctgtttatgttcacctcgacctttggcaaaaccacatggtgtccactcgagaaatatagataaagtatccattctatacttatagctatatgaatgatgtcctcggctatgttcgctttggcgctcgtcgttctatgctgctcgttcttccccgtctggtctgtggtgtgtcaaattcgagagttgtgtcgctctgtctccgcgctcttcctctcgttcgagctggctccacagggcagctgtccgagaagagcgctcggagtattcggctgctgtttgcccaaccaaagttagtcaaccgctgagcgctcggaaacctattcaaacaagactacggggaattcagtgaaacgaggatagcttttaccggtatatattgtttctaactctccttgatttttcttcctcttctctttctcactctcattcatccttccttgttgggtttctcttgttataactgaagaaagaagaggtctgctcactccgtaaaggatatctgactcgtccaaggggatggttttgactgataggcagtgtggggagatcgttcatgatgagactcacacagtgcacttgaaacaatttttaggttgttatactatttttccttgggtctctgacccactgtcgtggctaaaatccgtctaactcctttctttttgttcattcaccatcactgattcctctcttttctcaaacagaatcacccctgctaactcatgatctttggtgtaccagcaacttgaatgatccctccctcctttgggacgggagttggaggaagcctatctcgagctctcatttctggaatgcaggcaacctcgcacttggaccaggttgctggatcgccttccctctcatgacaactttacatgcgctcccctcattttcccacttttttcgtattctctatgtattctctcttccttgtttctttctagtcttttctctctctctctctctctcctctatttctccacattctctctcctctgtccgtgtctgcttcctatctgttggatggcattggatgcttgatatctaaacgacattcttgatagaagtatgcagcaaatggattcctcaccatctacagcggtcgatgggattcacacatgtttgggcaagggcaactttagtggtcgtacgcttaggtcggtcctttcttttccctttttttttctcctctttcatcctgtcgttttctctctctctctatgatggctttgtgtcgtcgtagcagatgcaggactcttctcactttgatcgatcgtcttaacacatcatgtatctctctcaggttctcgatggaggtcgcccaacaccctactataggaagaaaggtaagcgattgataagcgtctctcgctttttcttctctcttctccttggggggaaagacgaaaaacacagccatttttaaagaccggaatgtgaataagtttagttcgacttttttctctttttgctaattgacgatgtctggtcttccatcctttgcctttcgcttctccctacctcaacacattatcagtcaactgtaagagatcgtcggccgatagctagcatacccatcgttcgacttcgaatttatgatgtcgagaccaacgaagaattggatgaagagtacgtttttcccccatctcttcttctcttcaaatccggaaacaatcggagatagagacttgatcctcatgacctgactatctcgaacgtatcatgatcaactccttggatctataaagggttatcgaacgattggatctgagcaatttgatgtgttcagtcgatctacatgcacccttcttttcgaccgagaccgagccacgctcggatacgtcttctaccggaactactaccacggcctcgacatccgccacgtccatcctgtcaaactcggccaacatagaagatatccgaccaggctactctgtcgcatccagctctcgggctcctcccatggatctggtaatgtcggccgtctcgatcagctcgctcaattccaaagcaacctcaagtgaacgtcagacaatctctgacaccgaagaagatcatccctcccaccagcagcaacaacagcaacaactacaacaactacaactacatgagtctatatcagtcgaaggggaagggtctccgtcgaggcaacaggaaccgagatatttactcagaccgagactctcctcgtcgtacatcttaccctcgccttccttcaaagaaccacccagacgaagccattttgtgctcctcccgaagaaacgatcaaagtctgggagtttcacttcgagaacgagctcaaccaagtcccaatcggataatcagtcttcagagaccgcctacggtagcacagatgctgaggattcgagcggatccgaacagctagccaaagtccaaagaaacctcttgggtggtgagcggagttctctctttccttagtctcctctgcctgtccttcttgctatgacgaaatggtgtactgaggtccccattaacttgttccctctctttccacttagcattgtatgtaactgcagtcgcgtaccgtgacctagaaggaacgttagggatatggttcatgttccatgtacgtttcacctcatactctacgagccagctctcacccagagggatcaactgactgatctttcgttgatccctaatgactcctctgtctctctgatcacccaggacgtcgccgtacgaagtgaaggagtatataccctgcagttcgctgctttcgactgttcggccgagacccagcagttttccaccgatgttacgcccatcttggcttggtgttattccaagccgttcaccgtctattcacccagaacgttggtcgatcactctcatttatccttgtttagttccacaaaagacgttagcaagaacaaatgctcatatatcttctcatcatctactttgtgtcgcctatctcttgtcacattctgtagtcacccaggcaatcctgttgtcagtgatctagggaaacatttcctcagccagggatacaaagctccagccaagaaggttcatcccctttagtatctttccaacccgacatctcctacattcgagtctagctcgttaggttttctcttccacatcggtcctcgaaatctcgtctagggttcttattcacttccttttcctttaatcaaaattctttaggagacttcggataccgccgggacttaccctagaggtctaaaagtcaagccgttgaccgatggagacttcggggatgtcgacgatgacgagatgaacaggtctatagagcatcacgagtaccaagaaagagcagaagacgaggacgatgatgacgaagacgaagagggtgaagttgggaataaatttgaagaggagttgagcgaagaatgttcatagcagttcggtgggagagaaatcttaaaagcgggaggtggtagtggtgctaatgattgataccgatcgggccctctttacgggcctgggatgtcttattgtacgatcccattcagttcgtttgcttctggacatgtggatacttccattattatatattttctgtcatgtttcgaagtccattcctcttgagtcgaccgtccaggaaagaaagtacgcgcgaacgttcaagatgaaccccttggagatacaacaaacatttcaaccagacgatacatcgatacgggactctgcgtctgttaaaagactacttttggtggatagtaaaccgatacaacaaagaaagaaaaggtatggaggataggaggtggcaagaatgttgatctcgatggcatcttgcgtaccatgcgtgattctacacgtgaatcaactctgcaaaacagacatgaattcagtccttggactatatcagaaaaggcgtgttcgtgaatgcgagggagcagatggtatccaatctatcgacgaaccttttatatcgctcacttccttgaagcgctcaacctctagtctattcgagtgcatacgcacacacacacacacacacatctgtaggaccctctttgatgctcaagaggacatggcaagttgtttacggacggcctcgttgtacagcttttcccgaacagccacttgagcctttttgagatctggttcctgtcgagccagcagatattgaagtttggtttctcgatagcgtaaactgagaaatccacggatcaggcgaacgaggaaagagtattgatacatcagttgattctttctgtcggggagacctgcgataggacgttcacaaagggagaagacaacgtcaaacacgtactctgagatcaagatattcctgttcttctccagtattgcccttccctccggagtctgcgcaagcttcttgttctcttcatcctcccatgctttcatctgccttctctcttcttcttcggcttgattcacggctagttggtcagcttttccctggtcggacatcaggtatgcttgatgttgacgatcctggaattctaacaaggcatcgatttgatcctttcgatagatctgccatgtagaaagcccatagtatgtagctagatgtggtcgatcgtttgctaagatcagtccgagcgatcaaacggataacaacaaaaaccgcgtcttcggaagaaacaaagcataccaaacagcacaccacctataaaggctcttgggtattttggatgaatcgtcgggagcctcatcttcaaagctgtagatgattaggatgaaggcgaaggagagtctctagctgctggaagagagaggtgtagagcacatagctgttagggttagaactacgaatcgccatcacattctatttcctcccttccagcttgccatctctctaccttcttcctatcaatacccaactcacaagtaagaccggcacatatcaagcatcatacagcttaaacacaatgtcggtagttgtgtcagatcctgaggggaagcttcttgctcaagctctaaagttcgtgtgtctaccctggttatctcattctgatcgtcctcggagcgaatcgtagctgaactcctacatacatcctgtgtatgacgatattctttgaatggtccactcctcgaacagtacagtcaagatcgagagtgttcagatgaaaagatgtctggtatgggttctatcttcttccctttggacataaatgattcggactggtttctcaccgatctgtgtctgatgcgtgttataggatgcagagctgctgatggatgctttaaagagtgcatccaccatgctcgctgaactaaggacatcctctctgtcaccaaagcagtattatgagttatgtgagttcgtttctgttcaaggttgtttaccttagacacgaaagtctactcgaaggctaatttcaggcgattgtgtctcctcttctcggtagacatggctgtgttcgacgcgcttcgacatctatctacttatctccatgaagctcacctatccggcaagcaccatctggccgacttatacgagattgtccagtatgctggaaacatcctccctgtaggtcccctgaaatgtctcaaatgaaatctgaaaagacaataggatcgagccactcataaatgttctgtctcccattcagcgtctatacctgatgattactgtcggatcggtctacatgtccatcccggatgcacccgtcaaagagatcatgaaggacatgatggagatgacgagaggtgttcaacatgcgaccagaggtttgttcctcagacattatctgagtggacagaccagagactgtctgcctatcggagacgatcaagggtttgtgtgtttctcctctacaagtactaagttgatagacacgaagattaaagtctacttatcttcatgaccagatctggaggaaaccttcaagactctatcggtttcgttcttacaaactttatcgagatgaacaagctctgggttcgactccaacactctggccactcgagagagcgagagaagagggagctagagcgaaaggagcttcggatcttggtaggaacaaacctggtccggttgagtcaattggaaggtgtcgatctggacatgtaccaaaaaattatcttaccaagtatcttggagcaagtagtcaattgcaaggatgtgattgcgcaggagtacctgatggaggtagtcattcaagtgagcctatttcgcgaccgtcttgttttctttgcacaaatgatacatctgctgaaaatctgatttgtactccatcattctctcaggtcttcacagacgagttccatctgttcacgctctcacccttcctttcggctactgctcttcttcatcctcgggtcaacatcaagcagatcgtgattgctctgatagatcgactagcatcttatgccgctcgcgaagccgagaacgaatcccccgaagagaaaaagaagggggaagaggaagctgcgaagaggctagctgagagagtccaggcaaggaagaacggaacggatgtcaaagagaagcctatcaacaagcaggctggagccgatgtctggggtgctgcagaagttgatgacgatgagcccaccaaggacaaggaagctccaatcagcgaaccgaaagaaaaggagaaagagaaggaagaagaacagccgaaagaagacggctcgaccgcggaatcgacgacacctgctcctccagttgtcaaaaagtttagaggtattccagacaacgtcaaattatttgaggtgttctggcaccaggttgtagagcttatcaaagttcgtctattcactatcctttcgttcgcgtgcgttgctttgatcactcaactaacaaccgataatcactgttccgtaggctcgaccagatttatccatccaggatatcactgcattattggtctccttaatcaacctctcattgagttgctacccagatcaactcgaatacgtggaccaaatcattgtatttgccaccgccaaagtccaagagtatgccgacaggttggtactttgctcatttcttcttcaacccgtttggtcgcttcatttttatgaagggtcgcaattcgagaatcccatgcttatcgagctattcctcgttcttccttcagtcctgatatcaacacaccggcaacgactgcaaaccttctctccctgttactgtcacctatcaactcctatctaacagtcctaactttactcgcactcccttcatatgttcctctcttgtcgtcccagccgttctccacccgccgatctatagcacatgctattgtttcttccgttttgaagaatgagactgtgatcgagaccccagaggacgtgagtggtgttctagggatgtgcagtgttttagtagtcgatcagaaagagctaggcgtgagcgcaagcaggacaggctcgatgataggcgcgaacggaggcagatatagaagtggaagtatcaccggtggatcgagcggaaggaggtccggtcaccagagggaggcgtacgatgcggaggatatggcagaagagcaaggatgggtcgctcggatggtgcatctgttccagtcggacgatctggatgtccagttccaggtcagtttccgtttcgttgtgttctgttctatcttgtttacttctgacaaaggtcccctcatgcatgaactatgttttctgtttttcagttgttccaaacggcgcgaaagcacttcatcgacggcggcgatcgaatacgctataccttccctcctttgatcacctcgagcattaagctggcgagtcgatatcgatcattacctatagatgagcaggtgatcttcaagaatgtttttgataccaacccacagaacgtttttagactgacgcatcgcatctgcttgttgaacaggatgacgaatgggaagtcaagcttgcgtccatcttcaagtttgtgcaccagatcatctcaatcctctatcatcgagtagagtcatcggagacttgtcttcgactgttcttacttgctgctcaggtggctgatgaggctgggatggaagagctcgcttacgagttctttgttcaagcttttgtcatctacgaagagtccatctcagaatctagagcacagctccaggcgattacaatcatcattcgaactcttcaggggaccaaggtgtttggcccggagaactacgatacgttgatcaccaaagcggcgctccacgggaatcgactgttgaagaaacctcaacaggcgactgctgttctctacgccagtcatctttggtggcagaacgagcttccagaccgagacggaagaaaggacaacgtgagcggattacagtactttgctgttcagcatgcgaggtcttttgatctacggcttactcctctgtcctctaccgtctccggggatattcatgctattgataggagctcttccgggatccaaaacgggtgctcgagtgtttgcagaaatctatcaagattgctggatcgtgtatagaagaaattatgagtgtccacttatattgcctggccctggaccaggtaagtcttactttatctttgctattgatagctctggttatacagtcttattcatcgagtctttcccgtcatcaaaagttcttgtattactttgagcaaggcgtcgagacagtcagtggtattcttcttttcatatgcatatacttcagatttgagtttgaccgtctctgcgactctgtgttgtttctcttacgaaattgtccggctgttcttttgttaggtgaccgtacgatttgtcaactctcttgtgggggtcattacctctgagattgactcgatccacgggaccgacgttcatccgtcatccaacgcttcgcccggtctggtcgatggcgttcactcgccagacatgatttctcgacatttccgaaacacgttgatctatattcaatgtgagttgtggtggttttattactctcaggatttcttcttaatcttgttgttgacagtatctgcatctccctctctgggggcttggtttcattcttatattcgcagctaaaaaagcagctagcgcttcatatgaactttccggtccaggcacacagccttcatcaaagccgaacgttgcctgggacacagtcgatatcgttggcgctctcctcaagatgggcctcactgctgcttagagtcttttcgatctaattctttccggatcttgagctgcatattaagtctcgttcgtacattctaattccgcagggccttctttatctctcaccccgtcggatgtatccctcccctgcttttgctcaaccctcagaagtttcactgttatgtgttattttttattttttattttttttattataagggaaatcagccgccatgccgcttattgttctatatcttccgtgcctttacaccgatgcatgtatcaatcatgtcgccaaatatggactaatctgcttacgtctcttggaggaagaagaaaaatctaggttaaaatggtcagaaagtggatctggaagaattcttggtggcgggatcatttctctggcgttactgacaaagtttgacacgggtgctcatgtcgaaaggccgagaactcgggtctgcaggaatcatcagtcatgcaaatccaaagaagattgccagctgataggcaaacaagtatgtcacctcgcggcccgtcgcggcgatgagatgtcgagcgatcgagatctgctgccaggagctgcttaattttgagctgttggccttggtacctaattcgatcgtaaattagacgcgaaagctaccgagatgcgtcttgtgtgacgtagtccaagccttttcttccttagctctctcatcagctctgaatgctcatcttctcaaacatctacagatcccaacatttgttccttcctttttctcatgcctgaccgattcggtccgcatatttcaaagtatatgcatacgtgcgccagcacgcacgcatagccgatctttcgttcacaattatactcacaggtcaggccagagtagagaaccaggtctgacaataataacaacagcaatatatctcgagaaaggactatctgtctacgttgaatgatcctctatcctcgtggggcctggcacagatacgccctaacttgctaaccggctatagagtttttgcgcttcttctctgttgcctctcctatttcccgtcatgtcttggcgggtccacttataacgtggtggcaagggcttgccgtttgccgtttgcggttcgatcgttcgttctctctcttcgtaccgacccaaaacagaacaccgttcacatcggtgcagagtcaatcttcccttcttttcaaggtcagctgacctagttctttgaataacacaggtgctccttccgactgttgctgcatgaacgctcaagagggttctgagagctgccgcctcatattgtacatcttctagattcggcggcaatcacgttcgggaagaagacaacacaaactatgggtggaaaagcggaatctctatctcctctgatctgttggcctttccgtgtctgtactcggcgctctcttcctgaccctgggttctcgggtgccatctgatgtacccaactcattcggcaatttctacccttacccaaccgtcccgttctgtataaaggcgttcccttgagggggtagctttggggttctttctttctctttctccacacatccaactacactcaagaagggatttctaacataaatagtcccccaaacactctcaagacccttcatcgcgcctttctaagcactaaccctttcgtacaaaaacaacatggttcgtgtgcttgtcttcctcgcgcggtagcaataaccgctttcttaccgacctgtacaactttccttacgtctcttgtatctttctgtcttgtgaattttatccaggctggaggacctggtggcaccggtgccggtgtgaactctggtagcacggcggtggctatcttgatgtctgcttttgctggtaagtgttgtcttggaattcataactgcccacgtcacacccgctactattcggttcttccggtcacaagactaatttcattctgatcgatggatcccctcgatctatagctttcggtggtattcttttcggattcgatacgggaacgatctctggtattattgccatgcccaattggctcgagacctttggatctcacggttctaggacagcatactatggaggaggagtcggttactaccttgctatcaacaacaaatctttggtcgtctcgattttgtctgttggtaccttcttcggtgctctctcggcatacccgatgggagatattctcggtcgacgattgggtatcatggcttcctgcagtgtcttctgtcgtatgtatttcaaatcgtcgaccccctgtcccatgtctctcacgtgcaatggactgatcatctttctgtcctctttccttagtcggtgttggcttgcagctcgacaccagctggtccgtcttcatcgccggtcgagtggtggccggtttcggagtcggtttgatttcttgccttgttcctgtgagtgatatgtctttgcactgatgaccattttatgtacacgagctcattatttacgaaacaaacaacagatgtaccaatctgagtgtgctccgaagtctgttcgaggattcgtcgtcggttgctaccagtgggccatcaccatcggtcttctccttgccgccattgtcaaccagtgcactaagaaccggggcaaccactctgcctggcgaatccctattgcaattcagtttgcctgggctgcggtgttagtgactggaatgctgctccttcctgagtctcctcgatggctcctcctcaagggcaagaacgagcaggctcgacacgccatgtcccgattgacttcccgaccgcccgactctaccgaggttgaccaggagtgcctcgacatttcattgggtttggaggctgaggctgcgcttggaaagacctcgtacattgactgcttccgaggaggtgttgcccgaaacggtttccgagtctggactggtatccttctccagggtttccagcagctcactggtattaacttcatcttctactacggaaccaccttcttcaaggcttctggtatctccaaccctttcttgatcaccatcgccaccaacgttgtcaacgtcggaatgaccgtacccggtatcctattaatcgatcgaatgggacgacgaagtatgcttctatggggagccgcaatcatgcttgtctgcgagtaccttgtgtatgtgacgttcatctgcttttgtttcatctagattgatccgtttagatatctaatcccttactttgctctcgacatatgtagtgccatcattggtgtcaccgtcggtaagacttctgacgcccagaccatcaacttgaccgcccagcgagtcatgatcgcctttgtctgcatctacatcgccgcctttgcttccacctggggaccgatcgcttgggtcgtcatcggagagatcttcccgcttgctatccgaggaaaggccatgtcgatggctaccgcctcgaactggctctggaactttggtatcggatacgcgaccccctaccttgtcgaccagtctacgcccgagctgaagactgcctcgcttggagtcaaggtattcttcatctggggatcgacctgtgtcggctgcttcctgttcacctacttctttgtgcccgagaccaaggggctttctctcgagcaggtcgatctgctctaccgagagtcgaccatccggggctcgaacgcctaccgaaagaagttgatcgacaacgacgagaccttcatgcaccgagagatcaccatcaaggataagggagcctctgtcgctcaccacgagaccgtttaactagtttaatttctttttggtactctgggccttttctctctttgcttttctcttcgagtactcgattatctttgtgcattagttcctgtttgtataccctccatgtaattcttccctacgttcttaactccatgttgttcgctatctttccttttgtaatcaaaatctttgctctgcatgtcacttttttcattctttccatctatttgatgtcttaaacaaaaaatcggacacaaaagcgaacttaaactcctcacaaagaagcgtcctatcccaacgagtcctttggctgctcaggacactctaacataaaaccaaagtattttgaaagtaaacacccagaagcctttgctagagactcttttcagagtcttacagcgttcaacaagacctcttgctccttcactgttcgatccgtgtcaataaaaagataaacagccgagaatgatatatcgtgcggaaaccaaacagaacgagcgccggtccgcttaaataagagcaaggagaagggagactctatcgacgagcaaaacgtttatttcgtcgtgtcatccatatgagttagaaggaacggaccgcgcgaacgattctcagaatgtcagaggaggatatcaatcttttgtagaatcatcagttcgggtttccctcggttgaagttcgacctgtccttctggttttaaagtccgggtgttgttcaccatcaggccatgacaagttttcctttgctagtcaatacgtggcttatcttccgagctcaaatgtatgctcattcgcttctcgcgagccagagacaagatggtctgacaataaacatggtgattttatgaggtttacgatagtaaaaggagagagagaaggctttaatacacggaagagtacgggtaactagacagaaagatcacaaagagcacagagaccaatcgaaggaagaaaaggagccaaaagagtaggaagcctacgagacaatcatgcggtagcctcgactgatcctgcttcttcttgctgctcggctgcttcttgagcctccaacgctgcctctgcgtctgcaatcatcttttcctcctcagcggcttgtactctctctcttctctcccttcgctccctatccaactcggcatacttcatctgtagatcccgctctctcgccaacattttgtcaacctcgatctgaagaccttcgattcgtctaggtgcagcagcacgttcgaactcaaagagcgaactgaagctctcaagctctcgttgggttcgttgaagatcgtcgtacgcatcgacaatccgtttttgtatttttgcattgacgacctggtaaccgccgagcactttggaaagcttcttctctgtcttcgtcgccttggtcgcttcggcgatcatgagctctcgatcctgaagaatccgagcagcataaccctctatgcgttccgaggaagagaccgacccggcttcgacccaagaagatgccgaggcagaatagcagagagattctcgcgtcttgctccagctcaagtcatccaaagaatcgattccactctcagtagcgatggagaggatgccccgtttgagggtctcctcattcgctccagggaagcctagggagttggcgagctcagagtgtatgagcgaacgagcggttgctagatcgtcatcctcaggtagttcatatgtcgaagatgcacctccagcacgggaggttccaggcacaggatgaacgattgagtcatgctcgaccaactgaacaaactcttgatccaccaaacgaagcgctcggtccaaagcgtcgtctccggtggaggtaaactccaaagaaagagcgccgaggaggccatcgacgtcaacgttggctggtcgaggaaggtttttctgaacggcctgactcctcctcttaagagctttggcagcctcctcctcagccaacctttggagcttcgcatctctctcagcagcatcctcctcactcagtggggcctcctccacttcttcctcgatctcctcctctggaagagcaatctcgaaatcgttctgagccttgggaagggaagcgaaccctcgtcgcaagagatccttggcccgtcgtctagcttgagcaggagtatcgcccatagcaggagtcatcccaccatcagccgagttgatgttcaggctgtctcgcataggcgttcgaagaggggtggaagaaacagatgaaccagcttcggatctgggggtagctccaaaatcgacacctccggttcctcggaaaggagtagcgagcgggttaggagtcgaagcgacctggtggagtggagtagcaccttcaaatccagtcccgccctgaacttggtgcaggggagtgttctcgtcaccaagcagaggagtttgcgtatgaatcatgtttcgcaaatttcgagcctcagccataatgttgtcctctgacaaattgatgaaaggcgtaacatgagtgattagtgtctacacaaggaagagaaccagaaggagaaaggaggaggaaactcacgttggggagctgtcctaggtgtcctagccatcttggccttgcccaagctctcataatcccccaaaagtctaccacttgcctcgtcacccccttctccttccactagttctctcgatctctctccagcctgtccgatcttcacaatctcctccaactcaacctcacccacctgaggagcgggcagatccagtctccgtcgagttccgatttgctcggcctctttcagcttctgaatctgggcttctctggcggccacaaacgtcgggtttgccttcgcgttgtcgctcttggccttctttcgcttttctgcagcttcatcctcctcgttgttgttctttcgcttgccttcgagcttagcgagcgcttgaccaataggggcggcgtatcgtcggttcttctcatccgtggtatcgtaaaatcccggcgcgggttgcttgttaaacgggatgtcctcgttgtactaaaagatagttataggttcaggaaggcaggcattctcgtcagcattggccaattgatgcatattcagatgggaaggccaaggatagagattcagttttcaactcacatccatagcgttctttttattcttaggcttactcctcgtcctgagatgagaacaagacagatcaaccatgttcaatatggaatgtctttattctaagaagacagcaaaacgaagtgtctactcacatgataccggcagccttcaattctctcttcttctgcagaacggcgagccttcgggcctcctcaagctgacgttctcgagccttacgcttcgccttctttccctgagtgttagcaagacgagctcgggcttccgaaagcatttccttttctatagacatagcaaatcgagacacaaacaaaagtgagaaaaggaaaaggataatcagcccactactattcgcgtagtggtaatagaagggggctaaggaagagggatgtcataccatcctcgtccatatcaataggatctggcctggccggcttggtctcgggatctggatccacctctcctggcctcaatcgcctgacatcgtctgcactgggaccagcctctggccctcctggcccagacaatccaagctcatcgttctcctttgcctcggcttcatcgagcagcttctgatatcgttcaagacactgggtggccgttcgaccgacaataggagcgatcgttcgccactgagtcggcatgagcttggccagatggaggagtttctcatcttcggtctagaagtgaaaaggcgtggacggatggacggacgaaagaagtaagcaaaaagttcaggaagactacctcacacaccagatcgaagtagaacatgcctttgaccattcgactttcttgatagaaggatctagccattcataccatctaaattatatatccacaggcgtaggaaaggaggacgatgaaaagagtagaaggaaatgaagagaacgtgcgtaagtatccttctcatatcaactgacgcgtccgcatcatactcaggtgacagtggaaaagtgacgtttggagcagaaaaactgtgctgaccttgctttgcattgcttgggggtctttcttacaaggagcgaagaaatacgagcccattgctgttggtgatttggaacgtaagcgatgaatgtaagcaaacggagaagatcagaacacggccctggaacgagcaattctactatgagtctattcacgttctttccatacttggagatggcagccttgaggatctcgtcctctgtatttcgccagatactacagagatagaccaaaaggaggaggatcagattcactgacgactatacttgaaggaacagtattagctgaagaaatcctgatcgtggacttggacataccctcccttgatgatgattctctaatgaaagtagccagagaatccaaatttaagcacgacgagcaggaagtcgacagtgaagataccaacaaaagccggaataagcagcattctccacagttcctctgagtctcgatcaagatgatgggaaaggccagacttacgaccatgtttctcaagcggatgttctcgtctgtctgtgggagatgtgggaagaggaacgagccaactcaagggcggggggtccgtgcacaaaagaaagggcttacagccatggttacgcacgaaccattcgaaccggatgtcaaccgctctcaatcagtgtaatcataaccggttcatggcattgcacagcttttacagttcccgtgccacaccatctcggtctctggctttcttgttctgcctgcctttcatctctcgacatcaagaggtccattttattctttggactccatcttagcaagccatgatctctgtaggtatttcttccttagtggtagatgaatggcgagatagttaacaagatgtgtgaggctccttcttccatcttcaccttcaggctttctttgtgttcaatcagaagggcgaggttcgtttctctatcgtctgcctctctctgtttatcttctatgtagaaagacagaaaaaggtctgttcagatgtttgagtgagaatcgattaacatttgatctcaatgttttattctcaggtcctcatttctcggctgttccgtgcggatctcaagtgcatatctctttctcctgctttccctaggtctatccttgcatttgcatactgacccgttcgatctgtccatcttacctcggctcttcaggcgatctatagcagacgtgtttcggattcaggtcgtatcgaacgctgatgttcgatctccaataatcacattgggatcgacgtcgttctttcatgttcgtgtaaacaatgtttacgttctagcagtcacaaagtacgctccgttcatttctatccatgttcgtttctatccaaatagcgagctaacttaactattgtggcttcaataggacgaacgcgtcggccgctctcgtgtttgaattcatctatcggtttatctccatttctaaatcatatcttgggaagctggacgaggagagtgtgaagaacaactttgtgttgatttatgagttgttagatggtaagcgtatccctcgatattacgacatcctctgtctcttctatcttggatgtgttgtaaactggtttcggttcatatctcgttatgggtggcatacagaaattcttgattttgggtaccctcaaaactctgagaccgacactttaaagatgtacattaccacagagggagtcaaatctgatctatctttggtaagcgattacctctctgggtccaaccttgccgacgttggttgactaatcaacttcttttccgataaagcgagacaattcttcaaaaatcaccattcaagccacaggaaacacgtcatggagagggactgatgtcaagtacaggaagaatgaggcatttgtcgacgtaatcgagaccatcaatctgttgatgagctctactggtcagtctttgaatgcgcaacatcttccattaaaagagtcaaggacagagcgcttaacactctttccggttgatatgcaatcattcgaacaactgttcttggacgtgacaggaaccgtgttgagggcggacgtagacggtcaagtgcttatgagagcatatctgtctggaaccccagagtgcaaattcggactgaacgacaagctggttttggaaaaaaggtaacctcagtccgtgtatgtgcacacaaagagatcacggcacttattatacctggctacgtgttttctttctcgagaacagtgaccgatcccgctcagcagacgccgtcgagctagacgattgccagttccatcaatgtgttcggctcggcaagtttgattctgatcgatcaatttcattcattcctccggatggtgaattcgagcttatgaggtcagtcgttatattcggacctgactggcaccaagctctctatctgtctttatacgcccggttattaacatggatttgcgcttttgtgtcgaacagataccgatcaacgacaaatattaacttgccgttccgactacatccaatcgtgaatgagattggaaagtctaaggtggaatacacgatcaatttgcgggccaactttgatggcaagttgaatgcaagtggaattgtgcttcggattccgacaccgttgaacacgactaaggttgactgcaaggtcatggttgggaaggctaagtatgttccggccgagaatgcgatcatttggaagtaagtcctctcttgctatcatctttttctcccccaaagtaacgttgcgagtcctcgcgttggtcaccagttcttactctccagctctttcttttttcttcggaatcttttagaatgcctcgtctccaaggtggacaagaggtgacgctgcacgcagaagccttcttaacagctaccacacaccgacacgcatggtctcgacctccgataaacattgatttctctggtgggttctctttcgactctgatatatcaaaattcattattgactgacgaatgatctctttgtatcga

SEQ ID NO: 430 - DNA, 8359 bp, Xanthophyllomyces dendrorhous
atataataatataaaaaaaccctatcagtcgtcatgttcaccgcatcagggctgttggttcgtttcttgaaggtgtttgagaagagcaactatcagtctgtcaaatgggttcggtacgcccttgtttctcttccctctgttctcttcgctgataagtagagaaaatcaagctgatagttggatgcgcttgttgtgatctagatatctgacgaaagcacaagggtcatatcaagttcgggtgagtggctgttcaagcacacgctgtcgtatcatcaggtaacctctccgttgaactaacatgcgctcttcttctcaccctgtccttcagttttaatgcatcctacggctgtcaattcgattactctgtgtgatgcttgcttgtctcttttgagatgcttcctgtttctgtattatatattgtagtttggactattcctcatgacacgtctataccgcgtcagatacgtttttaccattgcgcacttacgtaaagagtgtggagaacgcgtgatcaagagaggaatgcgcagcaagggcagatgatcttggcataaaattactgttcctgaacgttcctccgggtattccactagttcctgttcctgaaagttcctcgaggaaacggcctgggtccttcccgcctttcctccatctccgtcgatatccaatactgttactactaccatcatcatcaacaacaacaccaccaacatcaccgccagtacaattccctttaccaaatcatggctatatgccattcacatctagacctacaagatatccaggagggatcatctgtccgaagcttctctctatcacccacatttcgagaggcacgcctgcatgagccttctagagtcgaacacagcagtgcccgttcaaaaatcagtttacctgacgataagagctctcgactcagtgctcacaaccaaacaagcacaagcactctgaccaagagacattcccgtgccgtcgagtttgagcccgtcacacatatcattgtccttcctgatgccgagaaaggcaaacctagagttcaacttaggagaatgtatgccccatttatagatcactttttgttcaatagtgttggacaagaagtgaaaggctgacaagatgtcggacgtcactgtgcctcaacaaccaccttcaaggtcgatgtcactctcgttttccaaagctccttctgaagaatccttggatgatcgtaagtgttttcatatcaacaagttgttatctttgtttagattctactgacctcgaattgagttggggcgcccgataatcgatacagcgtccttcattcctacatctcctcgtcggatatgcgtacgtgtaccatcactgacacggtctcatacccggtcaaattcgattgatcgacaaagcaataaccagcacctacgaccatgcttggttcatagtagcgacagctcaggatccagttggacgagattggaccatcaaagtactggacacgtcaagtcattcatatcgctcaagacctcgcctatatcaccaagagaacgagtccctagcgcacctattgccatgtcttcttctgccccctcgcacgagagttccatgctatcaggatttatgtctcgaccgcggccgaatagatcatcttcaacgagtagtagtagtttagccggtcgatcctcgagtcatttagatgatccaacagaagctcttcgagcatgctgcctggcctgctatcgtggaacagatttaggtctccaaggcgaatgggaagacgcaccttggagttcaggcgctaaaaaaaagaaacgaaaagatgacgatgagagggagaagaagaaagcggaaaggaaaagaataggagagaaatatgggaagctatctccattgttaccgggtgggcttatggacgaagtagactgggaaaacagtggcatgttcaacaggttcggtacagacgtagtcgtcgatgaggtcacactgacccgaagagacccagcagatcgttcttctggcaaagacggtccagttggtctcaatcactcggtcgctctgcttcggctggatcactcgccctcttccagtcctcaagcggatgaatctcccctcctctctccaagccagatgcgaggcgacctttctatgccttccgtctctcctccctggatgccagacacgaaatcacctcgaattgataagccggccgcttacgacggcatgccttcctcagaagccaatagctcgttctttcccgactttcattcatcctccatctttggaggcgaaatcgtcaaggccccatctccaattgagactccagaactatgcccgtcttctaccacacccaatgcagggcttgattccggaaatatccctacaactcactctcattcctcttcttcctcgacagatagccatctgaatcagacctcaccgccaccatcgttacctaccttaccacttttgcaatcttcatcgatcggtccctcgtcttcagcgtctcctgtcagctgtccaataccgacgacgacagctccaccattggcgaaacgattcttatctggattctcgttcggagggattaataaagtcttcaaacatagcacaaaagaagcaggcgctggtcatgggttcttttagtccaggtcgagtcgtttcccgcctgcacactgttcctcccaaccttcctttcttccgtgggaggatcatctctacgaagccgtttgccttgtccatcttgcaccttgaagtttatatctccaaatgtagctatcttgttttatctcatgtcaacatgcgtctttctcttcactcgcgtcttctcttttactacatcttcaacaatttgagagttttcttctttcatatagtcaaccgttctgtctctgtctttgtctatggttattagattctacagctttctgaatgaggtgaaacttcaatctcccttcgtcctcttttgatttcgtcttaatttcaattgttccctgtaccaataaatgtattgttctactgatggctcgtcgttttcgtccatgaatgtggtggaaaggggaggggattttttcttctctttcccaaaaagaagacgagcagagagtaaaacacagagtagtaacacactagagtaaacaatgcacggtatagaaacagaatgataactagaggagaactaataaagaattagaaaaaaaaggaggaaaaaaagtacagtctaaattcccttgttacagttttcatcgaatcaaaatcgatacaacaaaagagtagagtagattaaggaagtaacgaagagaaaaaaatgatgcgaagaaatactgggattgtgattagaagaaagggcagaggagggaaggatccagttgaatatgattgttgatcatccggtcgcagaatcttgatctgacaactctgactctgagccagccgcatgaacacgagcggcaacttcaagctcgacctctgcatcagccagcatatcttccttctcttcttcatccatctcttcttcaatctctgccttgaccgtttcctttttggatcgtttcttggctggtactgctctgggagttgctttgggttttgctttggccgccactggcttcttgaccgtagtctttgccttttcaggtgattcgctctgtttggtttcgatctcggttttaatctcggggtcgacatcagccttagccttagcctttggcgaaggtttcgcctttgatttagcagtcgagactgctttctttgacttcacactcggtttcttctcgtcctcgtcctcgtcctcgtcctcgtcggcaagagcggcggcctcctcagcagcctccttgtccgccgctttctgctctcttcgctgtctggcttcaactttggctttcgcttttgccttcttcgcctttgccatcggcgtcaacttcggttttccagaagtggccgagacagaatgcccttcagcgtcgaggatgacggcaccgtcatcttcccctgaatcagtgctttcagcaaacgtcggtgtcggtttcggaggaagataagatcctcggtggaccgggcccagattatagagattgaataggtgaagaacggcttgttctttgtctgtcaacgtcatggtcgggcacaaaacgcagaacgaggatcaagttagccaagacaagaagtcaaattcaaaacaagaacgagtctcaagtttctcacctttagcctcgatcatcaaatcgacatcatccggcagacccatcctgagtccgaactctgatagaatatccggcttcaaagcctcatgccttggattcccctcttgcaatcccagtaactttgattcctcctccgagatggtctcgcctgcatcctcccttcgtttcttttcatcaatcgcccgtaaggtgatctccctactctcatccagggcgagcggcagccggtcacatcgatccgaatgcccacggcgttccatgatcgtaagtgcgccatgcctggcttcagatagatgctgtttaactcgaatccctttaggttcccaagtcttgaggatgaaaggcatcagcaatgggggaggtagatctgatgggttgatccagtcatgatgctgcatcacggtcaacgtgatcgagaaaagtaggccaatacagagacaattagcctagagcaacgcaaaatatcgccttaaaaagaagcgtgacatacataatcgaagaccaagggaatcttcagttcgtcacagactggaagcaagtccgaagcagaatagcatatctgtttagatcgaaaacatttgatgttcaaccatgcatagttagtatcattgatctgtaccaaaaccaagaagtacatgccagctaaaaagaggagaaagagttgggttcctacctcatcattttccaataccaagcgctgtttgaccttctcagagcacctaggatagttctccctgaacctctcgagcgtcgcctgtttgtcgccatacattcctccctgcggtacgcatgaaaagcacataatgaaaattcgaagaagaggacaccatcagcttgccagttgacgtatctgccagccaaagacggagatgaaacatgaatgaagaggagggaaatctcgaaccatgtgtatgatcatgacgccgtctttgccgatgcccatcgactcaagcatgtcgcattgataatcaagctctagaagcgcgttttcgaccacgctagcggtcggactcgccagttgggtcctgttaggagtaaatagagcagacacaggtatgtttaatgacagggattcatccgcggagagcgaaacgagtcagtcaagcaagacagccaaaagcaggaaagagagggttatatggagacgaaccattgacccgggtggacggtgatccgcatgtcgtgttccttggcgatccttcctgcttctgccatatttttcattgcttcgggcaaagtctctcggatattgtacccatgttccttgtgagacgcgaaaggaaacatctgattcggacaaggaaaagatagcgagagcgccgtcaggacggtccagccaacaaaaaaagaaggaggaagaaaatcacttcagagctcagcctgaacaaacggataccgttcttcgcattccactcaagaatggtgatcaagtcctttgtgttctgggtagtaagctcgacgagcctattcataccattatcgttgaggaatcctttcaggcggagcgtccgggagcagaatatgggaggtttcgcgtttcggaggagcgagttcaagcaggcctatagaaatgtgttcatttcgacctcattgagggaccagatcatcgtcagaagggacgatagattagagtacgggaataaacgaaagaaaatgacatacataacccagtcttcctttaaatgtcgtaggcagtttttccaccaccggcacatcatggatcactatctcctttcccttccctctaggttgcttcaccttcagcattgaattcccatcttcacccttgaggacctcgccgtcttctccaagttggtattgcggtgcagccttctttctagcccgtttcggctttggtgtttgttcctcctcctcttcgtcttcttccttcttaacagtcaggaggtcttccatatctttatcgtcgacgacgtatgcagcttcttcacccgcctcaagatctccggactttcgcttctttccgtgttttgccaatgtcttggatgcagcctttggcggtggggacggcgtagcagggtccgacaaggaagacgcggtagtcggcgagggcggtgggttcatctccacatcattcgttcctacgattggcgttagctttttgctctttcgtcgagccatcctctttttcgcaggcgcaggcgcaagatcagccgaagacgatggctctggcgaaggagagacggacgagacggacgagacggacgaagagcgataggatgtggcctcggctgcagaggcagcaatcgctctcgaagccgcacttgaggctcgacgggtaggcctaggaggcatctgttgcaatggtctgcttggatgagtaaaattcggatgagctctggatgtgaaaaggcaaacgtttcgaacggcttgcaatcggaactgggcgatcgggtgaagtctggacagggacgagcgtagaaggaagtgactcgcggcagattggttcagccgaggaagaagaacggaactcagtttgaaagagcaagattcgatgcttagtctgtaagtccagacccaaagtgagcgttatggttgagggaagaacaagacgaggacgagagaacgaaaagagaggacgggaaaagctgcaaagagaagggaattctcgatggagagtcgctcgacgaatgacttgatgacgtatgcactcgttttgtgtctcagcctgatgccagcctcacaccagagttcattttaaaatcagccttcagaatgggatccagcatgggccgtttgtagattcggatgggcactctgtttgcctggagtgttttgagcattcattcatctatgatgggaaagattgaaaaaatgaaaaatctatggagacgaatcccgtttttttctctttcctaatagaaaataaattgagaaaaaacagacagacagacagacaacacgtgtgaaagggaaaaggccggtctgatgtctagatgttcagccggtagtctgtctaactttattctccaccgcacaggttcaacaaccggctgtctaaagtctctgtcggaccgtgccctacgagatgcgagacatctgcccatgtcttgagaacacctagaccctgccggttgaggtggagcgtcgtgacagatgtattgggcaggagggcagggtgaatgtctggaggaagagagaggagtccttcggatacgagatggttcaaaagacaacggactgtttatggttcattttgcagtgtgttgaaataaagaaagataaagtccaatagatcaaacatattataggagaggctatatgagcaagactcaacagacgtgactcacggaaagctccgtgggaaaccaatgcaacggtgtctccgttggccttctcggcgaggcttaggatttcatctttccagaaagcgagccctctggcttgcatctgcggaaccgtctctgcatttgccggcataggtcgggaagaaagtgccgagatttcaagcccttggagggacgacatgtactaatgaaaatggggacaaaccagacatgcgggcatgagctttcaatagactgacagatctgggaaaaacacaagaggaaaagagaggaataagaagaagaagttgctcactctttcacgcagtcttggtgtagtcatcaacgtaggaggcgtcgctgatgccgacagcaggatctttgcggtctataaaatagaagaacgccattagagcagggtgaaccatgaagaatgaggccttttaagtctaaaaagagaagtaaacaaacctgggctgctctcataagatcgctagaccagacgtaagaccaaccgtcgatgacactcggagcaaatgcattactcgccaagagactagcctgatggatacctgcctgattgagcggagtgtctttctgtcccttttgtgtaaggttgcatgagtgagtcagtaggagaagggaagcggaaacgtggaaaattaccacttctggtgaaggaacgtacttgaatgattttgttggcgttgtcgtccgtttgtccatgtctgatgagatgaacgatgagatcagccatgttgataacacggcaggggtgtgcttatgtgcgttaatgtggacggttgggcgtgtggtcaggatcggatcagggtttgtggtgtttaagatacagagtacatattacatattacatattacatattacatattacatac

SEQ ID NO: 431 - DNA, 2403 bp, Xanthophyllomyces dendrorhous
catattacatattacatactcaaaatacacagtacacagtgcgaataagcaggaaaaaaaggatccgtgccgaacgaagcgtccaaaggaacagaacgtaattattcatctgtcattgatcgtctacttaattagaacgaccttaatcagaacgacccgaccaagtgaaacaacacggtttcatctgaagcctagttacggatttcccttagtgcgattacaaataagaagtattcagaattcttgagaaagttgagattttcctccgttttgagcctgttcttccctttgtacatcgttctctttgagtatgtgaaggttgttctccattttgctcggtggtaatgaacgatggtacagaatgcctctcggcggaaggctcactcggagaatttggttaaactctacgtcatatctgaaaatcaatttgaatttaggccggctttgcctgcgttctatgtattgccaattgatactttcagcattcggcctgcgacacgtggcgatttccgaaggctgcgaaggctatccggacgaggcgccgaacgggaagaagaaggaaaaaaaaaagagttaaactaattttccattaatgcacagccacgtaaagaaaaatcattaataaccctcgccccttttttcttgaacgctgtcgtcatctgaggacccgcttgtttaccatttccacgtgacatgatcaataacgccgtcggttagcaccagacagcggtgccgaaggcggtcgggcagctggtgctcggatcctccttcgagcgggcgatcttccgtctcttttgtgcctgtccctgggaggttatttttttttgtctgtgccttgtgcctgtttttgccctcgatatactctcttcattcattcatccatccattcgttcatttccttctttatttctcttttctcttcgtcctttctcgttctctctctcgacaaaaactcacccccaacccactcactcactcgctcatacaattggctgtttcgctccgtctctctctctccgttgacatcagattcacgggagagctcatggagtcgtctgtaggaaaacatccggatcacttgcctgattctcattcgtcctgtccttcagaacaccgggtcaggtacgttccatcgaatggtccacctttgacgacaggcaaaattggtgtatgctgacaacgttttcttgttctctttcgccttcttcttccctttccctctctttcttctcctcctcctcttacacttttgttcatctccattctgctctttatgatttcttaatgatggatttactgctctggatggcggatttttttcccttacttttttttttccccttcgctctccccttattctcgttccactaaccgcagagcgagagcgatgctgactcctgaacagtataccgcgttgagtgccctttgggctgaggttcgtatccttctctcttcgcttttttccttcacatttcttacttgtctcttcctttccttctttttgcctttctttctaaagactcaatttccgacgacccatcagcgagtcgaactggcagaacgaatctccatgcggccccggacagtgcaggtgcgttcccccgtgcccttcatctcgttcttttcctcgtcattcacaccatttgaagcatcaaggctgactcatagagtgttttctcccgtatcactcctggccgtttttattaaaatcgtgtccatcatccatcatttccaatctccgtcattaaacacccatctcgactgaaggtctggttccaggtaaacagtctccgtattcactgcccagggcgaataccaagacaagatgctcaacttcctggtcctctttcctttacagaaccaacgtcaaaagacaaaacgtcagtctgtccttcaagcaggaagcgcgtcaaactcggctcatcatatctcgacaaataacgagcaaacattctcgacccatatgacccattcctctcaatcccccatctatggcacatactcgtaccaccattcaattgttgctcctgcagcgcatcatcactcaacctccaccccatcaagtcatcctttctcgtccacatctgtctataatccctctggacataaattctcagctcctgccgagccagccctccctacgcctctgcccccggtgaaaacctctgtaacagcacctcccataactatcgacattatcgttcatcccacagacagaaaaccaccttatttccctcctaccagcattgtctctgagccaggccaccggacctgggatcttgaaaacaggccctcgcatcctttcgacaagcaagttcagtggggctctccaagtaggaagccgtcttggcctgtcgagcatcctattcaccaccccttgccgtcgtcttcattccctttcgg

SEQ ID NO: 432 - DNA, 14776 bp, Xanthophyllomyces dendrorhous
  misc_feature (12763)..(12772): n is a, c, g, or t
cgtacgcagacaatcccttggccactaccatacattcggtagcagcgttggtgattctcttcattcgatcaggcccttgtttagcgaacctctcaggagtcatcagtcacagtcgacccgtagacaggatccggcgttcagctcggccccggctcctttcccgtccattccaaagccttatccaaccatcccaacctctccagtccttacgtctacctctacgtctgggctgatcccggacgttccggctttcgagtcgtcggcaacgactttctcgtcaacaacgacaacgacgacaatggtattgaatgcaaattctatcaaccaaagcccaacgtcaaggaagcttccttcgtttagagaatttctgcagtctaccgtttcgtccgaagctgatcaaccggacccgatccagatgtcattggccgagagtgggaagcataatcctcactcttcctcatcatcgtctgcgtcgttcgcgccaccaatcccggtttcttctcaaatgtatccattctcttctcttgaacgatctttcggatccagatcagagtataatccaaggagctcggcatagatccgctttagctagctctattttcgtctttgacctggaggtagataccggctttccgtcctgtctttcctttgctacctatgtttcttttcgctctttttaggttgttgtttgtgctgtcgttgtgcgtttctctcttctataatacctttgccctctcgtgtcttgtttcccatcatctatcaggtatatgcgtgcgcctcttcctttctgtgccctgcgcgtcttcttctcaaagtatttgatctgtgtatcgctagtgtcttcaatcatcttctttctctcggtcttcgatctctctttatagacttcttctgtgaagcctttcgtgcttccttcctatctctttctttccagtgaacgtatctttcttcgtttatttgttacttctttcatgcaatcctcccacgcactctctctctttctctttgcccccttttgcctatgcgctataatgtgttgtttttgtcccgactcccaaatcacagctcatgatatatcaactggctggttcactgttggaacggaactcgttctcacccttcaatacaaatacaattgtaagccttaggcttggtgggagtgaccgcaaccgatggcagccgatacatggcccttttggatttgggtgtgctttgatcgcacaccactaaaaccccatgtctcatgagtttaatctacccccgccgatgaggcatcgtcagcctcagtgtcaactcgagcgtaagcctcaacctcagcggccagagcagcagcagcggtagtgtcaaataccagcattctcgccccccacgccttgttcctggtggaaggctagatggagaatgttgcgcgatgcattggaatctctgttccaccaagtctgagagcaagcagagagaacggtgagtacttgagacaatacattgagatgtcattttgagagaatatcctgatgtatacaatatacgcgattcactctacagacccctcggcactctttgactgcccacatcttgcctctccccgagagctcgccatggcctaaaaatttattttccgaaggattcttccttatgtatttatcaggatcaacgtagagcagaagataaagatacatcaggacgggcggtgagagtgatcgagagaatgcattgcggatgtttatacataatcgacatggagcgaagaagaagcgaatagacccaaaagaagatgaaaaagaagcaagaagaagagcacacatcgttcatcatggtcgtaatgatagacacgcatgaaatagaattcaaagagagtgttccttaattaacacggaatgaattgcaataagttaatatagaactaagtaacacacaaagtataacggaataaatttgacgtaaaatcggctgatcacccgaagcaaggttttcacagtttcagggctgggttatcagacagtgatagagtttgtcgtccgtccgttaagccttctccggaacagggacaaaaatagaaacagaagagttgctcactcgcgagctgaatggctggatggtaaagatggctagatggctggatagctggatagcaggtcgaacagacacgatagttcggctggattgcctcaaatagacttggccagagagcggccatcatgatctcttcgtacggtctatccttgtcttcgtatcctacatccttccgttttttcttctattgatctctccgctccggttagtccggtcctttttctgttcttgacaaagagacggaacgggaaacatcgagcaatcccagaacagaggcgagacaagaggacttaaccaacaagtggaagagaaacttgaactagggcctatcctcgcagatgtgtcattctcctttccggttcttagtctcgtagtttattcatttattttatagttcaacgtcttgtctcgttgtttctcttcttttttcaaatttccaccaacaactctcaacgacgtgacaagaacaaaagaacagaaggaagatctgaagcatgacacacgagagtgctcaaaaacctagggggtgatgaacgacgtgtaattcatcaaccaaagacaaccaggaaagcagacgttccagacgtctttctttctcgtttgttccatccgtggctatcgatacggtatcccagatgaacgacaaacgatgggcgaaagaaaagggatacagaataatgataatgaaatacccagatgacgacacagaatcccaatagacacccgaaaaaaaacaccacatataaataggatgtgtacgtatatagaagcaaaagaagatagaaaagaaatctcaggccttcttctcctgctttttcttgaactagcttgagaagaaaacaaacataagctagctgaggtattgtatcagtcgagaccggttcacggtttgaatataatatcgacctaaaaaggtaagagagacaaaagcgaacagaatcaattccatcttgttcctccgcttttgagggaaatatgctttgacgaaccaccttcatcagtccacgagacggagtgtcttgggaatctaaactcttggagctgcaagatcgcctgaggggacgagcacttttagtgtttccccaaattgagttgagagcacacaaagaagaggaaacgagtaaacagatcaattctcgtttctttgtcgagatccctttgaaagagaaagaaacaaaaggagagagaatgaaagactcacgttgcgctcggtcaacctgaagtcaggattcacaaatggttttagactgacaatctttgctccttctttcaaatcgagaaagagaagcgaaagtctgtcgttgagaatggatgaaaacgcgtagttgttgcaaacctgaatgcggatagaaagatgtttgagggaatttccaaagaccaagttagtcgaacagacttgccagaagattcgctcttgcctagaaaattgaacgaaccaacaaatcagccctcttcaacacttctcctacttcctttaactcgcagaaatctccatgccagagtttgactcgacccggcttgacaccccacatcccagcccgtcgtttaaattctgcaagctgatcttttgccaacccggccggtccgtccagttgctcgcacccgaatgactcgcatccaacctgaagagcagtctgaaacacacaattacctacccccgagccaagatctacaaacgtcgaccttggtgtaagaccggtctgacgaagcaaataggaaagaaacgtcgagttgagctctccatacgtgtttgacgagaacggcacgtaatcctgtaagaagggtgagtggtcaaggaaacgaacgaaatacgtaagagagggatctttaaacgacaatttagtctatctttttgggccacaacgtaccttgagcttttccatccgcggcccaacgactcgctggtagccctgttcacatatcattccccaaacatcaccgtttaaccctctcattccttcgatcgcttttccgatctctcccttctgtctgagatatcggatcaggttgttgtattgctcaactgcctggagaaacataggtaaggaaagcacgttgggcgcaattgaccgggtaatcgctcgaatgatttggctaggtgtcgggtgagccgccggaagaggagacgagcctgtggaatttgggttgaaaggagaagacaccgcaggcgttgtcgggttggatggaaccagagaacgcggaagtgggagaggtgtgttgagtgaaatgggttctgttgttgaaggtgatcctagcggagcaaggggaagggaggcagtgagcggtggcgacgatggtgtaggttccgatccgagaggagaagcaaaatcttgagttgaacaaaagaggcgttggaaaaaatgaaaggatcaaggatataagcgtcaatgaatcgttatgggaccagaaagaaccaacactcacgttccagcacgatctttatcacgcgacatatttccggaacaggatgatattctcctacggccgacttgggttgtaatagaagaaacctttcggatgctccagacgggtagtctatcttcaccgatacggcttctttacgtttctctgtcgagttgaagacttgtagtaaaaatggcctcgacacgaagagtagaagatggatggtagaagggaagaagaagaccactttgcaatcagcgcctgtttcaaagcgacatctcacagacggaagaatcgctcacaaggtacatagccaatcctctctaactccatcatgtcggctgaatgaatgaacccgtcccaactcttccagctcttcttctctggctttgctaccacagacctgtccacaatatactctccgatcggcccagacgcgtcgagcggtgtgcccgatctagctctatcatcgaaaagggtcgacggatcgattccatcctctgactctgacgataaagatgacgaagactctggatctgacgatgaggaagaagtagaagaagaacggcgccggctggacgagcttgggcgattcggttttggccgcttggctgaggatggagttaaagtggaggtcgaggcagaggaagaggcgctgtggctattagacgtgctcgtcgagacctgctttcgctttcgatgtggagatgtcacagacaacttgctattctgagatttggaagacgaagaggatgctattcttttcggaagaggtactggatttggtttgctcacagtgaccgtgctgagcgaaacggacgaaggcaagagtcgaggaaggtaaggaccaagagagctcggagagaaaggactcggaaagaaaatacgatttctacatactgggttacctttttgatagtcacacccgacggctgcctctgcctttgtacggtggattggcctggctttctattgaagaagtccatcgagtcgaaggtgacgacggtgttggttgtagatgatggtcgagagggacgggattgaggacgagagaagaatcgaacggacgaatacaaatagagaaaacgcgactacaactttcggacaaattccctaatatagtctcagccacactaccaccattaccaccatcgtcaatcccgacgacagagagtagcaaccgagcaggatgtgtggaatcgtgtgcagcatcgttcataaagaccatcagcccaagccaatacatggtctcattcaggccagcatgcgtcgaggtttgtcaccgtgtgcaaccatgtttctgccagtccttgtcctcgctcacgtttgcgcttttgatccttctttaggctccgatcatagttccctatacaaaacggatacttctgacaccaacctctccttcttctcttccgtccttcatctaagaggtccatccttggtcccacaaccagttgtgtccgctgaaggagacgtcttgtgttataatggtcagatttttgagggtctacccatagaccctcaactaaccagcgataccaaggttatctggaatttgttgacagagcaggtatctcagtatggagagcaaggcattagagatgcgttggcgagactagaaggcccgtaagtgggatttctgatcttctcttcgacttccttctcaccaactggatattgccttacatctgacctgttccagttgaatgctcgtctatgcacgtacctttgcttagaacagatacgccattgtctattatcaagtgcgctctctattcttcctcttgttttcacaccaatctccttaagtgaatattacctaagctctccgttgcttctgtcctcgacaggctgcgactcaaactctatactacgctcgagaccctttaggccgccggtcacttctcgtctcaactccttcaggagagagatcccagttcgtcttagccagtgtcggcgagacgctagggaacggagaatgggcctgggaggaagttggatgcgagagtctttggaaggtctcattgtcagacacagttagcgcgttctcttatgtttttctgcgtttggtccgaacaaggtatctgatggcgaatatcaacaatgcgcagaatgtagataacctttatacccctcaaaccgtagagagagttagtcgtctttattcttacactattaaatcggtctattaagcgattgactggtttttgcattgtgtatgaacagttcatcagcttggatccggtgaactctaccattcctccagcatccttcacagtcccccttctggattcaaaactatttcctgctgagaacgatgcgctcaacgaagccgctgatcggctcatcatcgaactagacgagagcgtcaagagaagggtcgaaaacattccagcacttgaagccagcaactggtccgtaactatgtttcttttcttcgtgtataaatgtgtctcaactttgcgagtgatgacttttttcgctgtcaaatgcatattctcaatacagcgagcatcctcctgcccgacttgccatcttgttctctggtggcttagactgtactgtcatagcgctgctagcagaccggtatatatctctttcactccatatatgcagtcgtccttcaatctctgattgttctatattttgaacacatgatcgctcaatagatatattcctacgaatgaacctatcgatctgctcaatgtggggtttgaaaatcctcgatcgctcgccaaccagctcaaagcctcgaccggtcccaagaaggtcaaaattaaaggaaaggggaaacaagacgaggccacactaagaaacggatcaccggaggagtgcatcggtcgggtcgaaccataccaggcaccgcgttcggtggacagcgacgaggagaggaggacaaaagtctatggagtgccggaccgaaagactggatgggacactttagccgaactgtgagctggttctcatgtaactttcctatccgccaacatatggatcgtgtacaatcggtaaaagctctcaaaattctgacagatcatgttgtcttgttcttttcttctttttctcgttcttttgggttacagtcgggaattgagaccgactcggacctggaactttgtagagattgatgttccgtacgaggtgtggcttcgtcaattaaatctctgttttcaaaaacgtatttcgcaaccggagttaatgcgtactccacgtattcttgactttttggacgatcgtttcataggaatgtacccgtctaacacctgtggtacgcggcttgatgtacccctcggaaacaatcatggacttggtcagtcaatcttgctctcagatatcctgccttcttgctttcatctgcacacatacagtgacgactgatggtccattcgaatcatgttctgaacgaaaaagagtctcgcgctagccctgtatttcgcctcaagaggtgaaggaacggtcgtcgactctacgacccggaagagatctccttatattagtcaggcaaaagtacttcttagcgggctgggagcggacgagttgagttttttttttccgccttttcattggacagacagaggattgtcatgttaatctgggagtgatggttgcgatcatcattgatagacaactcggaggatatggccgtcatcgaagagcgtacgaacttggcggatggtctggactgatcgatgaggtccgtctgcccagctcatcctcaccattcttccttgttcttctgccgaacctaacacctcatgccatgccttgtacgtttgcctcctttcactcaagatccaaatggacatcactcggcttcctactcggaatcttggccgggacgatcgagtgatctcgacccattcaaaagaagccagatttccctacctctctctttcctttatccgatacctctctaggatccctatccagacgaaatgtgacttccggtatgccgagcctcggaaggattcagatgaagccattggagacaagattttgttgcgtctcgcggctgacagattggggctcaagaggacgaggggaaagaagaagagagctatgcaatttggaagtagaagtgcaaagatggatgggcaggatgaagcccaaggaggaagtgggggagggatgagaagaagaggaatgggagcggaaaagttgggcgccgcggaggcgaaagaacgtatcagtctgcgagtggaggaagaagatttatgatttcgtccttacctctttgcttagcaaggttaataaattgtcgatctttctatcaaaatgcaaaaaagtgatgtgcttgaaagctttgcttgtgctaacagagagaacagaggtactcaaggctgaaggaacaacaagcaagagcggaagagagtgaacaaaagtataatatctcatgattaatccgaatcgtagttgaccctgagtccgttctcctccgcctcttcctctcgtctggcggcttccctttcttccctcgagtactgcgagaagtccaccgccacggcgtcctcgtctcctccgagcttctcgtccgagttgaaaagagttttgtccttctggaaaagctgcttgcctatgatcgtatgttaagatggaagccataagagaaacgacgaaagaagaagaaaagttagctaaactggttgaaggaggcgaggctcaaaaggaagaaagaaagaagggtgagaaagaaagaaactaaccagagagtttggcctttgccctcttgacctcttctctctctttcggtggcaatgccttcagccgttcatcctcctccctatctcttcgggctttttgttctgacaagaatgtcttcttccagttgaggaaagattctgaggtcactgccgttcctcttagccgagcagcttgagcctatatgatgttgtttcccgcaacacataacatgatcaataccgaaaaaagacaacattggaagaaaggctatcagcaggatgcgccgaagctagggagagaagagatataaacccggtcaactggagaaaaatatcaaacgaacctcctcgagctgccgatgtttctcgtcctcagcctgctgcttcaacaccactcgtctagccaccaaagaagacatggtctctctgagatgagaagctaacgtgaataccatggccattcctatactttcctctccctatgacaaagaatcggtaattgaaaaacgaagtcgcaaagagatccatcaggttggttgtgattagcgaggccatgccatgatgcgaagaggacggcaaggacaggtataggcaagacatcaaaagcgagatagaattgagaggataagcacaaggacatacaacaactttcaagtcttctaacagccactccctctctgaatcttcgagttcgccgtctagcacgtccaacgacatgtccggtaacacatctggataatcaggaggatacttgacagtaaacttgagggacactatgatcggtccgatgtgagcatgtttttcattgacgcgcaacacgagtttcgagaccgtttcggatcaggacgttaagatacaacacacgagagtcaagcttcgagttcaggcaaagagttgatgagagaagactgacgaggttcagtcgtcaccgggacttccgggtcaatctgaaggcacagatgtgttggtgagatttctagcaggatcaacacaagtttgttttcatacataaccacacaagagttcagaaaagtgagccgtccagtcaactatcgtctgaagtatttaaagacagctcgaagcctatataataaagacatctggactagaaactgaaggactcactctctagctcatcagggtatatcgactcaaggacctggatcaattcaagtcgtatagatcagaggcagatatcaaactagtcaacactccgcttcttggatgacggcataatcgatacacctaataaatgacgacgggtttgaggtaacggaaagaagattcgaaagaaggaagcgaacctcaagctcctctgccaaagtttcttcgtaacctatccaattcaaacagattttgaagaacagtatcagagctgagaacgactgtgttccaatcaaaagattagaacggcagaatactctgaagaatactcactggccatgtctaatgatgttgctgctgatggtgaaagacgctcaaacatacaagaagattccctccgtctgagttactacgacagagccgtcgatgatgatggttacgataaccttgttgtgactttgctacgataagattaggcgattgctgccttgctttcgctcttgctcttgcttattctccttctttctgtttctcttctctggtctggcctctgcctttgatttgccgtttccaacaagtagcaagaagtcatacaatcaagtttgaaagatctaacgatgtcctgttttgggtgccagttggcatcatgagaagtactggacttcaagcccgatccctcggacgggccgcagactggatctaaaatcggacgagacgcctacagagaacaacaggttggagacccgagacatatacaacagagaaacgtcctgtaatcgtttaatatggtcaaaatatcggtcgttcagtatcggttgtagatgggtatatagatagatagaaagaaagataaaaacataccccagtagtcgaggctctcatcttcaagactgccgattctttctctcgttctctctcgagcccaatcccgtcttccagtttgatgttcccagcctcaacgtcagcgtcctccgttcgtttctttagtttccattcgccaccgactgtccagtcactttcgtaactgtagatgttgaaatcaaaccgggaggacactgcaagatcccgaccgatcttggacgacattgaggtagacgaatgaccgatgagcggattgagaatcatcgtgagtgtcattggtggttgcaggaatggagtgggtgcggtgatggcatcaacagttaacccagaggattgagtaccgggaaggaacggaggaggaaggagtacatctgggatggtacaaaacctgcctgcgagagagactagagatgaaacataaaccggtgggggaacatatgagaaaatcaagaactaagcagcacgcgcaacaaggccgtctacttacttcctccgcttttctgtttcatcgataggtagacttcccctccgacggagaaccgacctcgcaatcctgggaagagcgcttcttcctcgtccactctgttcttccccacctcgctgtgaacgtcttctgtggtccatgaggagctagccggactactgggctggaagttgtatagacttcggagaccaaatagaccatcatgggcagagtaagaatactcggtcgatgtgtggccttgattgtgttgaatagaaaagagaaggctggatttgacggcgggcgtcggggaagaaggcgtgggcccaggtccgggggaggatgaagaagaaaatgagtttggtgcggaagatggggtgggaacgtgaacgaatgctacaagggattgctgttggatggacgcgtcagcggaaagggatcaagccgaaagatcagtcggtgtctatcgatgttggataagcgagtgatataagaaaagtcccaagcaagatacaagactaactgtggatctggagagcctgcttgtataaagaccgtccactcgccaagatggaaagttacatcgtccaaacatcagatagtctgtgaacgagcaagcggacaggatcagttagatctgacgtttgacgatgatcaccagagagagacaaccaagactgacctctgacatctactctccgtccgccttgccagatttcatctatctcgggtctcttgggcatgtcccatactttgaatccgtctgcgagtttgctcaggtcgactttctctgacgagccgagggcgagatctctggaggtcgcaaagtaggccagtgagcccacgagcgtgggcagagcgacggcttccaacgagttataaaatccggggacgggcgcatggctgtaggtaaagtgaaaagaggtggggattgagaaatcaaggatcgctttgcttgaccgagaaggaaagaataaagacggaaggatattaggtatgattcgttcgatgtctgatggaaccactacgtgccataagagaggacggtacctgtacttgaccgcgtgagatttgagaacagggcgtcctggtcccaacctgtgacatcaaagtatcttctgaggaggtatgtctggaacgggagcatcgctatgagctgtgatgagtgtgtgtgtgtgtgtgnnnnnnnnnngtgtgtgtgtgttgtatgctatgtgtatgctgtatgctatctgtgtgttccgtccgtgagagagcgagtagtttgtccgtccgggtagaaggagaagagcgagatcacggttacgggtggttactgttcaatgacgtaagcagaagtcatgtagccatcaaactcgccctgacttacgtaattacgaaggtgcctgaagccacctgtaaccaccacccgtgccatctgtctccctctcatcccatctcaagctcatcccgctcgtcccaccacacacgacagcatacatagcatacagcatacagcacccagcacacactcatggccttcctggcaggtatccaagcaggtgcaaacctcaaaaagacagtcacagtagataaatccgggcctgccctttccggtcggatcttggacggaccggccggttcatcctccacagccactccgcccgcacccagacgaccagcagctgggaacggcgacaacgacgatgacgacgcgtcaagcaaaccacctcagctcggaggtctgtttgctggaggtatgcccacgttgaagaagcgaggaggtggtggaggtggaggcccagctccaagtccagctccagctcttcctcctcccagagcacctcctgttcctcccgctcaggcaccgtcagccccgtaagtgtcttctcgatcccaatcctttctgattcctcctgtgaaaaagtacagttctagaaggcaacccaagcttcccatggtcagacgagactgacgatgttttttgaacgacccatttattcaatctcgacccgtctctctcacagctcccggccgtacgtgatgacttctctcggctcactctcttttctcgaccatatatctttttctttactgatgtcttcttaaacatccttgctccggcgaacagaccgcctccaccagcgcgaccaccccctcctccagctagaggcgctccgtgagtacagcaaaatgtgtgcttgttctctgcctatgctatgctaagatcagctcttggtgttcggtttcctcctagcgcgcctcctcctccaccgcctcctcctatggccacacgaccgtctgccccaagcctggttccagccgtttctacagctcctcagctaccggacggtagacccaacctcggaggtctttttgctggtggtgttcctaaactgaaaccttctggtggagatggatcagaatctcccccatctcctccggctcgcgttgccgcgcctccaattagaaaacctgtaccggctgtcgctgtaccctctgctccttctttgcctcctagtcgacccatgcctccaactcagccaacagaaacaagctcagctcttccagatggaaggcccaaccttggtggcttgtttgctgctggtgtacccaagctaaaatcaacgggaggaggttctgactcccccgttcaaccctctcccaaagcttacgtgctgccttcaagaactcctattcctacagctccgagcagacctcctcctcctccttctgcggctccaagtcggccccctccccctcccatggctcccagcagacctccgcctcctccctcggttcctactggagggtcgactcttccagacggtagacccaatcttggtgggctattcgcggccggcgtaccatcattgaagtccaccggaggaggtggtagagaaagtaacgaatcagacgagccttcccctagaggcgttggtggtggtgggtcaacccttccggagggccggccgaatttaggaggcctgtttgctgctggtgtcccgaagttgaaatcttcagccggagctgaaagtaaagtgacacgcgaggatgacgcgccagcttccaaactaggcggtctgttcgcaggaggaatgccaacattgaagaaatcggatacctcggccaacagagacgttcctccttttcctccagtcagacctgctccttcctcagcagtacctccacctccgcctcagatggctcctccccc

SEQ ID NO: 433 - DNA, 892 bp, Xanthophyllomyces dendrorhous
cccccaccctctgcacctcctggtcgaggaatgtatgtcattgatctctcttctaactcgtattatctaagcacagtgagactcaggctgttcttcttctgtcctcatctcttctaggcctcctctgcctcccgcaatgcccagtcgtcagggtccaccgcctcctgctcggcctggaagtggttcaccagcgatgccgccacctccgccacctcgaccttcctcagggtatgagaatttatccttttctccggttcttcaagctacatgttgagacaggataccgaactggtcgttctaactataaacttctgtttctttaaaactcgatacaaagagcaccacctgctttaccaagtagaggcgcatcaccggcgttgcccgtccgatcaggaggagcgcccagcttaccagccagaaatgcaagcgactcgggctcacttctgaggacggcaacggcccaatctggtgagcttctatgtcacgttccgcttccttgttggttgcttgttaatctgatgtcgtctcctttgatagttcctccgcctcctccggctcctccttcgctaccctcccgggctcctactgtttcacagaggaatcagataccacctgcgcccacatcccgaacttctcacgcacctccacctccccctcctccgccagttcgacctgcatccttcgctccggcacttcccgtagataactcgagtttttatgaagaggatcatgcaacaccggccacgcctcctcctttacctggaggtagacatcgggcaaccagctcggtcggatctgccgtaggtgttttcgcttctgcaggctttctgaagaaatgttactgatctgataatctatcgaaaccctggttgcgtacccacagagatttgcc

SEQ ID NO: 434 - DNA, 20057 bp, Xanthophyllomyces dendrorhous
ctcctccccctgctcctccttcggctccggctaggcagattcctacagcagccgcgcctatcactcctcttgcgcctcccattcagaactctaatcattcttcccataaacctacgtcctcagtagctagaccggcttcaccccctgctcaggccggtcacctcagattccctacctcgatggttttcccaccgcctaggccattcgagaaaggaagaacttatgagtacggaagtatgaacaaaaaagggccaggtcttggcttcaacctgcagggcatcctctgaggagatgatgactctgtgttctggtttcttattctcctcctctccctctttctctttctctttctcgctgcaaacccgccggtccactttggaccaaggtttctttttcttctccttcctgcccttcctctacattcgcttcctcatttgcttttatttatttattcacatcttgatctatcaatgtacgtgcgcgtgttcgtgcaatcaggcatcagttctcatcgtcagaaatgttggttcaagcttcatactctaagactcactcttcatcaaacaagcttccggtgcaaggtcactgaatggccgacaaagggcaagagaatcaagacaaagaaagagggacaaaagaaaaggggaaggaagaggaaaaggaaaacaagaacaacacgatacatgaatagcacacggaaagagacgatagagaaaataataatttaatgaaggatacaacgtttataatcaaccctctgtcatacacgatggcacggcaatacacaaagacgaagacaaatcatgtcgtcagacagacaaacatcagtaaacaaagaaagggaagggcgccaagaaagaagcgtcacgaagggctaatccgatatttaaatttgggtagttagaggtaccgtagcgcttagttgttccttgatcacttccaatctctatcatattcggaggcagaacaagagaaaaggaacggtctgagtttttttcccgttcgataacttgagaagaaagaacaatgaataaagggcgaaccgatctccagttatcaacgtccttgaggttctctctgatactctggatctcaacctctagactctgctgttcttcctcggttccgatcttgctcagttcccagggaggatgtccgtcgactgtgccggcagaacctgtcagtcggaggaggatctgatgatatttcattaatgagggtcgatgactggccggttcccagagcgcgaaatatcataaacgtttgttccccaggaacaaatttgttcgagtgaccagattgacgagccaatgaatggagaatgaaaagccgtgtgttaagagtcaccgagcggaaaaggaagacagaaagatcagagaatgcaacacgggtcttggagcgcagaaaagggaaacctcctcacgagatggttatcagtgtgattcccatatcttttgcatgttggctgtttaaaaaaaagggaatcggtcagtagacgctctatcctgagaagacagagacaagaacaaaaggacgttttttcatctactgttttatgagaattcggagacttactacatcaacccttccacatcagtcgacacggcggaggagcagtcatctagcacgacctgaaagaagagatagtaataatctttagagcatattcaatactacacccaaccgcaatgaattctactcacaaaagaaggtttgtgataacttcatcgtagcgaatcagatattgaaagctcatcgttagctcttcccaaggaagagagaatcaggtacatagattaccacaaagagcatatgaacttacaagactctagcaaaaccaacacgttgcttttctcctccagataatacatccttccattcctttctcgtctcccagcctccttctctggccggaatgtatgccagatggacagcctcgagaatactctgcagaccaacaacaatcaaaccgtaaaactaatttttaatgttgtatcaaaatgtgcatgatagaagctaactcaccattagctccgcgtcagttcctatgaattcattgtcggatgaacgcaacccaatttgttcatcaatcttaatcaaaaaaacatttgaagagacagaactcacgaccggccgctttcatatctgcgtatgaatctggatagatgatctatcgttttcatatgagaatcggacctattagcggatgtatggcagtagaaagattcatctatcagagcgcacctgatctcgaagtgagccaaggcttagatatggtctattttacaaagtttagatcagaaaaagacaccgcacaaacgaaggggagggaaaatgaagagcttacttttgcggaacaaagaaaatatcctcctttgaaggtcgaacgagattgccagaccaaactggccaaatctttccgataaccctagcgatggatgacttgcctactccattagctatcatttaccaaattggagaggttcaagggtgatgagcagacagttctatatgatatatgaagcgcgatatctgaacaatagacacaagaaaacacttacgaccaactatcaataagtggtttcctcgctgcaagtacaaaggtagagtcttatcattagacacactagaaaccgtacttgaacatatatgagagaaagaaaaatgacaagttggtcttggacaaacctctactctcaaattcaaacttttcaccaattcttcacctcctcttttagctccctcagctcctccagcaggtgctactattggcacgtccatcagctccaccctattcacaccttcttgtaccgtccccgatacgctagctagatcgtaaaatggttcgccatctgccaaaactgaaggcctaggattcacagggtaatcttcattattgagcgcatgcaaagcttgaagcgccaatcaagacaacacccgaatacatcaattcggaggccagccatgatgattaataggatagaactgaatgattacacgaacaggaaatcagagtatacactcgattggtgtaccctgagagttgagcaatatccttataactcaacattaatctattttcaagtgaaagagcacgtcgatcaggttcaagcatggtcaagctaggctattcagaacgcaagctggaacaccaaccttccacccgcatctgctagtgcaattaatagccttcggttcgagatatatccttagtgttggaatacaagtatttaagtcagccatgttttatatgagtcgatagcgcggagcatgttaatttgcgtgaagcgccgaatgaacaacaaagacttaccctctgttctactagccacttgctcattttcctcgtttccctcggttgcgtccttcgccgatcccagagatttcgtacccaaaaagattggaattgacatcaagctgtatccggctacattgtgattatgtcgatgaagcaattgtcaatatacgagaccccatcttagaacgagcgaagtatcatatcttaccagcactgcaaataggagattgtatgccgatcgtcagtctcccatttatcaatcaacaagtatgaaaaatacgacagcaatcaactgacctccacagatacttgatcacactagagataccacccatcgaatacgattagatgataaatataggtttatcggtcagtggattacactcgcttccttactctaaaatcgaacagaatcaacatacaaatcctcggtcatcccatacgcaattcgaatcttgaatatattgttgcagtgtttcatcaacttcagataggccttccacaaaattgcatgctccgtacgaccaccttggtagaaactgccttgcatgattgttagaaatatttctgttggttagttggatctcccgatttcaggaaagaaaatagacgtacgcaatttcttcggcttctctgccgattctgcctactccctgtcgatattcaccttcgagtcttgcctgaatcgcagctagcttcccaaacgctggactcacgcttcggaggatccaagcagtaaatccgtaatttctgtcgatattaaatgataccaatgacatagaattcagaaacaaagagtcagtacaacgattgataactcatcgaccttacaaaaggagggtatttgatgaaggaacatacgcaaacaaaccgatcgttccgtatagacccagagacgatgacagttgagccgtaaagataatcagatcgagcatctatgcatcgatcgagtatatcagcttacatattggtcattgtatccagctctccaagagacatcaggaaaggaaggaagggggagaggaacgaaccggcttgcaaacgtttccatataaagctgctagtgtgtcacaaaacatagccacgtctgttgtgataaattgatctgctccacctccgctctcggcgcctccctcttcaagaggctttcttttccggcctaagagtgttctcccttcattgatattggtgttgatagaggaatccataccgggtggtacacctaaacccatacaaaatttataatagttttgtttgtcgttcagatagagatcgtggacgtatcgggtgagccttgttcgaaatgccaaggccaatttgctttgtaggtagtgaatctgaagaacaacaaccaaaatgaagattttctccattagaaaaggttatgaacttctggacaaaaggaaaggactgaccatggcgtttgtatctaaacatggtattcagcaatcacctcgaattccttagcaatacatccgtttattagccggggatgcaagaagagagaacaaggacaaacaagtactaggcagagccaacgcaaaccacaacatgatacctttcaaaaaaccttctttgtcggcgctgattaaatctctaacaatccttccatccagtctggccccaacaacactcaacaatgttctttgaattaagaaccaagagtgaagaatcaacatgaaagtttctctgcatcgaaatctaaaagaaagaagagtgttaagacgtcttattcgttagtcaagcgggaacattgattagatcttgagggaagaatgaacgcaccgagggagcaggatcatcatcaccgctcgtagttgtttaaggaatgatgcattgacgccaagtttagtattgggtggtagcggcttgaaatatttgacgtgagctgaaaacgttttctcagaaattggcctgatcacaactttggagacgcgacctttgaaagggagcagaagcgttcgggaccgtccgtcggtcgatcgaatgaactaaacatacaggaaggatgataagtcaatgtactttggtcagtcgacatatcaacagagacaggttggactcacaaggtctgcactctccttctcaaatctttggtacgcaagcaaacgttcattatcaaatttgattagaaagcaagcgagcaaaggtaagcagatgatcgaagtgtattcaatcgagcaatgaagcgagactcaggattgagaggacgtatacgtactgaggtgttgttagcggtgtcagggcttccagacgctttctttccttacgcttctcgtctgattctgtccatggactcttgaaagcggctgaccgggccaagatcaaggatatcaagagagaaaggtagactctccttcggacgggagacgattggagaacaagagcatgttgaagtatgaacgaagggatatgtttgccagccagtttggacagtaccgcaccagacatgggtgtaaatgatgttttgtggtcctacactcgatagcagctgcggttgtgaagatgatggatgctgatgaaggcgatgctgatgaacagaaacaatctggaggagagagtgaagtggaattacctgctctctcacgttcttgccggctatgaccggacgtaattaggccggatgtatttgaatgtgtataaggtcgcctatacagctaagggtgtatgcttacctaatcattcattccccccgttgtttgtctacctgtctcgtttgtgttcctctccttcagcttcgaccactccttccatcccagccatcccttctccatctctctctcttaaaaacatttcttgaccctcctcaactcattcgtaaacatggcagacacagccgtccaccagcccactttaggatcttacgtcgggtttgacagtcagtcgctcgccatcattcgagatcctgtaccttgcttcgttgcttcgaacaggatagtgcgctgatggcctccgccctttattcctctcattacttcattcctctctttgctctcatcgttcaaccaaacaggcatcacccaacagatcgaacacaagcttctcaagcgaggctttcagtttaatgtcatggttgtcggtacgtcgcatttcatctttcgaagatcacgctgcagaagtcaaactatttcagatgaacaaggaaccgctgagctcactgatcgtggtctatgcgcatatacccgtccttaatctcaggacaaactggactgggaaagtctactctggtcaacaccctctttgcttcacacctcgttgactccaagggtcggattgagtcggacgctccgatcagacagacaacagagatccttgctgacagtcatcgtgagttaatcgcttgtttcagccagagtggatagttggaaccgatcagggccgagaggcacactatcctgcttgtgagattctcacaacttacttgagatttcttcttgacagtcatctcggagaatggcgttcgtctcagacttaacattgttgacacccctgggtttggagatcaaatcaacaatgatgcttggtaagtctattgttctgcgtttctgtttcggccatatgctgacttggttttgttgctcgtgctgctccaaaagctgggaccctatagtcaaatacgtatgtctgtcttctcttgcgcttcttcacggaaatcacatgtcttcaacccctcactatgtaactttcttcgcgtccggaatagatcaaagatcagcactcggcctaccttcgcaaggaacttactgctatgcgagaaaagttcattccggacactagaattcactgctgcttgtactttatcaacccgacaggtcacggcctcaagcctgtacgtccaaatgcatcgttcccctgtatcagacgatttctttgtacagacaattaatcgagtgcatgtatgcaacctaatcttgttttctttatctagatcgacaccattgtgatgaagaagctttcagaggttgtgaatgtggttccggtcattgcaaaatcggacactttgactctggaggagagggatgatttcaagtcgagagtacgtagccgacagatgcgcgatgctcttaatcatgaacacgaatgaggaaaaaaactgacaggaaactctcatcacttcatcaaacctcactttagattcgggcagaacttcaatacaacaacattcggctatatccttttgatacggacgagcacgatgacgaggagcaggtcttgaacgctcgaatccgagtgagtattttctcgattgattttatacatatcttctcttgataggatttctgggttcctgacaccgccataaacactgcaggatatgatcccttttgctgtagttggttcccagaaaaacgtgaacattgatggtaaacttgttcgagggcgacaaaaccggtatggggttatcaatgtggaggacgagaggcattgcgagtttgtgtacctgcgcaacttcttgacaaggtacgtagcttaaaaaagaaaaaaaaagaaaaaactaatcgactgagactctgtcttgcttgatgctcactagacgatatttggtctctttcttctaggacccacttgcaagacctgattgaatcaaccgcacacactcattacgaggcgttccgttcaaagcaggtcagtcctctgttcctgttgtctatatttgaatctctacatgtttgttccttagcgttaaccacgatctgtcttgattgtcatattggcattctgtcttgtcgacttaacagctccttgctttaaaagagggatctaaggctcaccaacctgcttctcaataaactctatgtcatgactggcttcttgtttccctcgggttgattcgaattgctttctgtttcacttgttcttccagatctcctgcttctatcagttttccaaaatatagctctcatttttctaccctcttgatctttccccgtatttttctctccaacgacctctgtccaatttctccttattttctttgtcttcctcctttacggactctagtctaccatgtcctcactcatataccttccggatctttttgcagaccaattttaatctgccactagtttccattcatactctgaacgatgtagaaagattgaatacgttcggatttgaaagtggtcactcaagactgccggtaactcacccgactaaccaaactcaaaaaagggatgtcaacacttcacttcgacttcgtacgcttaatccttattcacggttaatctatcctctttaatcctcatgccgaagattgtcaagaaaaggaaagcccccatcacggcggccattacggcttccagtactgctttgcccgcaagaaacactccggctgggtcttcagcacatgctactcgaacgctcagttcgtttactttcctctcgcgacctacggtcgtatctcgtgattctcgaaacaaacttgacatcctccaagaaggaagacctctagcttacgagtcctttgtttatcttcctctctctgttttcatcctgatgttcattagttcgaaagttccatgtccttctcaaacgacaagctcagctcaacctcaaggttgcctcctcccaaactgcttccagttcgacgggcgtattgaaaggaaaaggtcgagaatctgatggtataggtgctttaagaagtgagctgaaggaaattgagcaagagatggaggacttaggaggactagaatggtaccaacgaggtatattcttgatcgttgaatagtcgtgaccttcgcctttctcgtcgtactaacatgctggactttctacctaccctgatgggacgaatcatcgtgagcgaaattaagcatctgccttgggtcaaagtaaagagcgcggaggagattcatcgcatgtgcttgttgggtggttgaaggagttgaaagcaaatgaaggatattcaaaatcgaaaccctttcggttcgtctgtctatctttatctctctctctatttcttctgtcatcacctttcgcatcgttgcctgagcccccttctttgtttcttctcgattccgtaaatgttgatatactgaatttgtcgacaaccttgtttaaaccaattctttgtagtgtactcgagattggcgctttagagcctgataattttggacctcatccatggatacacaatacgcctttagatcttcactctcgacatccggcgatcgaacaacaagacttcatggaccgaccggcgcctacgaacccggacggcttgttcgatgttgtctcgtgctcgcttgtgttaaactttgtgcctgaaccaaaaggtcgaggtgagtataatctttgtcgtgttctttccctctctctctctctcgcacatctttctgttctcgtcgtttgtacacattcgagagagcggactcgatggactaaacacgacctaaaatttggggaactttccggggtttatctatacaggaaacatgctcctacacactcgatccttcctccacccaccatcaccgtcttcacctgcgtcctacctattccttgttctgcctgccccctgcgtcttcaacagtcggtacatgacgtcttcccatttgattggcctgatgaaatctataggatacgaccttgtgagagaacgggcgaagaacgagaagggtgtggggtattggctttggaagactggggcggctgatggaggggtcggtggttgggagaaaaagacgttgcttgcaggagacaagggcgggagaaacaactttagtgtgttgctatagtaagagaaaagaaggaaggttcaaactagggcaactgagcgtcagagatccgtcacgtcaaacttagatgggaatgcctgatagatgtcgcttcctttgaaaactcgagctaccatgtttcgtttaggcatctctatctctttacaatttaagagccaacaagatataaaaacaaaagctgtctgtacacatcgcgtcgcatcctctgttcatttcccgaatcgttgctcgaccccatcccatgctctgagcgcctgcgcccagtcttccggtccgagcggccgaatcgatcgtgttccaaagaacgaaagctttgaggaagctaaggagctaaatattgagctgtatgatgtttgacttttcaatttgttttcgtgattcatcgtgccgatggatagcaagacagagggcgcacagagttgtcagaatgggttagaagaagaagaagaagaagaagaagaggaagaaggataacatgaagcgcagatgagagagaagaggagaaagagtggacatactagatctcggtcactcgaagcccccagggtgggtagtcccagagccgcaacccgtcaatctcaccccacgaaggagatatcgaaagcgccaatcgagcccataaggaaggagtcgacagtcggtggatcaacaaaaggtcgggcgaaggtgacgtttgaaatggaagtttctctgtgaaaggaagagaaaaccggagaaagacaggccaatgcttccgtcagcttttccttcggtcggtgttggaggactcttatgattggaaaaacacaattggaaggaacaagcaaagaaaaagaagatcagaactgaccatgaatcaaccggtcgagttgtttgacgtcgagcggttgccttcttttgggatttcttgccaaatctcgagagatttgcaccaagacatcatacgacgtctcggccgtcatcaagaccagactgatagtctttttcgacgattgtctgctaactgatactgaatacaagggaacttgcatcttgagcatgccgttcgaccagagcacatccttggtcgagggaggggatagtagcgaagacaccgaggacgacagagacggcggagacgacgacgacgatggcggtggagaaagaaacgatgagtgcgagaaggaagaggataacgaagatgacgatgacgaaggcgagagcgccgaagtggtagaaaaaggctcttgggtgtgaactgagttgggtgagagtggtggtgactgagttgcttgcggcgatgttggtgctagacacgacaatgtacgactgagaaaagccgccatagaggggaggcaaggatttgctaagaattgtgataccagcagaccaaggatgagttcgagtccaacacgacccgaaaaaatcagaggagaaggacaaatgagtgaaagaagacggagaaagaaacagagaagaccgactgacgacctggttcaaacacactacattcctcgacaccttcttctgccgcccaggttaacagccttcgtatactctccagcataacttcctcgagttttaaatcggcttgatgtgttccgctcctcggcgggacgagtatgagcgagacatgtctcggcggaggcttcctctgagcagaagaggaggagagaccggtaacacttgcccggggtcgggaaaaaagcttgctggccgaggagaggacgaacgaaacgaaggtaaacaggacatgcaagacgtgcaggacgattaagatggatacttggaccagatgaagggcggccatgttatcttctgttgtctgttctttccttgttctctgtgttgagcgagggattgatgcaagaggtgtgatcgtttgagttctgaactggatgaactttctacccgggcggtgacgacaacaaacagcagggagaaaaagactaggaaagtcttctaatgggcaactacaaaaccgagagatttcaatagggaagttttcgtgttagggttgcgtagactaagggtgaatggtgacgtgtcagtctcttgtgggagttttgatgctggcaagtaagaagaaatcggtctgagactttgaggatgctgatcgatcagagacagatagacaaggagcgacatcgagagtccctcagagggtgggtctagtggaacacgagccagagaatgccgttggaaagtgtgcatagggtaggatactgattgatatatatgagaagagaagcaagataggattgtagacacagatattgttgtgtccctaggccagcagcccaagacgaaggaaaggagagaaacgaacaggaagagagagactgaacgaacgaatgaaagagactaagcaacggagggtagggcaaactaaagacgagagaagaaagatgaaacggaaaaaggctcgaaaagaatgaaacgttatacataaaactctttctaccatgaaacccctctcgtcttgaaaatattaagcttcctctttgacctctctccttgtcctacggaatctcatccacctgccaacctataacctcgataaactcttatgcgagacgcttcggaaactcagtctgcaaatcagagtcacaaaatatggttgacgtcagtaaacaatctcaattgttgcagataaagaaagaaagagagaagggaggaagattgactggatggaacgaacgaaccttagtgtacttgactttggccgtggcagcatcgtctgtgaaccagaagatctgaccgggggcagccggacgcactcgactgctcggcaagccggcctcgggctcgtccaacacctttgccaagatatcttgcttgccctctccggcggcgacaaacgcgactcggtacgcgtggttgatgactgggtatgtgaatgtgattcgcttcgccggcggcttgggagagtcttcaatgaaggccacccatcggtcctcctcagtcagaagctcgtgtccggggaatagagagcaagtgtggccgtcggggcccattccgagcaggatcagatcaaacacagggtatcgagcggcatctcgctgggcaaacgtggcgatcaactgtcgttcgtactcgtcagcgagctcttcagggtcgttcaacagcgaagtgttaatggtgtgaacctgattgggcgagatggtggtgtgatcgaggaagagcttcttgacagaggcatagttggaatcttcgtgatcgagctcaacaagacgttcgtcacagaagaagacctccctagagtagaacaagagatttttgttttttgtttaaaagaaagaagagggagaaagatagagaagaaaaacaggtgtgagataataggtcgatatgattcaatatcccgagagcgtcgcagatgatcgtcggaaagacttcagaacatgccaaactcgtacataacatccacacatccagtacatcctttcaaccgctgtcccatccctcgactggaaacgaccagctctgcctcgacaatccgtgaagatacagataatctcctcggttggacacccttctagccatccgagaaagaaacggtctcaaccgagcagagtgtaccgaaccggatcagaagaatatcagaagaaagaaaacgtaccacttttcccaaaggacgccttcctttccaatgagacctttcaagttggccggcagacttccaccagagatggccaaggtgaaggctcctcgcttcctgatagcatcgttctgagctttaagcacaaaatcggccacggccgagacgagctcggtgttctcggggaacgagtagagcacgggaggagcaggactgggatgggacattgcttgtatatatcgggttgtgtgtgtgagactgattcgatagaacagatagagagaagagtcaagacgatcaagaacacagacgttggcttgaaagatgtgtgatgggcaaaagcagattctcgttttttccctcctctcctctcaccacgattgggattaagggtcagtctgggatgtctatgcgacattcttgacctaaggcttctcgatgacgtcactccttgatatcttcccgagccttctctctactctgttttgttttgtgttcttcctgttcttcttcctgtttttctttcagtcgtgtcgtgctcgccgttgtcgtcagcagtgctcacttatgtacacatacacgcgcgcggaaacagagggggaattatgtcatctaatcgaacttgatcttcttggccgcgggtgcatccgagatatctttgaagaacgctccatacgagccgtgctctgtacggaatcaggaggtaagagaaaacgtttgaggatcagggtcaagagaacacagaagagcaaagaatcagacatcatgcacgtaaagagtgggacatacctttcttcttgatcgtggaggggaaccggtccatttctttgggaacgacggcgccggcatctcggatgactcgcatgaactctccagcaagtgcggtctcgtggttctctccggtctgaatgcatgtccaagaagcaaaaaaaaagttagttcaaagcacgcgaagaaaatcatggtgaagccaaagatactgacgaagaatgtcacactctttccgagctttcctcctcgtccggttcgaccgattcggtggatatagtcctctatgggaccagagcaccaaacatcgatagtcgaaaaggataggatgagcacccaacacttccaaatcagcaaaggaaaaaaagaaagccgggctgaccgacggtcaacgggaatgtcacgttgataacaagcgagacatctggaatatcaagacctcgggcggcaacatctatacttgccattgaaccaaaagagaataaagattagaaccacagccacagaagatcagcgctaccaataagaaagatgaagcaaacgaaatggattttaattcacgtaccagtcgcgaccaagaccccaacttctccgctcttgaagccctccaacgcactcattctctccttctgtcccatatctccgtgaagaccagcgaccttgaatccagcccttcggatagtctgctccaatctggtagcctccttcttgtacaaggcgaacacaagaattcggagaggtaccttgctgtttccgccggcataagcagccgaatgcgatcggaggagagaaagaagtcggggatccttatctcgcgaagtatcgaatacttcgatgtctgtcgatccagagagcattagaaagagagcgtcaggtaaaagcttaagactttctgacgcatagcttggaaacacgtgaagatgaacacatactctgctcgactcgggtgttggcagaaagctcatcagaaccgacggtgattctgacaggcgtcttcataaaggtagcagcgagctgtcgaacagactctggccaggtagcagagactgagaaggaaaccagcataggctcgttagtccaacccatcgagaccactagtaaaaattgcatgacattcccactcgtcccgcattgcaagagaatgaacactcacacataagggtttgtcgaccagctgtaggagtttggccaataatttgtcggatgtcattctcgaatcccttgtcgagcattcgatcagcctcgtccaaaaccatgtagtcaaccctggtaagaggaaacgaaaagcaaacgacgtatgcgcgcgttaatttgaatggcctgtctatgcgtacgacaaatctactggaacatacttgtcaaacttgaccgctccgtcgttcaccaaatcaagaattcgaccaggagtaccgaccacaaccttcaaaccgggctgtcggagctcttgaatctgctgtgtcttgggcattcctccaaacaggcagacacacttatagccgagcagctcgcatagagagctaagagtctcggccgtctgaagcgcaagctctcgggtgggggaaacgatgaggacctggggtgacgcggccacaggcttgccagaagacgcggcggtggcgataacgtgttgcatagcgggaatctgtaagcgaccaagtgaaagacacaagttgagtaagcgcagtcaagtcatcagaacgaatgccagctactagggtgaagcgcacacatatcataggggaacattattgaaactagaaaggtaaaaaaactcactccaaacccgagggtctttccggaacctgtctcggcaataccaacgacatcctttccggtaaacaaagcaggccaagagcaagcctggatgggcgtcggcttggagaatgccttcaaagccggagcgagctttgcagagatcgggatagaggacatttcgagcagcgggttgaaaggctgggagagagtgatgttgtgctccttaaggtaagcctgcgaggcggcggtcaatgaggaatccatcaagttggacgacgaagccacaggttgagcagattcgggttcggactccttcttcttcttatccttcttggactttttagcaggaggctgctcgagagcagcttcagttacgacggcgtccgccttgggggttgagtctacaacatcgacgctctctaccgatccggcagccttggcagccttcttctccttcttgagtctcttcttctccttcttggcagcctcgtcatcaacgtcctcggtcgtagagggcgccgactcctcagcaacagtctcttcggcctttcgcttcttgtccttctttgtaggctcgggagtggcagaggcggatccgtcggaagtgggctgaactcggggatccacaccgttcttgccgaacgctcccttggactttttgagcttcttgggtttaatttcagcagaggacatatctaacaatgaattctattggacggagaagtaggaagacgaaaggagaaggaaaggtgagtccgagagttcgatttggttgtaaataagaaaaaatgtttttatctaataaataaaatcagacaaatcgagccacgtgactctgttatgcacagctttctatctgcccgtgttatctctgcatcttttaactagccaagtcactttatcccattctgtttcgtccatccatcagatttacatcgttcttttgatccaggaagctcgaagaatggcctcgaagtgagtgggcagagatcttaatgcggtggcctgaacggtgtctttctcgattccttgcgaaagaaacatctgaaattgatccatgttgtttcctgacgtagcgacgacaaacgccctagacctcaacaaggtccttcgacatcgactagtgcagctgtatctgcctctcggataaagagaaaaagagctccagccacaggagatgatgatgagactagctctaggtcgaataaagtagctaaagataacgcagggggtaagatatcgactttagcggggacggccgctgccccagctgctggagcatctaccaacgaagatgtcaagagagaaagcaaggtctgtgattcctcggagttcatcaaactcggatcggtctatctggtcctttaattgcttttatagatctgatgatgtccttcatactgacaccatctcatctcgttctttgatcgatacataaaaactcccagctcgacttccgtctgtttcctccgaatacgttaaagaaatacgtccttcacaacaaccttaatccagtcatcgaaccatctcctcattccgacttaccggccccgcttcgtaggtcctctctgtaacatcttgctatctccgagccaactcacagtggtctgacgacaacaacataacggctttatcgtatttcagctcaaaccctctattcctctacctcgggtcctggctcatctggggccgagcctatcgagaagcccaaagtctcgcgtcgtagaaagaatccattgagaaggacagctattttagctgacatccaggcggctcatgagatctttgcgaaccaggccaaggagcattgggagaagacagcaaatacaggcattcgggagggagaagtcgtgaccgggttcttatattcttgtaaagttggaggtacgtttgtatcttggcgaggtttcgcttcaagggttgtgagcaaggggcgaaacaatgatgctgactaaatatgtggatatcattctcttgtgatctcctctctcattagatcgagtactcaagattgttcctcgtgagccaatttctttcatctgatctctaatgtatatcatacatgttctgacagggctcttctcttcttggatctttcgactctagattcggtatagcgtcaatcctttttcgtcttccgttcttcgcatcacatgctttatctctggatggaactatgccatctaccatcgttttctcttcatctttcatctttcatattcggattcatccgttctatcccttgtacaagtcttcatatgtgtttcatgtccgttgttgtgtgtggaaaaagacgatgtttgtgcttgtgtgaagaattatactgcattgcaggatgcactgacatcagcctgacgtcaggccttccgtcttgattcctctcttctaatcctacttgaaacccatcatcttctccgcctcctcgccgttcttcatcttcatcatccatcaactcccaccatgtggccgttctcatccaaaccttcagaaactagctctgcctctgtagtctctcttcctcctccttcttcccttccaccaactcctgtctctccaccaactcttgagcctatccgagctggcccacccggtggtcttgcagctccttccaaaccagtcgtaccggtgacgaaggcagatgaaggattagggtctgctaacgttttgcaaattcctgattccggtggaacctttgtccggggactagttcgtttcgtttccttcctctcattcggaccatccgtgtttccccaaggagcctgctctaaaagattgctggtgtaatcctcttttacatatgctccatgccccgatggtcttcaaacccttaggatacaggatctttgctcaccgtacttgccggtgtcttcatcagtaaatcatctgtcatgtgtttaaagtctctctattgataagggtttttttaagtaacagccgctccgtactcatactttgtctgtaggtacaactggtcctagattcttcggaatcactaacccgtctcgccgaacttttttcgtactcggcacatggtctctcacctcctgggcgctagtaattcacctcacccagcggttccgtgatcaagaccttcagaataaatgggcagcggccaactctgggcctggaactgggcccgactttgagggtggagtcggtgggcaggagagtttgaaggacaagtacgcgacgaccagaggagatcattgatcactttttctgctcattgtattctgtatgcttcttagtacgtctttctctctgatgcctgttcatcagcgggcggaaaccagaggcaaagtatgttgaggatagagcgtctgtcgatcagacgccagagccgaggatgaattaagaaaacatatggttatccctacatcaagtaaacgatagagagagtgtataattcatccaatggttgatatggttacacagcagatagtgagaaacacacacggacatacacacaacacttgggatagatacgactgccagagaggagaagaaagagaaaacgtccacaatgtgggcacaaaccgacaagccatacagagaaggaaagatgagagacaggacggaatggttttggtggccgctagctaaatcgagtggattcgttcgaatggaagtgcgagaatcaaagcatatacaagacaagatgaaggaagcctgtccgagtatgatccgacccatctaccgatccaccaagctcgcccaaccgacatctgtccctctttcagcctttgacttgagatgaggagcgatgaaccctttttcatcgttatcgctctccggatcactatcaccgcccgcctgctctaacattggtcccgggtctaacgaactggctgccgagagataacttgctgttcgtttcgacagataggacggtcggtcttgggtgccagcattcaccctagtgatcagagcggatccatca

SEQ ID NO: 435 - DNA, 6317 bp, Xanthophyllomyces dendrorhous
gaggaggagtcgattgagggctttcaggaataggcgagggaacctgagtggggtgtgaatacaccctacgaggtccgaacggagtgggatggtcggtcagatcgggcgaggttgaggcccgacgggcggcggttgaaggagactttgaagcgactcgcatagcttttcggagtggaggaacaaacatctctcggtcggctagcgatgtctttcgctccagttcctttccttgaggagcgcctggttgagaagcgacgttagatggaagggcgatggctataggcagagattgtccgtagtggactttggggcctgtaaagagatgggaacggagcgtcaagaacaacatagcaacaaagtcagaactttaacaagagagcggagagatcgacagagaatggatacaagaaggaagaccagacctgaactgtcgacttcatctgcgagactgtggggagggggagccagccgaccgtataggtgccatttcttatctttatctctggaggcagctcggtgacttggtaagtaggccgcggtactggtaaaaacagagaaggaaagagagagggaattccaatcaagtcgatcagtccatcggtcatggttggcttcgttccgtttatacgaagtcactcacagtttccccatcgaggccgccacccggtcaacatccgattgctgtttctgctcccgctctacttctcttggatcgattctctgtttctcttggggtgcatctcccctaccaccaaaagtgctcgtcaccgccctcaaactttgtgatccgtcaagcgcatacattggttcgtcctcttcgactttctcgtcggtcaagcctgtcccagagggtgcaagagagctcaatggttcgagcgagagcgaagaggggttccccgattcataatcaagtagagatggttccgatacgaaagatgcatggggcagaggaggctcgaagtcgaatactagagttaaaagaaagtgtgatcagctcagaaggtgcttgtgagtgcacggtaaattccgaaagatctgaacggaccatcttcatggtcgctttcatcctttccatttccctcgtcctcttcctcctcttctgtatctcgtttacggtccttgggttccttatctgctatcttggatttaaatttttcctcttcgttatctgcctccttgaatgccacccgcttctttactctcttctcagatctctctctcttttcctcttccatcgctctctccaaccctctggttgcttcgtcttctggccgagcactcacaacctctgcggtatcaaccttacgggtttcgactcctggtcccactccagtgactccctgggcaagatgggctcccgtctgatttacagtcgaccctctaaagatcaagtttggaggggaagtccagttggagacgagcagcgaggtagccatatccttgtctgccggacaagcagcgatctgagaatggtgggtaggagatgcaatcggacgggaagagacggatgaagacgcgttgcttgatttaacatgggcaatgccgtttaagacagatagggaatgggaagtggatgttgaagggatagatcggttgggcatataagagtttcggagcgacgctccgaggagagaaggaccgtgatgttgatgagaagacgatatcaggttttctgcagaggaagaagaagaaacaggccttgatccgataccgttggaagcaggcgaaagggttcggtccgaagcgtgggtcgtcatcttagatctctttggttcagccgatgggtgacggctcgggctggtttcggcgctgctgctcactttggacgggacgaagccttctgtccgttggccgttccgaggtgaattcggagtggacccgacggaagcggtcgtgtgagtattgtcggttgttgtcgaactatcgggctgggacttgtatttggtctctccaagttccttctcaaacaattcccagatctcactgacctcacgcttgacttgatcctgaacagtatcccatctttctcggtgtacctggatggcccgttcgatctgagacaaaaatatagttctttgcccgtctagatagcgttctgcctttgaggagagcgcgtggaaggctgggtgggcaggtgaatacggagatggaaggaagagcggttcggggagagacgggagaaaggaggaaagtgatggcggagacgagggaagagcagggacgggtggagagggaaacatattcttcggattgttgtatcgaggctgggtctacatcgtccagacaagcaaagacacagaccgagaggaggatgatcagatatatacgaagaacgagccacacagagaaaggcggaaaacaagtggatgtaagtctgtggcctaccgaagggacgagagtgaaccctggaggatcgtcctttagctgaatttgcactagcagatgtatatccgactcaggactccctgatgtgatatcaggcgaggtcatacgtgtgatcgcttggtctagaatcgatgtagatgagagtgtatgatggaaagggatggagagaggttgggctaaagaatgcaaagaggcaaacgaatcatcaccccgtttgctgactaagcacgagctttcttggtcgacccgtccgtcctacacaccacctcgtccagctcgttcatccaggcaacagatgattatcgatcagatgtctaggtgagtgctcatgtctacagggtgtgcagtacgcatgctgatggttatgctgatgctccttcgaccgtttgagctcatagaaggagagaagaggcagaaattcggttggctctcagactatcatccaccttggcacacccgatgaccgttcatcctaccaccgattcttccaccacacatccaactatcgcatacacaccgtccatcgtgcctgatacgttctcctcatcctcatcggccgattcgtcattgatcgtctcaaacacatctccggtgtcggccgtgatggccccgatacattcatctttgcattcacccgcggtgtcggtgggtgagagccatgttcggccctccccgttctctctagattctcctatcggcaccggcggaaacctccttagcactcttcctccagattcaactcttgcaagggagctcgaaagcggattcgacgtatgggatggacctcctggccacccatttaagctcgatggcccagtcagcagtctcggtggcagatcagagaaggccattcagagtagtggagagagaagctatcaggaagaggatcgggcgcacactccgtcgcttcaaagattggataaaccaggcggagtcacttggagctccagctcaagagagagttagtggaacttatccgtctttgattattcgacctgtctatgttgaccatcatgccactcttgtcctcagcttcatccaatcccaaacagtttagctccctctccacatttactccgaatccgacagccggtccctcctaccacccttttcaagatcctactcttcttctcagcgctccagctgcctcttccgactttcccgcctcgtccgtttcctctgctgctccttctcctcctaatgtatctaccccataccccgttggagtcggtgttagtcaggtcgaacccccttttgaggcgcgagctcgcccaaaaccgaaacctaggatgtctgtccgagagaaacctaccgattccggaggtataattctgactccagccacagaaaactcgacgaagagtgttggaggtagcaaggattggtcgatgggtcctcctttggtccttccttcctcgagagcaccttcagggctgacgcccgaggggatctatcacacacctactctatcgccgctttccatacggtcggtcacttcagccgaatccgataaggaaataactggacaaatagagaagccatccaggaaaatggacaaactacctgtcaagcgaaagaccagggacctgtctgatgaggaggaaggcgatcgagaagaggagtgtgaaaagagacggttgtcagagccccgaggaagaaagcattctgcttcaacgaaaggaaatgggtcgacaaaggaagagcgaacaaaggatcgacggcgcgccccagaaaatactggcgatgatgagagtgatcccattggactgtcatcatcttcaaagaagagtttatccggaaagatggcggaggtgatcgatctggtggctagctctgagcctggagatatccctcagacaacattaaaatcaaagacgaagacgaaggacgtctccaaggcagacttaaaggctaaatcgaagatcaacggcaaaggaaaggaagtcgatcgacgatccggaattaaatccgccacagcaacacctccacggtcctcctcttcctcgtccggtaaagctgtacgagccaaacgaccaatgatggtcccttcttctcctacttcggccgcgtctgagccagaagcagagctaacgccggcgccagtctcgaaacccccgacacctcagcctcaaaaagccaaaacactcgcggagggaggtatgtctgtacctcatctggtagattctcaatctccttctctatcgcctcctcctccgcttcttaacgagatttcggcagagataaaccctgaattcaaaggtgcatccgcctccaccactatagttatcaagaaatcaaagaagaaaggtccaccaaaagagtacgcctacgaaactgatgaggaggagcctacatctagacctgtgctagcaccggcttcagtatggatggacgagcattcaacgagaagacgtgggaaaccccaagtcagctaccaagagatcccaccggacgaaattgacgaacgcctgatggagatcagatctagtagcaccggtcttggaagagatatgaagagaaatggcgagggagtacttacagatgacgagaatcctgcaaagagggacaagaagggatatgacgacgaagctagactggttgaccaggcgaatatcgagtccaataaagaagttttggccacgtctatagaggaaattcagggggctggagaggctcaggatccagcgggggaagcgtctgcaaagaatagtaagggactgacggctaagaaggcgccgacgaagaaaggaaaggtcaagggcaaaggcaaaggaaaggcaagcgcgaaggagattgaaaccgaggatcaggttgtagtcgaagaggaggacatgatcgaagtagagaaggaagaagaggttgagcaaatcgagccggatgaggaagctcagaaggaagacgtggacgaagatgaggatgaagatgagaaaaaggtatgtttcttgcgtgttctcctctctcttcaactttcatttctaactcacttaacgttgattttgctcaggactcgtcggcgtctacgcctacgcaagtacctcccccagtccctccaccagcaacaacaaccgcgactgcgacgaaatcgagtttgaaacggtcgcaaggtcctgctttgtcttcttcaaattctagtctagcggcggagagtccaagagtaagtatcccgagacatcggccaccttttaagcgggagggctcggctatcagcggactttctagtcctggacctggaaaagtccaatcaggaaatgaagcacttcgaggtctgtctttccttcgcttttcgtctcagagattgaaacttaccaacccctatgtttcctttcatattttccctcctcgcgcgtttcaaggcacttcattagcatccattatacaaaagcattcgactccacttcgatctccttcaatccagacatcgggactcgtacgtccgtctggtctatcaagacgtcatcggatcgtgccgcttcatcacaacattctgcctcagcccaagaagttgccgcctccaccggtgaagaaggtagcaaagaagaaaggagatctgtgcgaggatgacttttcggaaggagagtgggaggaaatggagaaggagcgacttaagagggagagggattggtgcgagtgagttggcgaatggcgtgggttcgacatatccatcgttaacttttgtctattgtttgagttgtctatgtttttctcttttgtatatcttctcataaaataccctggctgtcgcctctcgttctttcgctccttctttgactttgttatctcccaccttcgtatgttgcaacccgtatcctctaactctgccttcatccttgcgtaccctcttgtagttgactatgaacgctgtgtgttataaaacgaaaacaaaaaggttgtccatgatttcgcgcaggttcaggcacaggcgaatatcatcc

SEQ ID NO: 436 - DNA, 33645 bp, Xanthophyllomyces dendrorhous
cccctgttcccacccgtttgtgcctggtccccgctcggatcgcttctggacccatctcgtccttttactcattcttttcccttcttctttctcaacgatcatatcattctctcttttctcttctctcttctttcttctctcttcttcttcttcttctttcatttcaaagcagaaacatatggccttctcgagatcagatagggacatgcgctcagtcacgctctccccttcggaatcattctcggcggtggaccgaacaccgacatccggtcttagcagctcaaccgttgtctcccaacctactgtctctcaccgtgtacaaagccacgcaccacccaacatgaccaccgtcgggccagatggtagaccaccctcgaggatagagagaggagaggacgggtcgatgtatcttgtctgggagccaggagtcacagagaccacgttcgtttcacccttcccattttccctttgtttaggcgtgccttccacttgctgacttaacatatctcctcgcatatatccatccctgtcgaccgcctttcgtttttctttagaaccacccatgtcactcgcacaatcaccacatttcctcctctgcgccttcctgcgcctctccctgcgtccacttctaacccgttaggataccctcagatacctcttcctacccacctctcgcccagcctataccctctcgctctagagccaactccagatgaccttcgatctttctcgatgaaccttggcggtaaaaaagttgtcttcaccgatcgagggctgaatgaagaggatttccttggagaacgtaaagaacgtgtaggaccaggatggaggaagatgaagagttcagcgagtgggtctgagattgcctggcaaggcctacgcagagttgatctaggtgaggtcttgggttcgatggaggcgaaagactcttctaggtggaagggcaagagccggcagacagagcctctggaggatcttagcttacgaagccctacatctagtaaccgtcacacttcctccctgggtagttccacgttcttcggaaacgaaggaacgactcgaagtccgcccagaaagcggcttcgagacgccagtataggaggaggaattccttcaccttctccgatgatggacgatgatgtcactcgctctccgatagcaacaacgatgacagcgacagccgcctcccgtacacatgatgtcccactcgacccacatcagccgagtataggttccggagccgagatcactactcttcactctcttcctgcgcttctcgcccagtttgatcaccttcctccaaagataaaagaacatttcctaatccaatgcctgcgccggacaacccgtccatctattcaacgcgtctctcaattcatatcgccagctctcaagtttgactttgtgtcactcttccccgccgagatctctatcgccatcttcacgtttctcgatcgaccaggtctggcagctgccattcgggtgagtcgcaaatggagcgagatgattgacagtcaacggtccatctgggcaggcaggctcaagtctgagggattctggtatggcttcggcgcagaggaagaggaggaagacctgatcaggcgtagatgggaggtcatggatgaacgggaagaacgcgcgaggaagtcgggcagtggtcggtcattgggtacgccgggcgaagtgccggccgatccgttcgatggatcgtctcccagaacgcgcactcgagacgaagaccgaccggatagcaatgaagcatgcgcaagtagcgatgtcaaaatgggagcagatgaaggggatgacgatcggcttggcacggctaccatttctcgaaaattcgaagaacctggaaaggagggtgaacgggaggccgatctaggcaagaaaaggcggaggagccatccactcaagcaggtatataggctcagacaacagcagaaagcaaattggagcaggcggaagcctagaggaggtcggttcatgtttcacggtgagtactgtttcttcttaaatctagatgggctgagaaaatttctatctagaattccagtcccattgtgactttcagcttcttgtgtgacaggcggctaattcctgctcgatgactctttttgccctatttcaggccatggatcttacgtcgttacttgtcttcaattcgataatgacaagattgtgtctgcaagtgatgatgtacgtattcctccacttgcctcgcacctaggttgaccgcatatatctatgcctcctttgtcagctaaacgtgcttttcttttgctgaattgaaatagcattcaattaatatttattccatcaaggacggctcacttcgctgtcggcttgatggccacgagggaggtgtctgggccttgcagtacaaagcggatgtcctagtcagtgggagcactgaccggacagtccgtatttggtctatcaagagacacgagcagacgcatatcttccacgggcatactagcacagttgtgagtaatgccccgtgtttgagtttttagcacgatgagactttactgacaatcttcttctcgccttttctgtcatgtcaaaaagcgatgtttgcaaatcgttgagccagtcaaacagcctaatggcgagttcctgccaccttacccgcttattgtcactggttcacgagacaacaccctccgagtgtggagactgcctcgggatggagagcccgaatataaatcgaataagaacgtgggtttctcttgatagtttctaacgagagccttacctacctgactgctgacacggctattcttgggattgtcaatttggtttgctatcacagccgtataggaagaagactgagggagtcaatccggaagagaacccattccacaaccatctgctcgaaggccacacgcatgctgtcagggctatagccgcacatggaagatactgtgtatcgggcagttacgactgcacggttcgggtgtgggacattgtgaaaggaacttgtttgtataccttgaggggacacgcgcagaaaggtttgtgcgctaatctagaattctagtccattcttgtttgacgtcccttgaccctggtgcttcaaactctgcattctatcctcctgttctcatctctccgctttcaatggtatagtctacagtgtggtgttagatacaggaagaaacagagtcgcctctggatcaatggagtacgtatagctatttcgttcaaaggaaacaagcatcacgagctctcttctcgcgactgacactctcagtttgcttctctactcagtggtactgtcaaagtatgggatctgattaccgggaaatgccttgctacgctagaagggcactcgtctttggtcggtcttcttggcatctctcctaaccaccttgtctccgccgcggcagattcgacgatcaaagtctgggacgcagccacacttgagtgtcaacatactctcaaaggccaccaaggggccatcacttgtttccagcatgatgaaaccaagattatcagcgggagcgagggaacgctcaaaatgtgggatattaaggatggcacattcgttcaagatctcgtgacgggtgtgcagggtgtctggagggtctctttctccaaccgatatgtcgtctcggcttcaaatcgaactgggttgactgtgtaagttagaacatactgtttaggttccctgtgattctcttctcgattcagctaacaaagaaattgactctacatgtctttggtcttgtcttcttcattcttcccgatcattctggactcgttataggttcgatgtgattgactttggagattctgggtatgacgatggagcaggcgacgagactctcgatgagtttatcattcctgagtgggagcgtgccaaccggctggaacctagaacgtaccagacgaatgagtccaccaccgagagcggtggactcgttactcattctctcagctcggtatatccatcgaaccctcttttcggtaacacgaaagacttgactagagttcatcttccgacgacacccactaagattcatctccgaaagatccgaacaactcaactgaacccatcgtcgacggcaccaacaacagcaacaacagtcggaaacccatctgcgtcggacaccttcgcgaatgcctctcaccaagtcgagacaccttcccagcctttgcagaaccaactgcccggagcatccccggtcacggtcgttcatcctacagatacagccttccctaatgcatattcagatacagccggcgcctcgtcgacgatgtcgaactggctactcggtactgctaacagtggtattggtaacggaccacatacccatacttcgtcgttccggagacatcctcactcgcattatccccatcatcaaccgagtcaagggtctgtttgggcgaccggagcagattcagcgggtgatccaccagaaacggtttgggaggatgacgatgacgtagcttcaacagagatggaagaggacaactgaacatatctcgtccacattcaaactctttcttttttccctgcctcttttcctcttcaatttaacttattgctgcacctgaggtgtttttgtgttcatcatatgagctttctcaatttataatcttaccaattccatatccacgcttcatgttttcttttcctcttcatttcccatccatactatcccgcttatatcccgtctggtcatccacgcatcattttctcatcttaattttgaactatatcagatctgaaccgaaaaggaaagtaatgagggtggaaacgacggtcggagagaaacaggttgctacgacggggagaataggagaaactgagcatgtaaagccagacgcaaagaatgaagaaaaagatgggaaagccaaaagaggaagaaggaatgaaagaaaaaaacaagcaagcaggcaagcaaatgtataaccaaaggaaagaacgacggaagcggaaacgaaaacggagtttcggacgaagataactgatggaaagaaatgatatgaaacgatatgagatgggaagaccatgaacgtgcttcgtgacgagaaagaaagaattggtttgatttgattagatgttgggatctttttttctgtttttttttctttttgatatgagtgaccaaacttttgcaagagggaacgtgtgataggtcggccactcagtgtcgtggtggctcaatagctcgttcgtctgagaaaggagagaagaaccccctctattgaggattactagctttccttgtcttgagaatcccacagatgtgtctcctgtgatacaacccgcgatgtaaaatggatgaaacaagccagaagatcatcatgatcagggacttgtccgatgtgttttcctctcacgctgaacatagagaggaaacagaacaaaaagagagagaaagaacgaaggaaaaaaaacgatactgactttccatcccctgcgcccaactcgccgattcgacactgtctcgaacaaaatctgatgtggcactttggacatgctggaaggttgactccttccgttccgcacacatcgcaaaatgatgccatcgtcactttggagtccatctcgagttgtctaagttgagggtctagcgattgatctccaaacttcgttaatcgagtgacttcgtgtactcgccgggttgagctggcgggtgaagagacgacagaacgagaagaaagaggggaaggaggaaggagcggagataatggttggggggagctatcagagatattaggagaaaggggttcagtcgaaattgagagtgctggtttcggctttagtttagttgaaggtgtgactggtggtgtcaaccggttatcgtctgagctttgagtcggaacgatgacattccgcttggatggggcggggaagacggaacgaacatctactcgtccgttcgttccttctggattagatgctaatggacttgagagcctgcttcgtccggtattcgtcagacttgatcggtcgagaggccctgattgcatccttttcaacgagccttctgcctggctcttcggtcgaaaccagttccatccggatggtccccaagttttggatcgagaagcagaagaagaggaagcggaaaggtagttgaccgagggcactaagacctcaccttcgacaaataactgatcgaccagtcccggggccggacccgaccgggagtcctgaagctgcagactaaacaaactaggtgaaagtgaagctttggaacgggcagtgttgaacgaataggtcgatggccgtcgggacagatgagccatgaagcccgttgggttaaatactgaggacgaatctgaaggcgttcgatcatgggagggcctggctgatattttggacccattgatctctacgggtgaacccggccggctggaggggtgataggtatgcgattgggtcgtactcacatacgaagacgtctttggtggtgcaagctggcgtgggaacgggaacgtgggaagtccgagcccggtagagggagctggggagacgacaaacggtcgagaaggttttgttttcttcggtcgagctgaaattcgagtaggggagagtaggttaggattcatagaggctgaagcggctgcatgtcgtgctctggtggctaacttgcgctctagggtcgatgcccgaggccgagcagaattaactagcgcttgagcttcttcgagatcaaccgggccgagggagagaatgtcctgaaggtgtgatagagaagccgccaggtccttctcgtgaatggtcaacgccaactagagtgtaaccggatcttagatacatcagtcggttgtacttccatgatttctgactgggaagataacgcgatcgaaacaaagaagggggaggggaaaggaatgagattaactcaccaaataatgcgcgtgcattgccaaactcttgacgagctctcgatccgcctcgttgattccttctacatcatcaatcgacacgatccagcttacagtcagaagcttgccagccgcaaactctcccagcgcccacatgttcatttttgctccttcgctagcctgaaagataggagaatctcgaaggaatgacgatggatccgggacgggtaacgggacaataggatccgagggaagaagcaggccatgccgatacagggtaagcagattcgagaacaagtcgttctgatcgtatcaagagaatatacacaggtcgtacaatgaagagcacggtagcagagacatgatcagtacatgacctagaccgacgataatgaatggcatacacagaaggccagagccttctcgactaaaatggaaagggaaaaagatatactcaccgctaatttgagcgacacgattgcaggccacgccctttcctcgaaaccgctactgaattcacttttggtttcctggacaagcccgtcgccatacgactgttccttctcatgcgactcttccgacctccttctgatgtccgtcgagcaatcctccagggcggctaataggccgaccagaaacgcacccgccgccttgttcatcttctcccattctcttcttttggtctttgcatgaccatttccggtcctgggaatgctcgactctctattgacgctacccgatagcgagccggatgggagggacgaaccgagtgagggtcggctggaggaagattccggtcggaaacctgctgacgagattgctttcccgcttacagactccgaagcttctgaccgaggtgtccaccaagcttgatcggttgatccttctagatagaagcttagctcacctctggagatgagtttacctagagcgagcgaggcgaagggcgaagggccggagggaagatgtagtgctcggagatataggcctagcgcgtcatccgttcgatgtgacaccaaggctttctgtaataccaagattacgagcggacccgttgagaggagacgtcagatgcagctcagagaaagacacggcagggaacagagtgaaccaaaacctttacagatactgacctcggcatcccagatgagttcctcttcgtcttggtcgagttgaaggtctgtgttcttgaccaaggtagggcaagtatagtcggacaaaatcatccgatacggtgatgggatggtctttatcggataggatcaacctctctttctttctgaaaagttatagcttagctttacaagcaggcagcaagcagagattgcctgaacagatagtcgtatagacgttctggatgaaaggacgaagcaggcaagagaaggatgtgagtcgatagagaaaacgttggaccaagaaaaggcaggccaagcaacagaaaaacgtttttctacttgcgcgcacgtgaacttcctgccttctctcaggcttttctcttcgctctcgtccttcctatacatccgctttctttgtattcttccctcttgcacatcaagatgaagtcaagtctagacagtcatggagatgaaccgtaggggtgttcatgtggacaggaggagcagatccgagttatcaatctctacagcatcctaaacaagcataatctcacactcgaaaggcgggcccatagatagacgtagagcttcagatgcaagtctctttgaaaatagcaagaggggaaagagggaaagccaggagcggaagaagagaggattccttagaggggacatgacgcacagaaaactacggcaaggcaaaagagcagtttctgaataggtatctaccgctaattacaacaaaagctaggaaaaatgctccaggttgtttcaactcgtcaagcttcatcccactcaaccacaaccaaggcagataaatattttatgatccgacagccctgccagcctggtccactctgtcagctcagaatgaactgttggcgccgttgctccctcctgttccctgccagaggccgtaagatcgaccaggatgagtctgccacagtcgaatcgttccatcctcactcgagcttgcgtacatctctccatccggactgtatgataccgagtggataggtccgtggtgccctgtttgttcaagtccaaaaggagatttggtatgtatagacatcggaagcggcatcaaacgggatcagcttggcaaacaatcaaaattgtaggcaatcacgaaacaatagaaatgtacccttgtagcattctcgctcctctcctgattcaagatcgtagactcgaacccacggatcggctgaagatccagctacgaaccgatctctcaggaagggatgaagtgaagcagacgtaggagcgtgaggaataggaattgaaagaggagggtctcgcctgaattattcaggaatagccgattgcaacgattatcctcacgtcagtaactggttgtatacgcatccgctgagtgcttgaaacgccatccaacatgcaatcaggtgagaaacataccgagcaatatccagaaagatgaccgactttccactggtcacacacaacgtaccacctccatgggcaagttccatagatgtcactgcatcaggcaacttcagctctgctgtctgctctagagttcgaagatcccaccatctaaaatccaatttcaacccagacgaacagaacaagtggaagactcagtgcccacctcccgacaaacccgaacgaacgatctatatgccagctacttacctgacaaccccctcttccccagcactgactgcgacattgccgtcctgagaatcccaaacaacacttcggatattgccctcgtgcgcgagaccttcagccccatccagatctcctctttttgtcatatataacggatcagcatctggccttgccaagttgaatatcctgagcttcttttcttgaccaccggtaaggacataggcgccctcattcgagttggccgaggtcgagggggagagcgcgacggtacggacgatatgtttgtgttcaaatgtatgcagacaggagccggtataagtgtcccaaatcttgctgtgatgaggagggggggtaaggaataaacagggcgaacatatggggatgatcagaaagagatatctcagttgtgaatgcaacattccggttgagaagtattcaggtataagataaagacgaacgcagaaaagtcggcgctacctgtggcagctctggacgtgtccgcactgagcttactctgccatacggctcccttatggcctgttggtcgtgtcatcaccatggtgtattgtgagtataaagagtatgcctgtgcatcagttcgactgtatgagtgacccacgcacctaggaacgtcccgacccagtcacctgtccagtcacgaagcatgggttttccatccttgcaactggagatgagcatatagctctcgtcttgttcttgtagaggagagaactacatgccaaaacgaacgtagaaaagtgtaaatatgatgtggactctatctatcccatcccacttctctttgttagcataaaaaaagacaaactgacattgagatggacaacaggtcgttgatgccctgagcagacgagaggaacggatcgaggagtaggattcatggctaagttttgtctttccgtaggccgatcgtgatggtgacgatgaagaaaggaacagagttacaagagagattgctcaatagagaacacttggtttctagaatgagttaaggagtcgttgttgttatcgtcgttgttgttgttgttcgtgtgacggcaacgaaactcagggcaggattattaaaggtaagtggtcttagactttatttagagtgaagagtgaagagtgtccaaatagatgaatggtatgattttaggaaagagaaccaaggaaaagaggagacaaaagaaaagtcgtcaagagtcgtttgtatgtgttcgtcaaggaaactgaagagatggaaattggaaccggaagtcagaggttgagggttggacgatgaggggagcccaagcttttcgactgttgaacgagacggtgaaggtgagaatcaagaagcttgttagggttacatcagggcccggtacgtttttcagccctctgatagaaatagaaatctcaatggtctgtaggacgtgtatggatgtctgtatgcgctttgccgatgatctcaagctcgcttctgaagaaccgggagatagtttcctattctacatgccaccaatggtattttatcaacaagaagatgcacaatcacaactacacccacactgagatctgctcaaaacactctattccatcactttcctggaccgtagttggctcctccgctctgtagaagagagttggagagcattacagtttcgtggtcagcacctcattcagatgtacgatctgatttgagataaacagaagtgtaacacacctttcgtagcttggtaacgatgtcgtcctccttgagatccgcttccgaggacgcgttgacttgaacggaaaacacagaaaacacattcttcacatcggttgtgtacaccgaggtcttctcaggcggatccaatagaacagggcatgagtataagcacagagcgctcagaaaagagacaaaacaagagcgaaaggcgtacctttgcgcgacgcatcaccttgacaccctcaccgatccaaacgatcaacacaaacttttctctaaagctctccctttagatttgttagtttgcagacaaaaagaattaagtaagagtcgaccatcagaaaacgtcttatagatggtatcgaaagatcatcggaaggaggagagaaagcattaacttactcatcgttggcgtacttcactcgcacataggcgaacgaagctttgtccttttcgaacagtttgctgacctctggaatacctccagatccggaagaggttaccttgaggacattggacttatcgttctgtttgtagagacagtaaaaggaagtatgagttatcgaaaagttgagcttgaatcttggcgctcatcgtctcgactaagtgattggggtcggcgcacctcatagtcgagcaaaacccagttagtctcggatttgtcagacctgacgtcttcataagctgtaatgtaaccgaaattttgaggacgaacctatttagtataggtctgttgatctgacgacccgaatgaggaaaccaggaagaagaagggaaaaaataacaaaaaaagaaaaaagaaaaagagatggatctctgatgttagaaggacagaccttctcgaatagcgggatcgtccaagtttgccatgatgagtaatggattgaagaaacaggatttataaatgtctagttgtcaaagagacgaagcaagcttatgagtagagatgggctgatggacaaagacggacgtgttgaaggataaagcgaaaggaagaaggtaagcctagtaagcgggtagcgcttccaaatgacgcagtcgaatgctgatttgtagttatctgactgcgcgtttgttattgactcgctgcgcgatcacaatgcttttgtgtattatctacctccaagaatctcttttccgctttgcctagagttatctatgagtaacacgcttgagtagaagacgcacagagcatctgaacaatcgtttggagaattaaatgggaggagatagaaggaagaatgagctgaacggcagagaaggaagtggtgaaggaaactagaaaagcagaagcaggaacaggcagttggagcatcgagacttcagataatccaacacaacagtagccctggcgacatctcagttttatagatgcagtagcattcaagatgcttcctccgctatatcgtataatgttgatccataccggagcacggataagacagaggaaggctttggtagttctggcgtggattctcaaccgaacgactgatgcttatataggtcagtcggacttggccgaatgtgagacacacatggatcttacaagcatcgcccgcccagacaaagcaagatctatcatccgttctgttctcatcaactacttgcccaaacacaatcgatagctcctctacatatttgatcgatagcccatctccttctcgagtatttaagatggagaaaactacagaactccctacgcggatgactgttcaacctgtcccgtctcatggcactgctactgaacccaagaagttcgtcttcctcgatcgtcgtttcatccctctggctctgttcgctttatacatctatatgttcggtcatcccatcaatattccttactcctcatcattggcaactgcctcatttgacaacgtcaaatggcacgcctgttcggaacagccagacaaccccaggtttcagtgctcgacagtcaaggtcccgcttgattataccaaaggatggacgggaggtgaggccgagatcgcggttagcaagtggattgctgaaggtcccaaggatgggaagttgcgaaaaagtctattcatcaaccctggaggtccaggaggatctggatttggttcgttcgatttcttccttctcatcggagtatgttcgtgtgcgttacgacagatgattgatattatgggtgagatgtgatgatttcctgtttcgtcaggattcaccttccgaatcgctagctctttatcgcaactagtacttgatgcatatgatattattggtgaatctcgtcttgtttcttctgactggtcactcacctggtctaacctattctttcgttccaaattgaaatgccctacactgataagggttcgatcctcgaggaatcagtaacacctctcccagattgcaatgttttccgaccaaacaagccgaaacgatctttctgtcctccttaggtccaggtttggagccttgggccggaaaaaaagaactaagaaggatgattgctaaggcagatgccgagaacatggtggtttcagaaatgtgcgaagcatcaagtcaagacgctggcaggcacgtaagtgattgatctcaatttatactgttaacgattgcatcagaatgtgaatcatcagtggctgacgtagtctttacaatagatgagcactacaacggtcgttaaagacattgcgtttttggcagagttgctcaccggaaaggatacaccaatgtatgcaatacccaatatcaattgtttcatgtacgcaaacgaagaaactatattgatgaacaccctccatctactacagtaacttttatgggttcagctacggaacagtcgtcggagagtatttgtaagttgatcattatatagatgaatctagagaagatactgagcgctgagacattgatttatttgaccgaacaggattgggatgttccctgatagaatcggacacgtagtcgttgacggaggttgatagttttcatcaccctgcgcttcgcttgtcttcaaagcaagaggtactaacagcggcgtgtttgttactcctgggtgtagtttgtgatccagtcaactggagggagaatgcccatcatctgtggggtcgaagtgttcgtatttggcatgttcaacatgttttagcctactcgcctcgatcagataagatactttctgatcaacgtatgtttatgcgtgtggttttgttgctatggtccaaacaggattacgtcgattctgagaagacgtaccaagcattccttcagagctgcgctgaagtgtgtgatctccttttctacacggcgatcagaactacttataggaaggtcacgtacctaatcgtctgttttggtcttcatctttttcttcacaggttggaccagatcggtgtgctctggccgatcagaattccactatggagtctctcgaattggatgtagataaggtcttgcaagaaatggttgaacaccccatggtcatcaaagattatagaggtattggcaagggtgtccttcattctgctcaggtgattatatttcatccgtcatatgtgcagaatggctagctaaatcaagcgcaatatattgactatgagatttaggttcgagagtggatttttggattcctctaccgacctaacacctggcctcaactcgcccgagtttgtccttcacttcctctgtctcttccgaggctgttccgctgatatgtcttgcacttcttcatctaatccaccttccttggaaacagggattgaaagagctaacccagggaaacggcctgtcgattttcgatgcaactgagatcaagattgagttgaatgccaaggagccaggttcaacagcatacgccaacccaagtatgttctctttttctgatacgtcggctgtgatttcaggaaatagttcacttagacaaaatcaccatacgaaacaggtgtagagtgcacggacgcgcttccttaccccgaagacatgtcaactgaagagatcatcgatctgttagtcgaagagatatctttccagatcaagaatgtcagcagacattttgcagggctagacgtcgataaatgcccgagatggaagatgcgtgatccagacatggtgagttttatatatacaaaatcaatgctccatttctcgtgcgcatgtttagaaatcagtactgaaaggatgatatattgtacaactagttcactgggctgtacgttcttcgattttttctatcgctctctgcatccttcatatcggctctttatttccttcgaccatcctgacgcttctgcttttgatcatccttcttcaaatggcgatgcttgtattgaaccatactcagcatgaaccaaacgctctccaacgatattctcatcatcggtaacacagcggatcctatcacatctatcaaacacgctcgattgctgaatgagatccagtcaatgagtcgattgattcaccatgatggatttggcgtaagattttctcttcttttacgcacgcatttgcgagcgataccagtcaaaacggaacttgatctgattatcgggcttatttttgggaatgacagcattgttcttctgctatggcgtctgtatgtctgccttccttacatctgttccattcagttaacgcttggctcagacttctcttcttgttgctttgtttgatatttaaataaaggtttgtacagcgcaaacgatccggtcctacttcacagagtccaagcttccacccaacaacctattttgcaaaaccgaccagattctcttccccaacaacactgtttcaagtagccttgctaacggacgatgggtacacgccgaaggtggagagatgagttctgaagagaacatgttgctttctgcgtttatgggaatcggagaggcgctagatgggtcattcgtcaggagatgaaatatgttatctccttcatacagctgataattaaaggttgacatccaactgactacttggttcattttttttgaataccctttggtatgctttgcccttctatcttcatttgctttctctgtatgtccattccgattacgttctcaacgctatatatcatcattttgttacacctcaactattaggtcgtcggcttgcctatggacaaacatgtacggactagcggcactgcatacattcattcaggatggtgaataagtttgcgtgtatcaatttctatataatgatggcagatccgggtttcgttgagaaaaagagttgtcccaatcattcagtcctgcacatcaatggctcagggctaatatacacgaactggccaagacgtcctgtctaggttgcatcatcatcataattctctcaagtgctcatatctatggccatgaatatattgattagtattgacgtctggggatttaacggcaaagtcgatgactagaaaccttctgtgtagcgcgctgtttatgcgtcacagaggccacttgttccccactacgtcatagaagacgcgcgaaagtccatattaacacaacacgcgctcactgacatctatcttcatccacccagcatcctctacctatcctcgaagatttcataaatccagaacacacccattaagtacacgcaaacaaaatatcatgaccgacatcggacgacttgagaagactcttgcctctgaggtatgcacgcgtctctctatagttccggccgttctctcgttctcatctcgccacgttttcctttcgtcctctcaacctgcccggtgaacaaatcaggctaagcgagaggagaaggagataaaagcagcaaccaaggcgcttcagtccgcagagaaaagcgaaggcaaggccgttaaggtttgtttatctatgtaaaaccctccttttggaacgatgcatggctaatcgatcgccgatcggtattctaacctttctcatctatcttccgacatccacacacataatctttcaggttgagcagaaggcagtcgcggcgaaagagaaggcactgaagcatgagcacaacgcagctcacaagttgacggatgcccaagcgaaacatgacaacgcactggccgaccagcgaaaggccgagcagaacttggagaataaagctgaacgtatgtccctccttatattctgagctcgtaaatcttggaaaactcttcgatcgattggccgaagtcttgatgagagtagtgagtctgattacaaggttcggacgaaaaactggattggaacgaaacagaacatcgcaaacttgagcaagagattgcaaccaagaaggccgcacttcagcaggctgaggctcgacaccgacaaggcgaagtttgtccatccttttacttcttggccactctatcgattcctctgcttatgtacattatctttttgacaaacattcaagtctgtccgaacggagcgactggagggagcacgagagccaacccccgttgccacaaccgaggcctctcaggcccacgcgcaaacgaccaccggacagattgtgccgtccgaggcgggcgtgccggtggctggaaaccctgtagttggttctactgccgtcaactactgaacgtgccgttcgtttctcttctctccatctgtttgattaattcatttcaagctcttacgtctatgtaggaatcttgagagtggttcatcacgatctatatcttagtctcatgcttccctacgatctgttcttgtctctactttctctttttgtatgtgtgtatgcatgtctgggggtttcttgttcaacttgtgttcgatcctcgctcgctatatacatgtcatcaagggatttatcaactgggcgacatatgcccgaaggtgcgtcagaaaaatgacgatagaaagcacctctagacaaaccctcgagcctctcctgtatccttcggccacaactatcgatttctttttccttcttcgttttcatttccaacatgtcaatctcatacgccatttgaaggaagatgagatcaaggcgaaggcgatctgtagattgagacggatgattccgatctagatctagatctagaccgggaaagggatcgagagcgcgagacgtctctggctctgacaggactagaacttcgtcctctcatctttctggactcgggtggggtttcatcccttcttcttctttccggagtatcgtcatctctccgtcgcatctctggcgtgtcgtcccttcttcttctctccggagtacggctgctcctccttctcctgccatcgtacccgtcttctctccgcctggactcgtcatcttgcctcatcatccccgacgcggtcggtcgccttcttctgtctccgggaggcgaggaccgactctgggtcggactgaaggaccgtctccgtctcctggccgggggaggcgatctcgaatcaggtcggctgtatctgtcctgagtcctagtcggagggccaggaggcgatctcgagcgaggccgccttctggaatcagcataccttgaggatggttcaggagacctgtttcgtctatccgaggacgatgtgtgataaggaggcggggagcgcgatcgagatcgctgcctggaggtggtattggcattggtgttagtagttgtggtgaaacccgatgactgggcgggttgatcaaatcgagaaggtcggttggctcgagcaccatatccctggtctctagcttggggagcaaagttctctcgacctcctcccgtatagccttgtcttccacctccggctctacctgaatcaaacccagggcgagattgaggaggaggtgcattcgatgaaccatatccgcccgccgctccagaagtgacacccggtccgggctgtctccatcgtccgctgaccgcagccttctccttctcttccttcgccctcatctctgctttcttctcctcgatgaacgccgaagggattcctcctagggatgtctgggcagacactagcagatcccaaagtgcggtggtgaactcttgagtctttgattcaagaaacccggtaagagcgatctggatctttcgaggatcgggagactttgtagtatagaaaagaaagaggaagacgaagaggaattcagatcaggagtgtcactacataagaagagagagagggagaaaaagatacctaccactttctcagaatcctccaacagacccatctgacggaaagagtaacaacagaccggtacatttgagataccacgagcatatgataaagaacaagacctacagaagaaacagaatcaaaagactcactgcatactcaacgacgacctcatcctcaaagcccagaagcctggtgacctctttgaccatccaaggccgcatgacggcgaggttgaccttcctgagatctaccttggcagaataagactcgggaaactttgtgtttctgagtagcttggactctttgtccgcgaaccgacggtcctggtcgatctgaggtggtgtataaagaggtcacaacgtgagaatggaacgagaatgtgagtgatggaaacggtagcacgagatggacagaatggacgaaccgatgtgcctttgaatccagagtcaccctgggagtaaggagagagtcatgtcagatggatggttaggcgagagtgaagaggcaggctgaacggctctgtgtagtaaagagcagacgatgtgacgtaccatgtgtgttaaagatgtataggatgaggatagaacaaggatgaggatgcagagaaagtaggagaagaagaagttgcttggaattatccattacaactttttgtattcagatggacactattttttgtagtcggcaggttgactccaaaacgttgtagtcactgttctaatcctttggacatcggttcgtaatgcgttgagaattttttgatttttgtaatactcgggtcagtatttcctaatgcatcgattgcattttccctattggagtcgtctctaatacaatcataaaatttccctaatgtatcgacaggaaattccctattgtttcccccaatgcctgcttacatccatctggctcctttcctcctccctctctttcccttccactcatcacgctgccactatccccatcgacaccatcgtctatcacatcgttcagccccatctccttatcttctctatctctaactcgtcgacaactccttccacatgggtcaatcttgctgtggttgcggtcagtttgtcgtttctcttttgttcttgtccttcccttgcctcctgatctcatggtttcccttccatcgttccttggccctcctttgtttccttccctgtcgtatcatctttcactttcttccttgttctggttctcatcggaatatcatcaacccatttattgtcgtcctccaatacgttcctcatcttggttgttttccttcgttctttcctctcaggctcatcccgtcggtccaacgcctcggagccacttctgctggagaacgagagagaggcggtagccgatctactccaatatctcgagagtaagccgtttagagatagagaaatccacaaattcatatgcaaacacacacatacagcctctttctgttcgtttactgacccttctcttcactcttgtttccccggttgtcatctggccgaattacgactcgtcctgtgcactaccatggccactatcatcctttccgtggaatgttctatcttcaaaaataatagaccggaccaccaccaatttctttacaggttctccccttgccgctctcactacactctccttcagcgacaacgtcgatcttcaacgttctgctgctcttgcgtttgcagagatcaccgagaaagaggttagagaagttggcagggacacgctagatcccgttctgtttctgcttggtagccacgacaatgaagttcagcgggcagctagtgccgccctcggaaacttggccgtcaaccgttcgtcctttcagagatttcggattctcttccgagaagaaccgtatatgttcagaacgtagacgttccgagactcatcagtgaaaataaaaatctatccgatttcattctgaaaatcccatacagccgaaaacaaaacactcatcgtccggttgggtggactcgatccattgatccgacagatgctttccccaaacgttgaagttcaatgcaacgctgttggatgtatcaccaatctcgctacccatggttcgtttctcttctgcactgtggcttgcgtgtgtacttgtatctgcatcaagatccgaagaatacgtcgagcacgtgtctgacgaattttctgtcttgtcaccttcctctaaaaacattcattccgaccttgaatccggttgcctgttcagatgaaaacaagtcgaaaatcgccaaatctggtgccctcgtaccgttgactcgattggctcggtcgaaggacatgcgggtccaacgaaacgctactggtgctcttctcaacatgactcattctggtaagttgtcagacgtaaactagttcttcagtctaccacgcaaactgcttctcaaaagctaactgccctctgcaactcttgtcttttcgactcctagatgagaatcgacagcagttagtaggtgctggggcgatccctgtcctggtcggtttgctcaactcggaagataccgatgtccagtactactgtaccaccgcgcttagtaacattgctgtagatggttcgtccaaaactcttcactctcctcgttactatctatcatggtgctctcattctgtgtatgctgatcatccgagatgtggtatctgttctaccgatgacaggcgccaaccgaaaaaaacttgcccagtctgaaccaaagttggttcagagcctggtcacgctgatggattcacctagtttgaaagttcagtgtcaagccgctttggctctaagaaacttagctagtgatggttcgtccttcttctctcccccgtcttttcgtatattcttcgtttctcgaataatcaaatatgcttactctccgtcctaccatgtttcatagaaaaataccaaacagagattgttaaatccgaaggtcttccacctcttctccgattgcttcactccacctacctgcccttgatcctttctgctgccgcgtgtgtccgaaacgtgtcgattcatccgtcaaacgagtcaccgatcatcgactctggattcctccaaccgttgatagatctgctttcgtttgaggagaacgaagaggtccagtgccacgcgatctcaacgttgcgaaatttggcagcgagcagcgagaagaacaagggggctatcgtcgaggcaggcgcggtcgagaggatcaaggaactggtgttggctgttccgttgaatgtgcagagcgagatgacggcctgtgtcgccgtcttggctctaagtggtgagttctgtccgctcgctgggtgtagatgaaggatcataaggatttgtttttgctgaatccatcggatttctaacctatctgggcaactatcttcctccctttagacgaacttaaacctcaattgttagaactcggaatttgtgaggtcctgatccctttgacaaactcgccgtcagtcgaagtgcaaggaaacagtgctgctgccataggaaatctgtcgtccaaaggttagtgcagagcattttgttattcgttagactgtcatctcaagacattctacaacgatttaaccataccttctgtctttgccttgcttgtgatttggtagctgccgacgattacgacgcgttcaacaaggtctggaacaagccggagggtggccttcatacctacctcgtcagattccttggaagcacagaccagacgttccagcatatcgcagtgtggactttggtccaactgcttgagtctgaaggtgtgtccttctttatctttcttcgtttggtctggaacgcgtctggctgaccagttctctttttaattcgccatccagacgaggttctatacaaaaacatcaagacatctgctttcctcctcccatcgatccgtcagttggccgaggccagatcgtcaactccgcacgggtcgcctacggccggtgggaccgatggtggcaaacgagtcggctcggatgcgtcgatctctgatcaggagatggagaacggggcggatgagatcgcaggactgagtagacgaatccttgacttgacggacgatggagatgagctcggttccgacagaaaggacgctggcggtgctggagagagcccggtggagggcggcgaccaaaacgggcttggcctgaacggggtggatagcggcgcgcttagatatggtgtcgtcgagcgagatggagagccttgagtgaagaagggaagagttccatttttttttccaaatatgtttgctgtctgtttttctctcattctcgcgacccatgtctctttgtagggagcttgcctgtttcttttcttttctaccttgattcacgtcgttttctctctcttctgttcatgtgttatttctttcggtgatctttctttctctcccttgtcccttgataatttttcctggaatctcgtccgtacgaacaaggtctctttcttccttctaatcattcttactagtcaactccattctggtctggtctttttttcctcttcctctcgcaccgaccatcttacgtccccgatcgatttatcgtctttcctcctcttgcctggtcgattcccttcttcgatgtccgaaacttgtctttgttgtgactgaagcctctggtgaagactcggtctttgtacccagagagactccagtttgaaaagtacatatctggattcatgatgagaggcagatagctacagaaagaaaggaagagaaaaagagaagatgcgtgggcgagaaagagaaaacaaaggaaggggaggaagacctggtcaatgatccaaactctgagcgagccaagctcgaatatctctatccatcatcagcaagccatcgggtgatctccagaagtgatcgccgtcgactgtttcgatcagccgaacgacagactcgttccctgctgaacggacccaatcgcgcacggcacggatcgaggcaaacatgtcggacgtgccgtgaaagacgaggacagtcggtcgatcgagaagctgagaatgagaactcagaggaggagagagtggaacaggtagaagacggagagtcggagtaagaaaccatttgtaggatagaggctgtaaggatatttcgtggtgtgagacaacgcagtgatgatgaagaagaagaagaagaagaaaaggtatgactagtaaggtcagttgtatctcgatttaaagaggttctcgaattctggaccgacaggagagatgatcacgtagaacgtcctcaacggatcagaacacggcggctgggccagcgcgagcaaggcgccatgcgagtatccctatagagtgcatctcaaacataaacaccatcagcgtctagagaaggagagtcaaggtttttggactatgaaaactaacacatataaacacctctcccgttcgactgccctgattggtacccgaccagacttcgtccattccagccttcagaacctcggcatagtcatctgcctcgcctctgcctgtccaactcggacttttggtgctctcacccgcccctctagagttgaagatgaccgtaggaacggaaaccgagaggaatatctggagcacgtgccggacgacacgatcgtcccaagatccccccaatcgggcccaaggatgggcgatgacggccagttttctacgatccggattggatggaaacactattcttgcctctatctgagggatctgaagaagctttgcagtcatatcgtctggaaccaacgggctggcatgactgatgagaaagatgtgagagattagggaagagctgggcaagagataaagagataaaaagtatttgaatacatagacaaacattcagacattaagtattttctgtaaattctcggtggctcacatttatcgatccatccatccttgattctcttcaactcatccatcttcttttctctactctctttctttggataaacactatgtctgcagccctcttccgttcactcaggcaggcccttcccgtcgcttccaggcttcccgctcttgccgtcagagtccagcacgtatctgtctttcgaacgatcccgtccgttgtctcgatccgatcgtttggagagtacggtaacaagccgtcgttccgatctagaagggaaccccgggagcctcgggagcctaaccctccttcggcccacctgtttgttgccaacctgtcttatgatgtgaccgagtctggtgagtcttcttctctctcttttactatcgtcgggtgttgttgtatgcttcagacgcctgtttgagctcaaatcccatctgacgccggtatccatgctctccgtttcgttcattactcccgcttttctccgttttcatcaacttggacaacacaagatatcaacaccatcatcgagcccttcggccctaccagcatccgagttgctgctgatcccgacggtcaaccgaaaggattcggatttattgactttgccgacaccgagtctgccgtcgctgctagaggtgccctcgagggtattgatctctacggacgagaggtccgaatagattacgcaaccggtcccaaggacagggctgctcctcgagctcgagacccatccgacactcttttcttctcgggtatccaggacctgagcagggagcgattggccgagtggttggagagctacgcccagggttctcacgtgtctgtcaggacgaccgtctctagggatggtgccggccttgcttttgccgagtttgataacatcgagaccgcgtcgctggttaagcagcagatcgagggtctcgatctcgacggcgtcaggttcaccaaaattgacttcaacattcctcgaagggagcctaccggtggcaaccgaggagggtactcgggaggcaaccgaggagggtactctggaggcaatcgagggcagcgctcgggtgatttcggtgtgcagcgaggtatgtttctcttttcctttcttgactttagacttcatcaacatccgatcgtcgccagccgtctttgctctattcatggctgatcttacgcggctcaccgactatctttctttttgcgctttcttgaaattcagagggcggcttccgaggtaacaacagggaaggtggtttccggggaggaaacagggacggtggtttccgaggaggcaacagagaaggtggtttccgagggggtaacagggagggcggcttccgaggaggaaaccgaggtggaagcagggatggaagttaccggggcgatagggagtaaggaaaagggagcagagctttcttttcgaccaaacgaatgcacccctctttcttcctttcaaccagattccacaaaagagcgaaacgcaactttccggatgacttaacaagagtctgacacccatctatatgatacttgactttctttccctctgtatggtcgtaagactaacgctgctggtgtgaacattgctagcgcttcatcaagcagatgcaagtagaaagtcggactaaacttttagagcggttcggttcgaatgcgagctacaacgatccgtttctgatcctacacagctcctctcgactgttcgcatatctcgcaaacgtacaacaggccagaattcaaaaacgtacacgcttcacaggcccatacaggaggttcatcctttgtctgtcgagcgaggtctgttcttggccttgccggaggatctgtttgagcgacttcaagcggcttgaaatcctcattcgcgtcggttgacaagtcgataggctcagatttaatcttgatagattccaaataagcgtcaaatccattttggatcgtccagcttgatgcgcccttgaggttgcttttggtcttgcctttcttttcagacaaaaggctagtctttttgtgtttatcgtctgcttcttcttcttcttcttccaagagggaggtttgttgagcgatcctcttctcggcgtccgtctcgggtataagctcgtattcttcgggatctgatctgaacaagtcgtgatcctcgctctcgtctgcagaaggatggggagattcctcatcggatgttgtagggagacctgtatgcacatatatgtatgttttgatagatatgagtaaacatttccagagatgaaactagaaagaattggtggtagatctctttcttgccttggagtttcttcattcgcttctcagcggcatttgccctcgattcggccgcgctacggatgatcagtacatcgttagataggatgagcaagagtgtgtcgcctttgtgagcgcctatagaagaacagacaggacgtacgatctggatccggctctgtataaaatgaaatatgatttttcgtcattcagagaaaaataaatcagacaaggtcgagatggaaacacatggattggatcgaactgatccgactaccttttcctgtaggttgaccctgggtcgagaaggttcgttcctccctttttagactttgcgtttatagttgacaactctcgtttttccttttctgtcaggactaaatgttgaagccgatggaatagtatatcagtgaggatgaaagatcaatcggatagaagaaagattcaagcaagcgaggataagagaagaaagaaacgagaggaggtccttactcttgagaccgtccacccgattcccatcggccgcttctcgaaaggctaagacgtttcgggtaccagactttcgcttcttggctgtctgggcgcctgagtgtaatgaaggttgacctttactcagcccgagtgtattgtttctttgacggcgacgggaagacgttggtctttgtctaggtagaaagaattcagtccataaggtaagtggttgctggaaaagcgaaagagagagaaacaaggagagacagaccgtctttgagctccaccacagatgttttcagcaaagtctcctgctcctagcaagacgttttcatggtcggccaagctgtctttcagtcttgctcctgacgaccagaaacctgagggaggaacgaatgcaacggatgagcttccaacaggattgatcacatacatggtccaaatagaggcttaccatctccataatttctgcccgtgtcggtagttgtacagtgtacaattggtagagagcgaaggcgtgtcaatttctgatctgatctgatctaaacgaccggaaatgcttagtttgatgaaataccctttagactgcatgatggcgacttctcgtttgagttcctcgttaaatttctgaaatccaggcccatggttcatgtgctatggatggcacataaaaggagtatcagagaaaagagttcgattggttcaactggtgggggtgatgatcgaccgaccttgatatgggcaagctttaaagagagcggagagaaaagggcaagagaagtcagtccgagtcatctaacagagtgctcacatagcaattgtacctcatggcagactacgctgattagccagggagaaggaaagaattcatcgttctttcttcgaagaacaatctctgtgtaggtgtaggaggtttctttgttagtcggtcgagaatagtaagaagggtagttgagaccgagataacaatgaaatagctaccgatggcctcgcctgcgttccagttcctaccagcaaatacggtgttgtatgggtgctttttgagtgggtgtaagaaattccaagtagtttaaacctgtgtatgccatggaactcatcggtggatatttatttttaaaaaaacgagctcacctcctcaaagctgtataccttaaggccatgtgttttgcatataactggcgaaagggaataaacatatgcataaatagttgggtatcaatatcgatctatcatcgaattgaaaggcttcactgtaactgacctttgacttgggctgcgagcgccttcattattgatagtgctttctaacaaagtgtagagagaggagtgggctgagcgtttcgattgaggttcgatccggagcaagaaataccaatgtgctcacctcttcttggggctttcctgggagagctgtgatgaacccaaacgaagggtttgggtctgcttccctctggttcagcctggtaaacgccgctggttgtgacattgtatgtggtgagagggtgggtggatgtgtaccaatgtgagtgaacgcgatatgtttgtgggaatccaagtgctgataagaaaacttgttatctaatcagtagcaagctgatttgagcctgacagctacctcgatgaggctccccctagacttatacccgatggagagctcgaaagatcccggacggtcgtccgaaaagagccgggccgaaaacgtccgactgggccaaagactaggaaacctttgtagtcatcgattagagagcgttctattgacgatcgatcaggcacgggtacgtaaccaggcacgtagccacccaggcacgatcgagcggttcccagccaatcaggcgagacttgttaaatcgaccgtcaaacaactcttcctctctttcttcgattcatcctccagcatccatcatcctcagagaggcatagcgttctttcccttccactaagcatcactcatctctccagcatgcttcgaaacgtagcaaggagactcgccactcccaagccaacttcgctttctaagcgatctatcatcgttactcctaaccctctccgagcaaaggccagcgataccgttcgtcctatttttgcctcttctttttttttctttattatcttctctcttcgtctttcttctggctccacacatacatgcttactggtcgtcggttcgtttcgccatgccctcccttagcaaaaatgggccatcaacggaaaataccctattattgatcacgttagtccttgtatcttttctcgtctttcttcccctccttttttttttcttgcccgttcttgagcaaacccattgaatcaatcccatactgatagttgatctggctttattgcatcaatttgatctctacaggaatacgatgctgtcgttgtgtgagttgaccctttctctacacctactgatcagaacgtcgcacgtcacttttctaaactgctagatcgaatttctcgctccaaatttaatccagtggtgccggaggagctggtcttcgaggtaaacattctctcacctttcctcgtcgattgaatcgtccgccaatctaaacatacgcatgtttgttctttcatcagccgctttcggtttggctgaggctggccttaacaccgcttgcatcaccaagcttttccctacccgatcccacaccgtcgctgcccaggtgagaaagctcttttcttgctttgttcatacttttcataatcacagtcttcaggtgattgtttgactgaatttcgcatcacttcccacttatccctcccaataagggaggaatcaacgccgctctaggaaacatgacagaggacgattggaggtggcacatgtagtatgtatacgatccctccgaagcgcgttttattcgcttacattctgaacacacctgactaaacgttttgtcttgtcgatcgaattcttacagtgatactgtacgtttgactcaattgaaagctttgtctctcgtgtcttcccgattcttcccgattcagcttgtacccacttttctaatcttgtaatcggctcgctcctataggtcaagggttcagattggctcggagatcaggacgccatccactacatgtgtcgagaggcccccaagtccgttctcgaggtacgtttggcatctgtcgctatcgaacattctccattctgttctcatcatttgcttcctggcacaaaccattagctcgagcacttcggtcttcctttctcccgaaccccggagggtaaaatttaccagcgagctttcggaggacagtcgttgaagtacggaaagggaggacagggtaaggcttcctgattttatcgtccaccataagcctcttctttgagtgcgatagcgcgtcttcgtttcagcttcactgactcggcaggtttttctgtcttctctccttagcctaccgatgtgccgccgctgcggatcgaactggacacgccatgttgcacaccctttacggacagtctcttaagcacaacactaacttcttcatcgagtactttgccctcgatctattgatgtctcctgagggagaatgtgttggagtcattgctcttaacatggaggacggaactctccaccgattccgatcccacaagaccgtcttggccaccggagggttcgttcgcgtggttctctgagacttaggctgtgaacctcttgactgatatgtttgtttgttttctctttcccctttacgtgtattttcttgttgttgcacgtctctcagttacggtcgagcctacttctcttgcacttctgcccacacctgttccggagacggtaacgccatggttgtccgagccggtttgccccttcaggatttggagtttgttcagttccacccgaccggtatctacggagccggatgcctgatcactgagggtgcgtgatatcattcttaattgcgcacacattcgatagaccttagtttgaatctgacaaacctctttctactaccccaggttcccgaggagagggaggatatcttttgaactctgagggagagcgattcatggagcgatacgccccgactgccaaggatttggcctcccgagatgtcgtctctcgatcgatgacgctcgagatccgagagggacgaggagtcggacccgagaaggaccacatctacctccagctttcccacttgcccgcttctgtgctcaacgagcgactccccggtatctctgagaccgccgctatcttctccggtgtggatgttaccaaggagcccatcccggtgttgcctactgtgcactacaagtgagtattggtttcccgatctgggttggcttaattttcgctggcagtagggctgatggtgtatctgttacatctgtttctcctctctttctagcatgggaggtatccccaccaagtacactggagaggttttgaccgttgatgaggttagcttcccatttctaccttgtatagtcctaaatccggaatagatgctgaccgaacgacgtatccactcgccaggccggaaatgacaaggttgttcctggattgtatgccgccggagaggctgcttgtgtgtctgttcacggagcaaaccgattgggagcaaactcgcttcttgatatcgtagtgtttggtcgagcttgtgctcaccacatcgctgaaaacctcaagccgggtatgccccacaaggagctcgacccagacttgggcaaggagtcgatcgagaacctcgactgggtgagaaagtcggatggaaagttgacgacggcgaacgtccgattagagatgcagaagacgatgcagactgatgcggcggtgttccgaacgcagaagtcgttggatgagggagtcgagaagatgaacaagatctaccacaagtacgacgacattggaatcaaggaccgaagcatgatctggaactctgacttggtcgagacgctcgagctccgaaacatcatgcagaacgccgttcagaccgtgacttctgccgccgcccgaaaggaatcgagaggagcgcacgctagagaggattaccccgaccgagatgatgagaactggatgaagtaagtttgtttctctgcctgtcaatcctttgttgtacatttgtctgactgatgagtttctcaccttgtcaacctcattttctctcgtccgcttaggcacactctttcgttccaagaccccaagaccggagaagtcacactcaagtaccgaggtgtgatcgccaacacgctggacgaggctgagtgcaaggctgtgcccccgttcaagcgaacgtactagataattgtaatccgatttagtcttcgtgtacttctctctctcttgtttcttccctccttttctcttcattctttacttctttaatgaacccttttttcccatatgtagctccggaatgacggattattttggagaagaagcgcgggctctctatggtgttgtagagtgtgtgtgtttattttagttctggggaaagaaattgacagtagagtcttggaactgagaccgtccgggatcttgcaagagaatacaacagagaatagagaaaacgacaaaaataacttcgggccatgattctcttgttattcgaagaaagacaaggaaactttcactgcgaacgccggtcatcactctcatacgtgtttgtgtgtgtgtgtttacaacagagaaagaggagcgggagtgagaagtagaagtaagacgaagacaaagaaagagaagagaacgagaagtctactcgtccgttctgtgaaggaaccaaggacccctcctcaaacaagggatgacataagctctttctatgtctctttcttttctctccaccctcccccc

SEQ ID NO: 437 - DNA, 12785 bp, Xanthophyllomyces dendrorhous
gttttccccgggacgcgaatgaaggagccagagggaagaggaaggagggaatacaccgtacgacgagggtccggttcgagacgtttccctttcattgatatatacacgagatctagactgtggacgcggtcgtgaaaacggacgtgaacaggacgaacgaacccgtctggaggaagtgaacagaacggtttcgtcataccccgtctcgtccgtttgtatttcatcaatcgatcgatcgaccggaccaaacgacaatgagaaaggtagccgactcgattcatctccgtcttgaactctgcttttcatttcggctgctccttgatccgtatgaaaagatgaaagaacagaaaaacagaacgagacgagttgaaaccgagtgaaaggaaggacgggatgtagtcaaagaattaagacaagtaatgatgaaaagacgagggaagggatcggagtctccagagaagacgatccagtattggaattggaagcgaaaacaaaagtaaaagtgaaggaaggtatcaaaatcagaatcccaatcaacatcgaaaaacaaaacataggtgtgacacagaaagagaaaagatcatgaaacgtctttcgtttggaccctcgggatcggatcgaactgaatcgaattagacagaacagaacagaaccaaatcaattcaattcaaagaccagagaggagagagagagaagaagaggtgagattgatatacgtcggagagaccgaaaaattgaatgtaaatgtaaacagatgaaacgagataaaattggaaaacaaagagggaaagaagaaatcgaccatatggattcaacggaagctacctagccgactgaatgggattgaaccgaatgaaccaagatcgaacatgggaggtagatgggtatatggcgaacaagtctattcttccgtccgttcatccattcatcgagattggaatgtgggttaaataagaaaaggaattggctcagtgcgggcaacatccaccgatagggcttagccgaaacttcgtattgtctgatcaactcttttctacaagtcttgtcgatctcgcttgtttattttatcttattctacccttcaatcaactttgggcccatcttcgtttgtgacccttctcgatcactatagagcgcgcgactcttagacggatttctctcttttcacatttcggatagaggcgaagaaaaagaaagaaggtaaatgaaaacagagcaactcaatcaggagagccgcccatcggatctatttatgataccttattctcattttttgagccaatcaaggtgggaaaaaaagggctcacttttactaatcttactctgttgattccgagtctggtcctcatcaaagaatgttccttctctcctttcctttttctcgctctcctatctgctttgaagttaaaactttaaagtgaaaaaccgaattgcactaagcattgataatagtgagaacgaagaaaaaagatcagccgcttctatctttcattcctgcggtctgttcggatcaaccgaacagaacacaaagaaacacagaagggaaagacaaatgcagttatgagggataagacagaggctcgacaagacaagatccgagagaccagaaagaaggaaaccaagggaaacaacccgtattctaaacgatctacgctacaggaacaccaaagcaaaaaggagaacttgctaaggcttttagatatatactgatgatagtgacaagaaagtagtaaaaacaataaccagacagatgacgagaagaacaaatgaagacatgatgaaggagaaaagataatggaaatccgaggagaaaaacaagaccgtgagagccaagaaatcgaagaaaagaagagtatcgtaaaagagcgttccaagaaaatatgagaaaagagatgagatgagaagagaagagaagaggaagataagaaatcagaacacggagtgttataccgaaaaagctatttacagatgagatgcaagaagggaaaagagaatctttcagtagatcaaggcgttctccgactgatctgagttgacaatgtcaacctttcgactagccaatcctttggactttcgatcggctttggaagccttggtgttgagaagcctggagaggaaattgccagaggcagcctgggcgactggtgaagtttttgagtttccgttgtagccggtagcgttgcctagaaccggtcgttctgccgcacttgccacagcgtccaggtcgatgtttcgctgactcgaacggacaggaggaccgttgtgtgtcgaccgggtggtcggcatcgccttcgacggtttcgacctggaagactgaggtcgacggggcgaagtagcgagaggcgagaccaaggccaccttgatgggagggggagatgaaaccatttgcggggtcgccggtccgtccgaatcggtcgaagcgatggaagatagcgaggtcgatcgatccatgggaggggcgataaagaccttgtcgtcgatggtggctgtgcggcgatgggagtagaagacgaggtctggtgacgaaggaggagagtaggccggttgctggtgtgcaaagaacggagagaagtgttcgatcacttccgactctgtgatggcaagatcgtagtcgagcaggaacaaaagttgcttttccatcaggttgacttcggcctggctgaacagatgggcgtatcggcactagaagagaaagattggataaaaatggatgtcagagacagaagctatcgacctgagaagcaggtagatctgaagaccaacccagtgtttgtttttcggagaagagtcgttcagatactttgcggcacagatcagggtagccaaaaagactctgaaagggagaagggaagacgaacaaaaggtgtttcagtttcctgcaaagatcgagtcaatgagaaagagaaaaacgtaccggtgtcgggtgcatggaagaccttgggtgtcggtcttgggaagtctgtctcggagcctgtcgaggtagacgagtgtgctgagcagagtggagacctgaacgttggactcttgaacgacgaccgagataaaggcctcgattgagggcagcgagttctgtggtgggcaccgactggctgaggatgatgatggccgagtagactctaccacggctgttgttcgttctcctaggtgatctgagagggagaaggacagaggtcggaatagaaagaaagttagcattcagcctcatgcatgaaaatgtagacaatgacggaaaggaggaaaaaaattaaagaaagaggcagacaaaaaaaaatgaaaaggaggtgaggcaggaaaaagagaacttacagatcatgtcgacagtgacttcagaacggatgagttcaagaaggtctagcgaatgaacaccacagggcataaggctagaaggatgaatggcatccttgaatgggacaggaggaagaggagattctgggcaggtcatgctgctagtagaggcggatgatgcgatcagacgagacatggcttatgcagacaaggtgaaagtgtgatgggtgatatgcagagatgtatgaggagaccggccgagaaaaaaagtaaagggggatctgccgagctggattggactagccaaagcgagcttgtgtgtgtgtgtgtgtgtgtgtgtatgtgtgatgggacaagggagagtgagatatgagaggaatagagagaggagaaagaagaaaaggaaaggagagaaaaaaatgaaagaagagagagtgtttgctttttacaagacgatattctgcttcttttctatctttctatgggaggagggggagcgaatgctgttaatgatgggatttgctatccaagccaatccggggccggtcggtgaatgaagcgagaggagcaacaagcgacggagagaacgtcgaaagaggagagaagaagaaaaacaaggcagaaggtgatgcaaggagaatgggtcggaagaagcgggaacaagaacgctcagggctccaaacaaaacaaagtccagggcaccacgcgaggcgtcgaggcgttttcaggcacaacaaagcccttcgaggcacaaaaaggcaccgtgatagccgggtgtgatgaaccgatcggtgtgaaaatgaaagagagtacgaaggaaataagagtaaggtgaaggggcgtgaaatgctaggatctaaccggccttgggcctgggctgcctgcccagtacgcagggggaccagtcacagaaacaaggcgcccgagcagcgccgccggcaagatggagatctttttccactcgtctcttctcttcttctctttattccgcctgtttctctccagctcgatccctttgtctatctttttcttcggcgcgcccggtcgagaacgttgtgaaggcgagcgagagaagaggctcgacccggaaataagaagggcacgacgccgactgaaagggtgacttgacccggccgacagccgccaaggcgcgtgctgggcacagattttagaatacatctgcgttagctatcccaacaaagcccagtggggatagactataaaaaagactacgaaatagactacagaatagaatgtatagaacacacagatgtgaagggtgctgtgagagagagagaaaaatcaacacacaatcacacgctcctcatacacatcgaaggtacatcacatcacatcacatcacatcacattgcaccacaatgcaatgcaatacaatacagtatgataccgcacaacaaaacaacaacacaacaagtacgatgtcaagtgcaaaaatacagccgcttgactttcggtactttggttggagatatcgactatgtgttcaaccgtcgctcatgtgcggtgtctatatagggcgctctcgcccgggtatcgaaatcatatcggttaatcaatctacactataagcatcaccaccaggttcttcttctcgtactgttttagaatccattctagctgtgcttcggtgtggaagctttcagtccatacggctgcgcgttttgcgtcggctccgcctgttgtcaccaattccattcctctctttcacatctcaaactcacacccacacttgtctcgccctcttttctcttttttctctacttgcttgtcacgtctgatctgtttatatcgccctcgttgcctatcttgcctccgtgtttggcgtacacgctctcttccttcttacattctctcattcgcccgttcgttcttgtttacttgtcttctctttcttccttcttctctgcgattctcaatttctggtctctatttggataaatgagtatatgcttttgagcacacccacgcgcgttagctctcgtcactttatttgtttttcttgtcctcttacattccacaaatgtttccgctccataaccctctctctttcttcctcccactctcctctgcccagtcatctgggatcacacttgttgttctccacctcttttcccacatgtcttttgattgatttttgacttttggtttttgccttttacttttaatatatcgtcactatcgtcttcttccttcctttcgacactcattactagttccgattataacaatacagactcaacccggttcttcggtctctctcaaatgttaaacccgatcttaatccttctttttgtatatatactttctttctaaccctcggtgagtgatcgacagagcaacacagattggtcgatcaattcaaccggaaaatgattgcaaacagctgtggaccgtctgatgttgtgctcgctcctcgttgagcggccggccagtcagagtcttctctaattaactttacatcgatgtcctcgatcggagggtggcattgtgcgttgtctccttctctgaagcaaggtggcaaagatggaggcgcaagaaggtcttgtcatagtagccttcggtttcacatagctacttccgagcgcgtctaagtggattttctctgtcttttggctgccttggtctttctcttaatcctcctctttatcattgagccgatcaacttgaacaaaaaagatggttccctgttcagcaaggctaagccaaagagagaacggataagggcgtgatttccctccgtcgaggcgtttcttctctacggataggcgatccactcaaacttatctctgtcttattcattgcggcgcagcattcgttcttctttagtccgtccaccggctatgtgcatacacttctttactatattctatcattcatcacgcctttcttttcacattccgtatctacccaccacctccaagcctcaacttctaagtcgttagccgatggatttccttcgtcagctctcctagccgcctctccagaggaaaccgagccgcaaccgtcgacaccgcctctttaatcatcgatccttttcctagcgatacactgccagccacgtgtggcgccagaagctatcatatacccatgtatgtatttcgatttggttcggttcgattcggttcggttttattttcgacgtagtttcgatatggagtagtagtagtagtagtagtagtagtagtagtagtagtagtagttgttgttgttgttgttgttgttgttgttgttgttgttgtttttgtcattatgatgtttcgtttcatcatattgtgttaaacacccggtcggttatcatgaattttcaacaacaagaagagcgtgagaaacccaatgtcagcaaacatcattacacacacacgcacgttcctttctctcttctctcctctctatctctacatatcgatgctcattcaaactgaccacatttccaagtccaacagtagcccgataagctgcttcgccctctgactcgtctacgatgaactatcgaacgcaaccatagccgaagaagaaacgaaaagaaagagcctttttgtcagcaatgtcgtctagatcgtccggatctagaccagatcgagagaatcgaaagaaatccatgtttaccttgcagagtgtgttcaacaggaccgggccgatattcgacttaagtgacttactagagagtgtcaggatcgaaaagctaagcagaagaagaggcggaagagtggagagagagagagagatcagggtacagtctagacaagatctcgggacgtcccgtctatccagctgtacacatgcacacgaatatcgaaaactctaaagatactcacttcagaagaatagtagaaatcgcgacccgaacgttcttgttggtctgcccgatagggagctcgctaaacgaacgaagaagctgcagatcgtaaaagaagagagtcggaagcctccttgtatcagtaaaccgaaaacgacatcttgcctgacctgctcgatgtcttgatgaaaacacgtagaggcatagaagacctggtgaacgcaccttctcgatagtctgtccttcgacgagcgcggcctgtccgttcgccgtgctgaacaagttggcaagcgcacggaagccaagcatcgcgttcgtctcctttaccttattaagctcccatgtcccatccagcggccactcaatcacgctcagtatcaatgccgggatggtcgccggtccggatgtcgctcggtacgcagacagactaggcgagatcggcgcgagtagccgcaacagatccagaactggcattgagaaccccaaaaagaagaaatatgttccttagctcgcacgcgaaagacctcaaaacagacatgcccaaacacatacctggaaaccgtttctccgccggccatctagagagaacgttcaccaacgatcgcacatcccatccttcttccgcctttttggttaaaggatcaggcagcgccccaagaggcaaccccaagaacgcgaccacgtccttcatcgccttcgtctcctccgagttcatctccaacccggtcccggccgcacgcaactcttcgtcgagctcgaacagttttttactcagagcagccacgttcgcttgtttgaacgtcagatacgtcttgaccggtagcacgtccgtcggttttctttcagaaggggcgatgacggtagcagccgacgggcccgaggagccagtatatcgagacgtaccggtgtacggatcgacatatgttcccgtggcttgatgagtgggcactgagctagaagatgctcgatagcgagaggcgcctgtgtacggatcgacatactcgtttgacgcaccctccccgatcgtcaccttggatgtgttcttctcgatgaatcggacgacctcgtcgatgtatgacaccggaagctcattgcggaccaggaacgcctgggcagcagcatatgggttttctgtgtcggcaagaaatctaatgtcaatatcattctcgcgccattccagttgtttcaccctagagagaggaaagtttgataaaaagagaagaagagattgcttctgaccagacgcgttgtagggcaatttaagaggaggctgtccttcagcaatatcgacatcaaacacatagtcgtattcaaccccgttgtaaagctgctttcggccagaaccaacagcatcgacgacctcgccaatcttctgccacacaccgcttccactcgaccactgattggtagttacaaagatacacaacattggttcagtccggtgtacagctaagaggtccataacgcttcaagaaaacaaacctgataggcctccacaacgttcttctcgtttttgaccatgatcacttgaccttctttcgtacctagaggaaaaatggacacatccagagtagagcaagttaagaatcagcctcaaactcgctcacaaggcgagtctagtggggagacactgaccgtctttagcaagcgcctccattccaggcacgttctctttctttacatctccaacttgctgtctatgcgatataatatttattttaacatagaaaaatcggtggtggcctcggttaattctctgctgtaacgggcgctatgtgtaagacagagaactaatacgtactgatcaaccttctgcttcgatatctcctcctcaagagccttgatttctgcctctggagccactcgactcgcactccttgtccaaacgcgcaccacgccgtcgctactaccggtgataagatctccgttcgaagcagctgccacagtccaaacgctagtggccgggtgggggattgtttggatgttcttaccaatctcggaccaaattctcagagttcgatcctcggacacactggccaactccggtccggcatcaggactagtagcgggaatgacagcaaggtcatagacaaaagaggcgtgaccgtgaagatcgatgattctatccccagagagagaccagatgatgattacactgtgtacaaagaaggagttccgaagggtatattagatcggcgtcgaaagggtaacagtttgtatattggaatggtcgagaggacgaacccatcattaccgcaacttgcaaacgtatctcctccaggaattggaaccaaaccacgcactgcgtctgcatgtcccaggaactatcaagatatcccggaaagtaaagaagaagaaaaaaaaagagatgagttggtcaagactaataacagaaatgattgatggtgcacgtgatctggacgctcgataccttttttgattctttgaacaaaccgtcagcacccttggtccacagaatgattgacttgtcggccgaagcagtaagaatttgtgttggcgagatggatctcacggcccagaccgtctgagagtgacctttgagaacctgctgctgctggaagttagcagaccagacaatcgctgttctatgatcgagaactttagtcattagaaatgaacgcgtcgtttatccaaaacgtagcgatcaaattactcactgatcccaagacccagagactagacacgaatagcagaatggttgttaacttgaccgaaagtgagtgaacatcgaatatggcttgatagatcagtcactcacctagtccgccaccgccgacgagaccatctagacagcagacgttggctgaatggccgatcagtgtgacactgggctcactcgaagtcgtctgttgaaagtcagtaggtgatttggaggcaaacccattgggggctgcataggcactgataagagagtcctgagagcccgtcaagatccattctaacagacaggagaatagaggtgcgtccgaagtcaacaggtgtgtctgatgttgcagagtagaaagaggaggggaacagaccttggtcattgatgacacctgcccaggtagagctaacgaaccctccgaagccgtcccaatgcctgccggcagaccattcggttccttctttggtccaggcgatggtcgacttgtctctggatgttgatacaatcaacgtgggtgaaggagcagaaacggaacgaacctgaggttgaaaagcggagctatcgtcagtcacagacgtgaatgcaaaaggacggcactaagaaaaacggatgagggaacagacatctgctttatgacccagaagggaagacgagagctgaaacagatctgggttgttcattatcttacaagaaagattctacgatgagttgatgagtggaaaggatgcttggtaggtagcgatcactctctttactcggtagaacacacctaagtgagatggagaggaagacgtggagactgatgtggtcattgttcgatgctagggttatatattacgtaagtgtatgtgccttgccggcagctgccacataatgactgtagccacaatggacactgtaaccattgtgatatccagctgtcggctccgacttcaacggacttctccacggagcaagcgcagcagccgagcccgttccgacggatcccgtccgaggtcgacggtgataaggatcggggcgagataagcaaagcggtatgcttataagcaacatggtcatctcgtcggtcttgatcactcacacacacccattctgcttctttgtttcaacaggttcctttgcttgatacatcctcacacatagcatacactcacatatatcattcataatggctaccttatccgttcaagcacttcccttgcctccttcggccaacccagcgttcttcagctctttcggtagagaagtaaagggcgtcgatctggatgtcgcctcagatgaccaactcgagcaggtcagtgttcgccgccggtgatgtcgctttctgtttgactgtatgttgtacattctatctgaccctgctctgatgttcgttttgaacataatcacctccaaatagatccagaagctgctctacgaagtgagtgcctgcatctaagaccgatgaactgaattgaattcatcgcttacctcgtcgccatctctaactcaattccctttctagcactcttgtctcttgttcaaaaaccaaaaagtatctcccgagtctcagtataagcttaccaaggtttgtgcgggtttatcttgcatgcgcgcacacccaagtcttctctgtcatgcacacgttctgatctgcgatcgcatcggctgactccgaatatcccgtccacctgataggtctttgaccccgaatctgatagatatgggcacgggaacaacaagactggaggagaaaaaaaatcaatccttcaccctgaccttaagactattcctcgacagcctcaggttcaggttcgttctccaagctcccacttattcctgtctctgaccgtttagactgctgagcattggaaatctacccatcacatctaggtcatcggaaacggaaccgtctacgaccatgagggactccctgaagcaagactcaagcacccccaccacaagacgttccacaagacggccgtctcgcccgaggatgaggaggcaggtgtgactcgattctacagatggcacatcgatgccgctctctacgatctgtctcctcccaaggttaccacgctctatgccctccaggttcccaagggagagcagcagacactccgatatgacgatggaacaggagacgagcttaaagtgcctctcgggaccacagctttcgttagcggacacaacatgtttgaggtactcagtgaagaggagaagagtctggccgtccgacttggtgtcgaatacgctccccacccttacgtctggatgtcatccgcccacgctctccccactggtcttggactagagtctgagggactcgaactcgacttgaacgatctccctccttggtcgcaagacaagatcaagatcttccctgccctgtggaagaaccctgttacatccaacctacaccttcagatccacccctccgcaatccgagcgcttcacatcgctcctctcccctcaaccgcgaagcggacaccggaatcgctattcccagacggagccaccatcacctcgctcccagaggtccgttcggtcgtgtatcgactccagcggcagggaatccgacccgagttggtctacacccaggattgggaagacggagatatggtcttgttccacaacaggggtgtcttgcattcggtcgtcggcgcgttcaccgaggatcaggtcagggtgttccatcagtgcaacttggccggaacgtcggatccgtgagttcttctttcttcgtcgttctcctttcctctcctgcctccgtgttcatcgggctgactgagtaaatgttcttgttacttgttttctcatcactagtgagggaccgtccgaggaggatatcaaaaaatgggcctaagaatgaaaacaaaattgcttcttcttgtcggccaattgtgatcatatttttgctttagttgtaagatgtttccagagtctcagattcattgtattttgataacgtcctgttcatgcttctttcagtcttatatatacatatgttagttctgtcctcccgggggggggggg

SEQ ID NO: 438 - DNA, 49357 bp, Xanthophyllomyces dendrorhous
ggggggggggggaaggattgtttctcaattattcatatgatgcttaatcaagggttcgttcctccaagtggttataaacatccaacattcagacagatcaatgccgcaaaaataatacacatgttcaacaagctcggtcgcagatcgatcatcagatgtcccctgccccagatgcaccacctgatccatcatcttgcccagacttgggcttccgactgagcagcgcaatctgacgttgcatatcgaggatctgcttattgtgtgcggcttgctgggcttgcaacgccgcttgaacagtagggtcattatgagccggctgacgaaccgacacatcccattgataaggaaaaaaaaggggaaaaagagggaagcacttaaacgttagacacgatgtaagaaactccctagcaacaagcaaagggacataccaaaggaccagttgagacccctccagttgggagatttgactgaggcgcgtacccagccgggctcgttccgtacatattgtacatcggatagctcgatcctccgtaaggtaattgaggttgtcccgagggcgacatattatacgctgcttgataggcagcttggtacgacggccggaaacctcctttggcgcctggatgggacggatacatcggcattccaggctggaacgactgaggtcggtatactggttgaccagggttgaatggaggttgacccgaagagtagctcgggtgtgaagaggaagtaggcagagtagtgggaagggaaggaggagcagaggtagaggtagaattgaattgaccagtggcacgagcaatggcgagagacgtaggagacataggttgcccagagggttgttgggaaggaggcgattggggccgttgaggcagaccgtgggtgggttgctgaagtcctcctcctgggtggttcatggcttggcctccaaacgcaggtgaagggaagccggggttggagaaagacccacgagaccctgattgtgctcctacaagtcctcctctgcctcttcctcgattcggcccgcctctaccaacaccttgcatatttccgcgttcacgtcctctccctcctctggtactcatctcccctcttctgtcatcctcatcctgttttggacccttcttcttcctttctcttgcccgcttcttttttcctcctccagctccatcggctccagcggaaagtccagccccaagatccagatcatcataaggtgccggtagggctcgaccgggcagagcagggcccgtactctcatcagaatcatagtcaagcacggtagaagcatcatcgtcatcagatcggccgctgtaagctgattcggcgtatgtcgagccggctgcagagtaggctaccggggggaaagtgctcgagagtgaaggggtgggcgatcctcggttagatggtgctcgagagtttcgactacaagatagaacggaggaatcatcgttcaaacaaggaaagagatttcacagtcagacaacgatacatcgaaatagacaaggaacgatagaaacagaagctgacggacctgagttttcgtctcttcttcgcctccgcctcgagttcgtcgtcactccactccatctcatccgcgccgacctcctcgtcaaacttgttactcgcatccgtccatttttccaatctcaaccgagcagtgggtacgaaacgacccatgtcaaccggataatacaccagcattccgaccaaagctgagagtggaacaggaggttgagcttcctggggtacagagatctcttgcgggaccgaagttgactcaacgatgggttctgatatttcagcagagagatcatcgtcgctagttttgggggagggaatcgaatgtggcgtagagtttgctggtggagaagaaggcgcaagatcagcggtaacgagagcctcaacttcagtctcggctgagctaggagaatctggcttatcggagatgaagcttgagacttcggctaattcggacgatacagaaatctctggtagagtcgagggaacggaggctagaagagacggaggaagcgtgaaaggtgtgggaagaagcatagtgtacaaaggagaggcagtcggaccgaaggtgtcttgaacctaaataaattgtttggcaaataagcaacgctgagctcctgtttctgttttggagagttaatgtgaagaaaaggaccttaccaatccgagcactcttccatcctcccaacaaacgatagtgttctctccgagcacatcctctcccttcttgtctacacattcgacaaccaccatctttcccaccgcacttttgattcgcccaagctccctcaaggttgattctggatcgactctctccataggcaatggcggggcttccacaggaggtggaagttcattggcggaagcaaaccttgtcgtgtctagtccttcatcttcgtctgagtctaggattggatcagctgacgcaggcgaaggggaacgaatgagagacttcaattcacgaagatgcttcttgtgaacggatcgaggggaaaaaggcttggtagcagagctagatgaagagtccgagtctgagtctgaagacgaagacgaagaagagctggaagcagaatcctcatcgcccgacgaagaggatgatggagaggactcgatgtcggagctgtcaggaagaaattaagtttcaaataggttcttatttcgtaggaaatatcagagaagaagtagactcactctggaccattcacagctccagcaagggcttgttccactgcgccttcatcgacgccgaccatctcatggataagtttcagatccagaggaacatccgtagcggaggaagtagagccctgtttcgagggaagtgtaggtagtttaaacacagatggaggagggggtactgctgtcgttgtcgtcgtagtagcggttgtcgccgctatcaccgttcgggccgatggagggataggcccggtgtgggaaggagaaatggctgagattccatccataggctcaacactaggaaacaggatacaagacaaaataagcgctcagctatagatttgtaacaatcaaacagatgcacaatagacggttcatacctagttgactcaacatgttcactagagaccacggtctctacagtctgagcctggctactcgagatttcatcggcagcagaagcgtttgtcttggatggagtttgggagccttctacctccgccaaacttcctatcgagaggtctatctgagtgtcctgatggacttcctgttctgtagacatgtctaggtagttgttgtatagataatatctgggacacactctcgttcttaccgtatccgttgaaaggcaagcttcaaattagtgtggcaagataaggagagctgtgttcgacgcgctgcacgtgatgacatacatcgctacaaagcacgtgcccatagccaaaatatgtagccgtaaccaacgcctctgccatcaccgtaaccatgtgaggtgagacagatcacctcgacttccaccgaatcagtcttcccgttctcttctaccttccatccgtcatccccatcccccatcgcatcacacagcttgttaatcactccttttactctaatttaaaccctcgatacacatatgaagacttctacagctttggtagcagccattgctactgcttcctcagtatctgcggccattcacaagtgagagaagtctttcctcgttcttggttcttccctttccgtccaatcatttgatctgaccactttgtcctcctgttctcttctctaccttttgttcatcctgcccaccagactgcccttgaagaagcttgatcctcagcctttgtccgttcgatccgtcgaccatgagaccgctttcttggcttccaagtaccttccaggaggtcttgcttctcaccaggcggctcttgtcggatccggtggcaatggacgaaagctcaagtcatccaacaacgccgatgatttgttttggacccaggaaatgatgaatgagaagggtcaggccgaagctttgaagggtggacacggtgttcctttgtccagtgcgtattgtttacttgcatctcaatgggcattgatcacagtgagacgtcattggtggcggttcaaacctgatcggcattgacaccgtctgctttgatctttccttaacgtcagactacttgaacgctcagtactttgcagagatcgagcttggaacacctccccagcttttcaaggtcgttcttgacactgggtccagtaacctgtgggtgcctggaaaggggtgctcttcgatcgcttgcttcgtacgtctattcttctataatcctttcgattcactcatctcacccgttgcctcatttataatcatctctagttgcatgccaagtacgattcttctgcctcgtcaacctacaaggccaatggatcctccttcgagatcgcatacggatcgggatctctcgagggtttcatctccaacgatgttctcagcatcggtgacatcaccgtcaagaagcaagattttgccgagtccaccaaggagcctggacttgcctttgctttcggttcgatctattttttttcctcatcaatccatgaaatcgagtgctggatctgacgacgtatcatgttctttataggcaagttcgatggaattttgggattggcctatgatacaatctctgtcaacaagattgttccccctttctacaacatggtgaacagcggtttgctcgacgagcccgtgttctcattccgaatgggatcttctgaggaagatggaggagaggctatctttggaggagtcagtctttcggaaccttatgcttttctttcctgtatcctaacgctgtctctctcttccttctttgtgtgtaggtcgatgattccgcctatatcggcaagcttgattatgttcctatcagacgaaagggatactgggaggttgagcttgaaagcatcaccttcggagatgataagctcgagcttgacaacaccggtgctgccatcgatactggaacctccctcatcgtcatgcctgtcgacgtggcagagatgctgaatgctgagatcggcgccaccaaaggctggaacggagcctacactctggactgcgcttccgtgccctcccttcctcctcttactttccagttcggcggaaagccttacacccttgctggagaggactacgtcttgaactctggaggaacctgcatttctgccttccagggaatggacatccctgcccccttgggacctctttggatcgttggagacgctttccttcgaaagtactacactgtgtatgaccttggccgaaacgctgtcggctttgctccttccgcttaaagagagatttctttacgatgttctgtctgaccaagaactgagcgttgcgtcttgctgtctttttgatcgcctgtgtgtgatgttgggtctcttctcttcgttcgtttcgctgtgttgtctacgtctgcctttttgtattctcgttccttctgtagcctgatttattatgaatttgcttcgctataagttgtcacatcaccaacgtcgcatttgttcttgtttctatgaataagaagagaaaagtagacaagcacgagaggcgcggacgatatgctgttcgttacagaggcaaaatgagaagatggaagaacagggagggaaaggccctggttcttgcaaaaagtctcgatttaagaattcttcttttctttttacataaacacatagtgagggtggattggaaataaagaacaacgataggaaaatgacgagaagagagaaggagagataggaaaaatagaaaagataggagagataggagaatggccgggcgagtttttctttttcgatcctgtccgtctatacttctatacatcgcctgcctcagcaggggtcggtgctggggcaggaatgttggcaggtgtaacaggagcaggcgtcgagccaggaatgatcttttcgccaccactttctgtcttggagacgagtctgtccgatatatgggtcttctgctcgagacgggacagaggagacacaggctagtcagttgcgagacaacccagcgaccgaaaggaaaagtctcaaagcaggagaaagaatagaagggagcgacaggaagaagtgaacaggcttacgggaacgaatggtttggcgttcgcattgaaaacaaccgatctgttggctcccgccggccttgtcaacgacgggttagaaaacgtctttgaatttgaggtagagtgggcgtaaggatggtatgttgtcgaccgaggggcgggcgcagttcgaccgaatgggtgggtgtacttgcaatccgctcgggtacaatgtgacttgaacttgcaaagctttccactggccgttaacggtccatccagtccccctatcgctgctgccgtcgtcgctgacgaagccggagcggccaccacgccatccagatcgccgatccctccgttgcccgttcctttcttctcttttggcttctccgccagagccggatttgccaaagcgggtggcgccgtcggctggccggcggcgtccacatgaaggaactgacaggagggatttgtgcagttttggaacttgcacagtacctgtgttggaccggtgtggtcggctgaaaggacaagaatatatgaatataggaaatcgaacacatgttgatataaataaggaagaagaagaaagagaaggagaagtggatggagaaaagataaaaatgaatagaacgaacctccaagctgagccgggcttacgtggctcttgacacactcttggtccttgcaattcttacctgcctcacaagcctcggtgctcaacaccaactgagtctgtggtgtggccgctggtgacgggtgagaatatgtgcatgccgcgttcgtgcatccgagcgcaaacttgcagagatctgtctctgtcggcttggtcggaagcggggcggcctccttggcaataaccggtacgatcgcttgcgaggccggtccagcagcgccattggttcgacgagggttgttgttgttattgttgttgctgttgttgttgttgttagcattgtttcggttgtttcgattgttgttgttaccagattgttgagatgctgccaactgctgcatttgctgttgcattgcctgcatttgggccatctgaaccatctgttgggaagaaaccaagggatcgtatcacgaacaacgagaaaaagcatagtcagccccatcctcgaagcttatctgaaagcttgtgagtggaccttgacatgacacgtcaagaaagaaaaagaaaaagcaacagaccatcatctcctgaagacccatccccatgcctcctcccatcatgtttcccatgaacgcttgaggatccatcatcatgttgttcatcattccagggttgaatccaccctgcatgccgagacccatatgttgctgttgctgctggaggtgtaagggaatctgctgtacttgtcctcctagaggcttcggagcgctagcggcgacaccaccggctcttgttatcgaatcgatcttttgctgcacggaatcttgacgttgacgggctagttgagaagaaataaaaagcaaaagattacataagtaactaggaaggatatcatagatatcatagaagcaggagaaaaatgagacgagaaccgagaaacacaccatcgttggcctctttaccgcctagtctctccaacaagttctttgacgcgtccccagcggccagtttcctcgggcctgatggcggagtactatcggacacgcctccagagacccgtctcttggatgagggttccgagccttgagacggagcgggcctcttctgaccgacgacgggagctggctggactggattcaaagctgacgaggagagagctctggcaaagagaccgttggctggtccggtaggaggccgacgactatgtggagggtcatctcgagctacttctgacggggcgatcacagtatctttagcaacggggacgggagcaggggcttctaccggagcgggcgagggttcaacattggtagtggtagatggagcgagcagttggttggtcgctctagcaaagagccaggtggtgaaggactcatctggatataacgcgattgatggcagaagaggtgtttgagaagcatatctgacatcagcttaacattcaattggatgcagttctgtttctgtggaaagacttaccatactgatctccaatgagatccatcaactctgcggtgatttgatcttgggtcttgctgttagcgagcatgacagtgatgtactgtcgttcaaacccaacacacccatacgtcaatattatcggtcagaacggttccgaggaagagagcaccaatatgacacgtacctcggccataacaggatctacgtcgcgaggaagaaatggattccgataaataagaatctaagagttcgcgtatttgcagagaaggagaaggagaacgagaggaaaaaggggagagctatcgacggggagcttgggcaaacgggtgacctaccatcatcaggcgcgtactcgaacttggcaagctctgcttgaatggaatcctaggtatgggcaatcgaccatagtggcaagagaaagcagggtgtgaacgagaaaagagaccagagaaagaaggtggatggagatagcaatggggagtcagtctctgatctgaaagataccacactgagagccaaaaagaggacaaacaaaacacgcacctgaagctcctgagcgtgagatgttcccatggtgacctgtggtgctggcgacatggtgatggctgatggttgatggttgatcgttggtggtggtggatgaggtccaagacacggctctcatagatttcctgtaggaagcctggcgtggcgaaataaatttgtaataggaatattctgtagtcggatgactacgagagactacgaaatctgtagtgttctcgttgttcgagaagtcctagtccacggactacaacgggttctagtcgacggactagtaaacagatcgggagaataaactacaacgctctctagtacgttgactagaaagcaataggcgagggttttagtcggaaaacactacaaacccaagctagagatttcgggaaaaatctctaatgaaaccggccggaatattctcaccgccaaacttgatcatcccgctcgatagcgtgaagcaagtcctcagctaacgccagcttggtccatcatgagcatcgtaagtcaggcagacagtcaggaaggcgagggaggaggaatggaaggaagcaagcggggatacatccatccgctctctgttcagtcttgttgacagatgaatggtctctctctatctctcaccaaaagtcttcgttcgacccacaatcgttgatccctcgggttaggtccattctagaaggggccgacctaagcacagtgtgagctctttctgtggtacgcgcgttccttctctcattcaggtcttggcttacgcgatccgtccttcctcccaataggtccgcacgtcaggtccggaaacagttatctgaacaggatcccagtttgactcctgatctgttaaaatctcacaaggatgcgattgacgatatcgtacgtccattcgttctgttcccgcgtgcgttcggcgcaagcgcatcgtacattggattgatccggttcatcttatttccggccatgccttgatacgttctcctctttgtcaggtgatgaccatatttgatgctctggccgctcctccatccgagtcttcggatgataacgacgacgacgacgacgcgccagaaagtccccctcgaacaaagaagcaaccgagttcaacatccgactcctcagtaaagtcaaaggccgaacctctctctgatgctcagctcgctcaacaattgtccgaccagataaacggtgccccgaatgcccgctctacaagagcatcttcctcatccacctccaagactgccaagggaaagggaaaggcgaaagcaagcgctagcaagacatccaaaacgaatgcatccggttcgtcaagatcaaaaaagaacacggtactctctcaagcgacgataggctcgtccgacgatgaagaccatccagatggaacaaagaaggcaaagagaaagcggtcgacggattccgacaatgcgccagaggcaaaaccaaagaaaccaaagaaaccaaagaaagaacctaagtcagagggcgaggcggacggagagcccaagaagggcggagtgttcatgaaaccctggggaatgagtgcaccactatctgctctccttggcggacagtctcaggtaaattccatttcctcagccagattcgtcttttacgaaagtgagagcactgaagattcttctcctgttcacaaacacacccagctgcctagaccccaggtggtcaaacagatctgggcatacgttaaagaaaacaacatccaagttggtccttcctctcttcccaagttttgtttacaaggatcataaccgaacgcaccctctcatttaggatccagccaacaagagcttcttcttgtgcgacgaccgtatgcaagccgtgttcaagacacctagagtaagtagggaagacgttttgcctagtactccagttcatagtgatctgatccctgtttccaactaactgttgtctccgttttcttctccctcctccttttcctcttactctttttttcgtcgaaaactattaaagttgcatgtacgttattcattgtctatgatttatccgtcctctcttcccttcagttcttctcattgattcccgctcttatcaatctacagatgttcacgatgaacaaactcctgagcgatcatctgtatccggtcaaagaggcccagtcataagaatccagcctccctttcgtttgtctacttgtcccaagggattcaacatacttttcttacacacacattcatatatatatgtatctacatgtacagcctcgtccgcaagtgagaaaagacagagatagaacgctggacagagacagaagagaagctcctttattcgcaattgtgttctattcaatacagagcaggctgcatataaaagagccgtacaagctctctgtattctatctagagagcgtgatctcggtatggttggttcgatacatatacagtatatatcatatacacgactcccctttagagatacacatgatacaatctcgattgcatcaggactcgagagaatacttctcccaaggatgatttgaagtcctctcagtctctcccttctggaacataatctaatttagccgagaggagcaaagagatcccagtgatatagatgagactggggagggtcttaagatctagatcgagaaacgatacgcaacaactaaggtcattagcgtgtgttccgatggaagagcaagtaataaagatatagtgaatccggttctacctctcatgtgtgcgtctgtccacttgtttggtccgtcaacctatccaacgcgtcctttagcttgatctcttcctcctttcggttcgacagccattcagctggagcagtatgtttcgtgattggatccagccctatcagcacatgatcttgcggacaagaggggccgagcgcgtagacatcttcaggagcaggagagaacgtaaggagatccctatctaggggaaagtcacaagactctgataggcatgaagataaggacaatctgcgactcggccgagagactgatttcgaaggagatgagcctgtaggagttatgggacgaggcagcttggaaggtggtggagattccagaggtcgaaagctgtaagcaggactgaagtgagaagcagagtgatccttgccgtcggcctcgttgtcttcgtcgtgacctgaagattcagacagagacaaagatgttttggcttctcgcttgttccacctctcccgtctgttcttgctcttccgtccagggcttcgagaccgtttgtttttccagtagagttcctccttccgcacgcgtcccagaacattatgtctatctttatccgtttcgagttctgcagaatcccatccaggtggcaaggcctctctgtccccttccgattctgtttccgatccttcccctagcttccagccttcttctaaagccaaaagaattagacctctggcgagaacgacgagatgatcgtcgtccctgtcgacgacgctggctggactgatatctgagaagccagcagagacccgaaagcttaggatgcccaggatgtacttgacaacttcaatctcttccctccgtttctcgatatacgcgttcgatcggtccgtcaaaggtggaagcggaggtagatcaggtagagcctgacggagcgtcgacgacaatgtctgaaggagaagatgaggggagaacgagcgcagagtgagaggcgcgtctaggggccgggcgatctgtaatgtcagcagcagggagttgaacgctgggatcagcggaggcagttcagtcgagctcgcaagtaagcacattatcgtcagctttgatagatatgatcagcgtgagaacgaaggtccatagggtatcgctgaatggatgatgatgaccaaagggaagagagggtgaacgaaggcattgagagaaaacccaacaaaaaaggaaacaccaacgcttttcctttcaaactcccatcgtcactctgtctcgttccatttgaactcatctaaatccattgctctcccatgtctcatccttcatcggccccagcggcttcatcctcacagatgcctgctcctcctcccccttcgtcagctccgaaacgtaagatgactgagcaagacgcgctcaaacattctaagtaagtctttgttcgcattcgtcgcgttccagttcttatctcactgttcttctttctatcctttcgctatcattcttctctccaggcggtttcgagcccatgtaccccctctaccagtcatactcaatataccggagagtagaatgtatcaggatctcgttcagatggaacaaaagcttgactggacaatcacaaggaaacgtgcagagattcaagacgcggtcgctagaccgacaaaggtatgtctcctcttctctccgtcactcttgttctactcaccccagatatcgctgctcttcctcaagagccgctccctggaattgtgctctgcggtagatgtagaccaggaatgatcatagctgagctcattggatgcatgcctttctgaactccagacaaagcgacagctgaggatctatctctccaactcctgtgttctcccagagacgtcggatgtttccggtcttgaccgttcacctcccaggagttggactctcaaaatagaaggccggttgatagacgttcgttctctctctctcttgatgttggtctccgagatttctcaatgcttgtatctgaaacacttcctctttacggttgtcgttctgatgtttagagtggaaacccaagacaggacaagttgacgaaaagaaagttctcaaccttcattagatctattgtcgtggatctgaagggaccaaattatacaatggccgggcctactaatgggaacctcatcgaagtaagttcttttgcctatgtttcgctacagaacactttccctttaagtctgacaagcatctgtcgtgccttcctttattctgtcttaatcagtggtacaaacctccttcgcatccccaccaggacggatttaccattcaacggcctctatcgccctcacacgattcatcagaagggcttccctgtcgaatcttgatgcagctcgattacgatccaccaaggttcaaggtgttgcctcagttggcagacctgattgatatcaaggaggacacgaaggcgagcgtgttgcaggccgtttggaactatatcaagatcaaaggtctgcaagacaaagacgaccgacgaagagtcagaggagaaggcgcatttggaaaagtttgtctgaatattttctgtcagaatagctgttcgcaaaaccgtcttgctagccaggagtctgatccgtgatgtctgtctcttgtagcttttcccaaaccagccttccatcccgatgcacatcttaccagaaatcatcaatcaatatttgacggtgcctgaccctgtcgtcattcactacaccatacagacgaatgttgaaaagtatacccatccgagatgtttcgacgtagaggttgaagtcgaggacactaacagatctcgaggaaacgctatcctagcgagcttcgccgaggaaggagcgaaagaagttgctggtttggaagaagaggtttgctcccttcctcgctttcctgttgcttgtcttgccgttctcactagggtttaagttttctctgtctctctgcgtagatctcgaacctgtcaattgcaattcggaacgctcgtaccaagagagactttcttcaatcattttcaaatgacccttcaggctttattcatcactggcttgattctcaggctagagacttatcccttacattaggtgtggagagccagggcggattccccaatagagggctaagcgcggaagatttgagacggagcgaactgtttcatttgccatgggtatgtttgaaggtttccttgtctgaagtttattggcgaaccaaaaaaaccgactgagctgatatctcttgctgtcgtcatcaattaaacttcacaggcggaggaagctactgtgttatacgacggagcaaaactcatcgaattacaacttaaagctcagcagcaacaacaaacccaacgtcgttgatctgtctccgtctccctcccgctctgttgtcatttgtataaatcccttcgctaccggtctttctcaatcgcctatactccttttctgagtgactgtccgacttgtacttttcttgcctgatctatccatggccttctttttatctcgtcgtgcgatggaaacccttttctctggcctgctgacttcccaaaatacttcatgttaagagcaaaaggacgttcaatcactatcccaatgcatctgctgcaggcgttcgtccacattcgcatctccttcccctgtctgctcttggtcgacgtccatcatatacgcttcttgttgtccgtcagggtatccgttcgattgatgattaggttcgagattttggtctagcaaagaagggtctatcaactgttccctcacttgctgtccgtctgtgtgatttaagaatgaatgggtttgatccatcagagagtccgctctaagtgatgggtctactagagaagggtctatcattcctctcgatcccgaatcccgtgcctcgactggctcgtctagatggcccatcagaccatcgagggatcgcccgttatgttcagatacatagggtgaccattcaggaagttgggatgacgagtcgtgattatgagataacgtatcaatgagtgatgtgaagccctgcacagcttcaccatccccaatctcgatttgttggtcttcgaggaggacatttccctccaaaggatttagttctatcggatccgttgattgatcaagaatagaaggatgagggtggtgatcatagttggtggtggaagtccgtagtctggatcgagatttacgtctattacttggagtagaagtcgaagctgctgatgatcgttttgggtcaacgacttgccagcctgaaagatttcggtcgtctcctccgtccggacgtgtccgttcgattggaatttcatcttccgagtagacattcggtcttgcatcatctgacgcgtcttcctcttcctcctcttcggcagcggcattttcgtcatccgtcaacgcaccgttctcttcgtcttcatccatatcctcttcaccgtcttggtcatttccgttcgcaccaccgggaggtcccgataaatcgcttcgcgttcttcccaactcggccggtcgacctcgcggtctacctccgctaagaccgtattttttcttttgtgagaacgagctataggaagacgaagccgacggcccgtctgtgggtacggtagggttgtaagtttgtggtgtgaattgaatagtctgaagagaggggagcatgggatttgtcgaagagcctggatgcgtgtaatgggcggaatgtaggtgtcagattgtatgaagaggcttacgaggaatacacaccgagtagaaggtacaacgattacgaaccaagagccggaggagtagacaaggaggaggaagaggtggatgggctaccaaatatcatttcatttcctatacgttccatcagttttcctttgaagagcgtattattgactttcaagaatggggtgggtgtattgagaccctgttcgaagagaaagacaagcagtctgtcaatcagctgaagaaaccggaaaataaacaaaagcagtcagacatacaatcagtgaccatgtatgtgatctcgcgagctcggcatcgccctgggggctgccttctatccgtctggaagagctaccgttggaattattgtcggcattatgcctagatgagctttcagcttgaccgttcactggacgagagaattgggtcgaaggttctgataccggagcagaagagtgagcaggaaatgaaggaggagatgcaagaatagatgtatctagcgcttgatccagagaaattgttattatctcttcctaggctttgcagaattgcgaagggaagtgaaagatcagaacggcgaaacaggcgcgaggagaggtgggataattacctctatttccgagtcccactcttcatctgaagctaaatctcgatccgagggtccaaagtgagtaactggaacaaacgttggaggcaagagtgaggccatgctcgatgatggaaggggatcactatgatgtagaggtgttgtagaatggatggaggaagtagagacaacagttgatgcatcgggggtcatcgggggtgataatcagtcgaagcggggattacattggggttatctggggtcacaatttggggtacatctggacgcacagactcaggttctcttctgtgcctgttgcgtcaccgtcccttcgatcgttcctgatcgtaccttttcccttttttttctttctcattcgtaccttttcctccatcatcttttcatccctggtctatttttcccatcccgcatctccacccagtcaagacagagctcttccgatgacggcgaagacttccagtgcatccgctggaacgagaaaaaagaaccaagcgaagaaggcggcaaagcaaggctcaaacgagcaatcctccaagtctagccaacagtcaaactcaaacaactcagggaagaccaagaaggagaagcaggcaaccaagctcaaacgaggagtccctaaaccctacaccccaccacccaagccacctcaaccagccgttcccgatccgcttgacgcccttggcttagccagtagcttacctgccgagttagttgttgtcctcagacggttaggcaagaaggacgagatcactaggaggagggcattggaagagtttgataactggcttgaaaaggccaaaaatgacgaaaacgaacactggtgggtcgaggttatcggacctgtctgggtatgtctaatttgaatcctcttgtgtgcaatttctctcaacgttcgtcactcgacttactcctctcgactttctggtttgctctcccttcctctacacagctccatcacctgcctcctcttttgttcacctcaaggcttaccccaatcactcttcaaacccaccaaacaattttgacccttttcccttcgctcctttccaccacccttccctacttgctcgagttccaacaacgtaacgtcctgggtactctactctcatcctcactccaatcttcctcagtcttcctccagacgttcatcaactctgtctcttggtctgtcaatgaatcgaccgagtcccagctggaattgaatagctatcttggtctcctgactgaatacctctcaagttctatactagatccctcggccatctgggagagcgtgtttcctcctgtcaagattgctagcgctggcgggcaaactaaaggcggaaatcagagagcagcgcaaagttacaagggccgaattgaacagggcggaaagaataacgccgggaagaaagaggaactcgaagaaagtgaaaaagtgttggaagaggaaagagtcgaaagagagcttggactcagaatcggaggcttggtcggtctgagttgggtcttgagaggtgagtcttttgtcggttatggtctctgctattgccgtatatccccttgtttgcttccctaatgatttgccttaccactttgcgttttcagaatatcctcagtctgaagagactggaactagtctatcagaagatctagtcgctcttctctcgactccttacctctggtccgctctctccaacactaccccaacatcggagacgtctgctcctcttgggtacggtcagacctcgattcggaaggctgcttgggactgtctgaaagcgttacttctcagatggcctggcatcgccaaagcgaacttggagatcttgactggagaaatcttaggaacttgctggaatgagtctgaggtggttgtcttgagttctgtctgggatcccttacttctatttttgactagtgagtcaacatcacggtttcaatccttggacttggctcaaaaagagacagatttgttgagcagattattctcatttgtctgaacagaatttcctgaggcttggactatcgaaaagaccatgaacgctgaggaagatcaaattcctgctgtgcaagagactgagcaggcaaataatgatgacggtaatcagaacgatgtcgaatcgaagatcgaatcctcgagatgtgcctctcctgaaggaggctctccagcatactctgctttccttgattttcttcgttccggatgtagaggagcaccagtcaatggatatctcatccttgttgtcgttctatccactttgccaacggaggtacgtctttcttcctgcacatttcctcttctttatacatacaggttcacagctttctcacttttcgtacaactacccaatcttttctgtttcctctgatctctcagattttccctctcacagagagctcgttcgatgagctctttcaggctatttgggctcctcttccttcgctactgtcttccagtattccacagattatcgagactctcctttcaaccgtccttgagaccgcgaccttcctttttactaaacaagcccggttgtctcctgataatgtagactcgtcgcgcaagttcctagccggtcaagttggtttgtgctgggatctaggtgtccttggactgcttcgtgttagagagtcagaagatacatcttcccgacctcgtagaggagtcttgagaggaggtagacaagcaggagaagagattggacttggggttcgagaagctagagtactaggcacagctttagggaagattgtagagatcgatcccaaagcaggagagctcggatggtccgagattgtctccaacaccctaggcttgctaacaggtccctccggtacccacgctgcggaggaagagcaaagagatgatgaggaaaatgagacgctctttccgttggcaaaactcccgtccgtcttggcagcgctccggacgaaacttccggcggagctcgaagcatcgtttattcaccttctaggagtcgttgggcgactgaccgtcggttcgttgatccaggagtttggagactgggaagaagaaaccaagaacggaggagaggaggaaaaagagaatcaaggagctcaattgaagaataggactgagctcgtattggagttgatagcgctcgaaagtctgggggctgttctgagggaagacgaaatctttgctagggtttgtctgctgtcactctgccttgatcttcacctgcatcttagttctgacaactgtggctgatggtttgctggagtatcaggttgtcgacgctcttcttgccaacgagactaccgctcttttctctcttcttccttcatccgcatctgccagactctatagagtctacttccactggagagccgagaaagaaccttgtgaagaatcttaccattctctttgtgacgctcttcgttcctcttcgagcttgtccaaggatgttcgattcccgatcattttggagcttactgcggagttcatggggttgcctatagagctagccgatggtcaggagcaaggcgagccgataggattggatgatgttgcgaatgtcttgattgaaagtctggagaagggcaatattgatgaagaaggagcggaagtcttggcttccctggtagtcaggccgagtatgtttcaatcatctgttgaagatctttatcttttacataacaaagtgttcatttatctgatgtgtttgcttcctatttgtgcccttctagctcccttcctcactccgacttcggttcgaggcgccgtcgagaaggttttccttctactcaacacgactgttcgaaccgtcttgttcgatgattcgtcccttacccgactctcccacctcgaacccattctctccttgctaaaagattctcttcctcaacaatcaatccaggatctgcttgcatctgacttatcccgcgatctagtggtatctctgttcgacactggacactttgttcccttgctatttggacaaggtcaggctgaggacgtgaagaacagtgctagagatatctggaaaacgttattgggacgcgcaggagatcaagaagatgagttgataaatttagtcatggtcgaagctcgaaaaaaattggaggatacctctagtcagatctcgtatgtcttttctcttgcttttaaacacgctcttggtgctcttggctcgctaagatagagatatatcttgtcagtgtcgagattctttggtctggattaaatgaggccagtgtgccttacgccgccagatccgtactctctcctttcgatctatttcatctactacctccggcatctaccatagtcgaccaactcaattccatcagcgtccgtcagcttcctcctgccctcgccgtgatcgacccattggttcctcaactttcagaagacgagattcagccatctgttgatcgagtacctacagactctgccggatttggatccttcgctagattagctaccactttaattgcctgctttgctgctgataggtctctgctaagacaagacccgtcatggttgaggatattgacaacgttcggaattttcgcctcagacgaagttgctctgcctcggtcgtccgctcatgttttcggagaaagggtctcaaaagacgtcttaggtgctatcgtcctttccaccgactctcttcggtcgtacgccctctcgtctctatcaagctcgatcgaacccgtttggtatggagctgccacctcggcacttacaacaggcaagattgacagcgaggacaagctggtcttcctactggcaggacttcttggtgtggccaagtctgaggaggacatttatgcggctagagttctgagggatttgttggctggtgtgcttttctattcaggagcaaatgccgaggatgctgaaaaatggctaatgtttggacgaacgcttcaggacaaaggtgagctcttgcgcgctttgattgttctttcagcctatctgaacataaagttaccatgttgagtcttttttccgagatcatacagctcctcaatcatcagttgctatcacccttgctactaaagacatctgcctcgagtctaccaagctcgatcgattccagaacgagcttgccgctgatctaacaggtctcaaggcttcagctgtcaatacaaagggccttcgggccctccgacttctagcagccacagcccctcctccagagtcctctgcgatctttttaccagaactccgagcgactaggttgatgcaggttttacaggagtggatgacaggtgacgaagaggatttgagcgaagagctggactcaagagttgcagagatgtttttgcatctcggtcctattgtccagaacgatctgagtcggttcgagtttgtgtttgatcttttggaggccaacttagaggtccgttatcctttccattgcgtttatcctggtaattgacctggcagcatcaatcccgtaaacatcatgattgactttctttgatcctgatctttactataggccgcctcttgggatgaccccgcctctttaccattcttggctcatactcttcgactactcgctgttgtccgagatctcgcgtttgccaacaaagctctgaaggaggtttggatcaagaggaaagacgcatctttggatttagtgttcaatctgttcctctccgaaaagggttcgtttttttcccttgttgacgagttgatttacatctaaatgaaatcgacgatcactaaattatttcttctttcacagctggggagatgtctcaaccgctctcaatctgtcgtggcctcgttgttgatcttgtagatcaattgtctatcaacacactcactcccgaccgatttggacctgtaagtgcttggtcgtggctcctatcaaaattcgtctgccgattgacatcttaaattgttctatcagctgtgtttgctcttgaatgacccgtctgttgatgttcaaaccacggctcacggtttactcaaacaaatgatcgagagaacaactgctgatttagttgtccaggtggaagttgagaccgataatgagatcgatataaagctgcccaaagagttgatcgagacggtagttacttcgctggagttgcctgtggctgacaatccggctaaaaacgtaagtttcttttcagacgcaaaatgggtatgtagatctcctctgatttcgtttttttattgtctcaatatacagtttggaatccttcttggatgggatctgatcttctcccacttcaacggagcggtgagttctgtttcgcgtcttctgttccaatgctcgattggtgactgatcattatcatcctttagtctcttaaaatcaaatcaagctatatcgagcaactccgaaacgaggagttggtcgctgctgtcttcatacccaccatcctcacgctcctcaatgtttcagaaaccaagatccaattgtttgatcttgctccctgggcggtggatgaattcataattgactgtaagcgccgataattcatcagatgcgaaactcttactcatctgacttctctctattgggtatggtttgtacagtgtatgatccggagactccctacgcatcggctcttttcggcgcacatctcttttaccaagcattgattgttgcacctgtatgtcgcagacgttcgcgctcatgatccctttgaatcacattgaccgtcttccttatatactgccaaattctagtcgttaatccgaaactggtggtcagatcagaaggatcgtcaactctcgatggctgtttctacctttacctctcgattcttctctcctgtggtgatcgaccacgagctctcaaccctgcgagatccagattccatggcggatcttcaagacggcgatttgactgttaagattctaccggcagtcaacgaagttaacgcgtcgtacgtggtggacgaacagccaatggaaattaccgttcggttgccttcggattatccgctacatggagtcgaagtcagagacgttcgaagggtcggtgtggacgaacgaaaatggaaagcttggttgttggccgttcagcaggtcgtcactacccgggttcgtgatgtcttttttgcgcactctattcctattccgcctttctaatctttcgacgagtctggttattgattgttgttctcaatgcctttatcgtcaaacaggatggtcttgttttggatgctctgacactgttcaaacgaaacgtatcgcttcactttgccggagtgacagattgtgccatcgtatgttgactcttctttatttttctcatcacgctgttctcgatttgtgctcaacgctgtcttcatttcctctctcgtgaaatcttgtagtgctactcaattatctctgtcaccgatcgaacactgccgacaagacaatgccgaacgtgcgctaacaagttccatggctcttgcctctacaagtggttcaacacatcccactcttcgtcctgcccattgtgtagaactctcttctagtagttcacttcctttctgcaacccatgtctttcctccttggacggtataagaatactatcctgtctagactcaattagaactgtatcacttatctataacattgcataggctattgatgttgcatctgtttttctttccttcttttgtctctcttctttaccccgcaccgtcaccgagttgatcaaaaagtttcaatatgttgacttgatacgacagcttgacggaaggcgtgatgatttgagctttcggagaagatcctttgaagatcgaatggtatggaagaagagcgtggaccagaaagagaattttcgagtatttcagaggctcgaaaggagaaaaagaaagaagacaaaagtggaagaacacgcaagacgaggcgtcatttgttctatgaaaggcaatgtcccgcattttatctatacgctccatcactcttgatcagagagctctaacctgacgaggtggtggttggctgagcagcagattcagcttgtgctcgctcagcttgagcttgaagtgtggcgagctaatgccatattcacgagcggatcgaagaataagagaaggagaagaaaagaaaaggaagaagaaaatacacattagttcatatcatgctcgttctgaacgattgtatcgggtaagatggatactaacatccgtgaagatcaaactttggttcgagaagtaagcgaattgacagatgacggcgatatcaaggaagaccgtcagaatggatcctctaccaaggcatgcaatccaaaggacaaccgaaataagcatctagatcaagaaaataggcgagctgaggcagatttagcaaagacgtacagtaaccaaggcaaattggttttgatccaatgcgaatctaatgatttgaataggatactagcgatatctgtcaacccaccccccggacgaaccgattcgattcaagattccaacaagactttagcaatgatcgaatcgaagttgaagagtcgagtgtccgtacgtacaggttaggttaccgctgatggtaaagacaaacatgcccagtgagaggccagtacatctagtctcccaattatggtaaatctgagggactctggatccgatgtcttcatcatgagagagattgaagcacaaccagagaaagtaaaagcggcgagtgagaaccagctcagattcaggccgacttcgacttgtctttgctcctatggtatctgaaaagcaaaatgacgtatagattcaaagaagaacgtacaagtgacggctgagatccaacccaaggtttgactcttccactctatcttagtggaattttctccatcggtcggagggtgtgagtttcctttcccccagacgttgacaccccaagcaacgagagccgttccgaacacgaggccaaacgccaagaaatgaacagcattctgaatcaaaaatgatttctttctagctggttcgactgtcgttgatttcggaaggagcggactagactcggtgttatcgtctgaagagggaacatgaagttgctcgacttcagaggaaggagtggccacggcagggttctgacgataatagtatacttggaacaggaggacgatatcgcagattgaatagtagcctatcgatcgattgtggaagggaacaagaaacacatcagctgattctatcaattaggctcggtgggacagctgccagtatctagctactcactagcaagaatgatcattgtaggcagtagaccagccatggctcctcccacctagaaacactcgatcacaatcgccactatcagccaatatccctgtgtacaccatgaagatagagagagaaaggaattagatagaacgggaagcataccaagttggtgacatcgccgatgaaccaaagaacgatgaaagcgatagagagaccttctcccgattggagaacgtagttttcccagatctggggtgtatatacgactagaaacagagatagagaagcagagcaatgaatgaaggacggtcagagagaacataagattaactcggccgaagccggcctcgacgaatatagggagaactaaccaatccagcaagcgatactgatccaaccaaagatactgcttagttgtgtgtcagagggtacgatcatgactgaggaggagcttgtctgagctttagttcagacaaatagggagtgaaaagaggaagaaatagaccaaacgaccgaagggtggatagagagcaagaggagaaatctgacggcgctcgactttggatggaagtcttgactcttatacgtaatttgttatctgcccgtcattccatcatccttctctctcaccatcacatctagttacatccacaactaacaatgaacgtcctagtcagtgatctccagcactctcacgttgtgtttatacctcttttcgcattcatctgaagatctgtcatatcttatgtgatctgttccgtcgctttataaggagcttcttttcggcaagtccctaactccagccgaacgactgaggcagcatcaacgagctctgcagaaagctcagcgggaactcgacagagagagaggaaagctcgaaaagtcagtccggacgctcatcatcatcattctttctggctcttacaaagtagctagtcaacttcagtgtcccaccttgttgactcatcgttctttctcccgttatgctggttgtctgtacagtgaagagaagaagattatgagcgagatcaaacgaacagccaaactaggtcaaatggtaatgtcttctttgttttctcgtccttctgcattgcaggcgaatgaaccagtgttttgcttccctctttttccacaacaaacgtggacacagaacgcctgcaagatcatggctaaagatctcgttcgaacccgtcgatacatccaaaagttctatgcgatgaagacgcagcttcaggcggtctctctcaggattcagacactgaggagcaaccaacagatgggtgaggctatgaagggagcgacacgagcgatgggcatgatgaatcgcagtatgaatctaccacaagttcgttcccgatcctatcgactggctcgatcctcatggtttggttggagtcaaagatgaacaagcgaatcgctaattcatcgtgtctatggatctctgtgtggtccttggttcttccttttctaacaacatcagattcaaaagatcatgatggactttgagaaagaatctgcaactatggatatgaaggaggagatcatgtcggacgcggtcgacgacgcgatggacgcggaaggtgaggaagaagaagaagaggagggagaccgaatcctcaaggaagtgttggatgagattggagtctcgcttggccaacaggtcagtctttttgactgttcctttctgccttttttgattgtgatatgttgctaacttgagagaaacccccttgattcttcttatcctctcactctgttacccttcgtccaaccacttccgctgctaaacatagttgggagacgcaccgtcttctatccaagaagcaaacagtccaatgccttcatcccgtttagctgtagcagagggctctgatctcccgcccacaccggcgtctgctgggggagggggcaaccctgacgaagatgctctccaggcgagactaaacaatctcaaacgataggatttcttacatctcttggagcctgtttgtctgcaacggaccgttctatctgtctttctgaaatctgcttgggttcttttctcgagttgtaactgtatgataattagtgtgataattaaatatgaataacacctaagtgacagataagccgaagaatacaatcaaatcgtctacaaacccaaccttctccgtttcgacaaggacaaggacaacgaccatctcctcaccatctcagatcctgtcactcatcttttccagacagaacaacatgctcgtcgatacattccttgaatacccaagtcagtagttgtcccatctgaaagttgcagtgtttcacaacagacaactcagggtcatgagcggcagcggctgagagtttgatttcattctggttcggaccttaatcattcttctctttcaaacaccagctgcctcaacattccttgcgtccattgggtctctgtttgttcttgtacaggcatacaatctgctcaagcttgtcgcccagttgactcttatcaagggtaccaatgtaaggtttcttgtctcatcgagcatccggagaagaaagagcgaagacagggcttcttcgccgggtggtctgtgcgcatctcacttttccttcccagttgctcacgatctcaatgggaactcgttgtatgcgctgtgtttgtttctctagctcactaagtatggtgctggaaaagggtcttgggccggtacgttgttcctatccttcctgtctgtccgaactggctacagtctgcttggtacctggttactgacgctcgcttatgacttatgaatgaaatgatacagccatcactggttcgaccggagatctcggtatagagtttgctcgacagatggcgaagaagggtttcaacatcgttctcatcggccgaaaccacgataagctcgaggcgattggccaggaaattcgttggtttcttttcatacgatgattcctggtatgttctctttgaagccgggctgatcatgaccatgaatgtgtatcatcgcaggcattaaatacaaggttacgacgaaggaggtcgtcatcgactttggaaatccccagcctgaggctttcgaagagctaaagagccttgcctccgatttagagattaatgtgctaggtaagagttcatctttcgcttagtgagagcaatcactgaataagctcttcggacggttttattggcaaattagtcaactgcgctgggctttcccacgagatgcctgtctacttcaccgaaaccagccaggatgagatgctcggtatcgtcgatgtggtaagaacattccatctacaacacgagtaaatgcctctatagatcactgatcgttatcgttctacgtgcatacacccacatcgtagaacatcaaagctacgctcctcactactcaggcactccttccagccatggtcagccggttagtccctcttgtcgaggttccaagaagtatttacaacccgctgaaattcgcttgttttgaccaccatagacataatggcttggttcttactgttggatccttctcggctctcgttccttcagctatgctcgcgacctacaccgggtctaaagctttcctcgagaggtggagtcaggctctcggagaggaagttgaagagtttggtgttgatgttcagctggttctgccctactttgtggtccgtatcagcatcgatgttgaatctcgagttcctccttcttttaggtagatcgaaaggctaatattcaaccgaatgaatgaacaacaaataggtctctgctatgtccaaaatccgacgatcctctgtgttgattccccttgcctcagactttgttaagtcgaccttatcctctatcggactgtcccgaggggcggtttctagacctttcactatgacaccttactggtctcacgcattgttcgactgggcacttgctacttttgcacttggaggtcgattcgccatgggtaaagggttgggtatgttctgtctttaattgttcttcagccgtgcgctgtaccgttaaaaagtttacatggctaatgaggcacatacatgtgcttgattggtcggctgattcaacagctatgcacaaggatattcgacgacgagctctggcaaagaaggcccgactcgcaaagtcagaatagtttcggttatcggcctttatagatttgagatctctagcttttgtctttactccttctctgtacccttcacattcctcttcgatcttaacgagagaatgaatctattttgaataaaccacgtgatgtacgcttaacatggccgagagattatgatgcgatacgaatacattcccttctatctttcttggttgtataaattagaaagagtagggtaggcgtcatgccgtataaggttgactgtccagtcaaaacaaagggcagggtatacagaagagagatgttacaccggacagactcctccgatttatgttaggcaaggcagaatagggcatacaaagtgtttaacccgttttaaggaagaggtgatagaagacagaagacagaaggttgataaggactacgaaggagcatttattgctgggtcggtccagccgggataacatagttcgagttccttctgtatgcgcatttatggcaaggtcaagaggattagatttggacgtagcggtcaaatgcagcgtttccgaacaaagaaacacgtggaggagaaaccaacctgaagttctctggcgtcatcttcattcagatcactagttccttcccaggcctgatcaaattctaaatcgatagcgacttctagccctgttcccgcgtggggatctctctgtcctatccctccagaggaagcggcgccggtcgttccagagccattgccagtactcgaaggtgtgaacacagaaggcgacgtcggcgtaaaaggagagagatttgatagcggtgacggttcgtgggacgagggaagagatgaattggacgatctggcgagaccacctacgagaggagcgccatttggacctataataggaactgtgctagaagcagtactatttgtagtggtggaggttgttgtcgatgatgtgatgatggtagtaggggggagaaaggtagccaaccgtggaatcgtagtcgatggattactcaatcgggggataggaagtatccagatccgttctcgcaagcgtttgtgctgaggtttcaatcaccattcaaagcgagacggttgagatataaatctgaaaggaggaagtattagaaggaaacaagagagtgtgaaacggaaacgaacacgttctcgatcttcttccatccggcgcagagtctcagcctgcgaaaagttttcaaagtggcctcgttttttactactcggtttgctctttgagatttcatgcactctgtttgcagtccaataggtgcaacctgaaatggtaagtaccacactcggcgaagtctcatcggccgggtagacaaattcaagaggaaggaaaaagagcagatacgaaccttcctttccttagctcaagtgtctgaagagcttcgtccacgatttctggtcgaaccaccctctttgtacgccaactttccaagatctgttattgtacaagtagttagccaaaaacttgtcttacaactaggattcgttcaagggaaaaaaaccccttttgaaggcaggaaaaataaagcagaggctagtcagacgaacttgttttgcactcatcaagttcaacgcgccctccctggtttctggaaccacataatcaacgactttgagaaggtctctggtgatgtagtcgacatacggtccatctggaaggccgaccagaagggaagtctcgcataaagagtccaggaagtatagtacgttgatgcgagagttcagcgaaccctgatgatgaacaatggaaccatgaaagagacgtagggaatgttagtgacggtagatcaattcaaagtgtgaagagggagttccaaaccttctcggcttcttccagtatacactcccacagatcttctccacatctggagccatactttatagcaaagccgacgacccggtgaatagaagcctgggaggcttcgagccgacggagaagccctaatagctgcatcctgatgtcgaacgggtcgaacgaactcatgtcaggaatgaggattcagaagctgttttcgtcgtcagaatgggagggacgagttggtgtggccagatgcaggctaggatggtcgatcgattttgaaagtgctggtggaggtgatggtcgttgatgatgatgatgatgtcggttcgtctcttttttgtcgcgctcggcatttgctcgaccaactctgagcctctgttgaattgcttcgttctgttctttcgatcttgctctgttgtgtatctctcatgctgatattttctatatgtgttctttgatcagaaagacagaaaagcagaaagacaaagggagacaggaaggcacgagaggtctatgacttttatacatcgaaactgtatctgatagatcatctattttttgaatcccttgatcatgtccatcccaatcttttgcatcatttgaagatcctgtagatatgagggccacagtcagccttaattgtagcacacatatatggacacacacaaatgaaagaacttgcctcagccgagatatttaatcgctcaacgaccgacttcatttcggacatcagattcctgaactcggggtccatcacgaacttcatcattgctagcttccccggagggttggccgttgtgtagcctggccagaaaggtcagttagcgcacgtgagcctgatgtcctacgagaggcctctataaagaggagagaaaggaagaacccaccttgagtttcgacgtaagtggacattttctggaataactcgactgcctgctggtctgccatgagctggtccatcacatcggtcttagaagtaagctggtctagcagctgcttgttggacggctccgattctgatgcgtacgatcggatggaaccagtgttgaggttggaattgaagccgatgatcgggcggatggagggaaggaccgctctggagacgaatcgcggccgggaagcttgaacaatgttcgaacgtgagcttacagaaagccgggagagcgtgttgagtgagagacgcatagctgttgttgcctgtggtagtagtggtagtagtagtagtggcaatggtggtggtggtggtgagagtcgtggccggtggtcgtcaagcggctacggtctaggacactgaatgatcttggtgggcaactacagaaaagactacaaacaaagagtacaaataatccgaaaaagactacaaatttacccgagaacaaacactacaaaacgtcgtagtcctcatctgtagtcgagactacaaaaaaacaaagaaccaacttacgcccaacagatccaggcacagacgactttcgccatctcgcccggtcgtttccatcgttctacgaccatcacgatcgtctttcgttgaccatctttcgctacctttctcttctgagagcctcgcttcgggtatcagctcacttcttgttgagaggaacaaggcagaaatggcggcttcaactacttcggctcctccgctaccgaccaatgctcccccacaacattcacccttcgggctctctttaggatcccctacctcggaagtacctcggccgacattcggtcggggccaggcccatgagaatccacttgtggccaagcgagggatccttcttcgggcatcgtcctcacgctcaaacaacctgacagctaaccatccagaaggcgagctcgatcaaagccgactcgataccgaggagctcttccgcgccctagccatcggagaagtaagaagggtcgaggcaagactgaggtgagatttttcgggtctcgttcctctgtctcttcgggttcatatcagcaagatcgcttcatagactcacccgggtagatgtccgttctgttcttcctctcatgctcatggttgatggccatttagatcctcggcactttcgaagcagactgagctaaggacgatggtagggtgcgtatcttgtgttcacccttggtcctttcaagattagtctgaggctggctcaaacatcaaactccttatccgcctttctcaactctccacagagaacgatatagagatctgctttcttcttcagcagctctatccaccttgtttgcatcctcaagcaggctgtccgacagcctcaaagtcatgaaggccgtcacgtcctccgctggcgagggaggcgtcgcttcgatctctggcagcatcggcaacctgcgaggaggtagtgtcaagagtgatgctggagatgacgctattgccgaaggttcgtctttctttttctgcatctcgagggtacccctcactaaccggcttcatctcctgcaatatctatctgtaactccctctcagacttagacaccctacttccgctggcttctcaaacaaagctcctgttagatgcaccagaaatactttggcggctgctcgagcgaaaacagttcctacacgccgcctggctcttttctctaggtagaatcgttcatcaagaggtcggagagatttcagacacttctgttagtatttcgcccttgcttctctacgctagcgatcgaccatctgaaacttgatgtctgtctctgctgttttgatgtaagatccaacttcctctcttgcatcgtcaatgggaatctctaagcaccttccggtcacaaatcgttcacagagcaacgcttggactcaaggaactatctctctctcctttggtgggttgtcacgttctcattttatccccgtcgtcatcatgcgctatgctctcttttgatgactaagatgctgtttatacgtctcaaatatcacactcaacaggacatgtcccaaactttgatcgctatcctccttctagacaatatctccctgcctcaggcgctgaacctcctcctcagccagcggacaaaactccttcagactgcacttatctcttcaaaccaacctgctcgttcacaacaatccgtcaataatgcgcttctctcatctgacgatatctctgccgttcctccttcgaataaagaagggtttcatcgtgaaaacatgactcaagaccaggtccaagcgctcctcgaagaaatcgtttccgttcttgggggtaccatcggtcttgctagggaaatctttgcttccgaggaatccgatcaaacatccggaagcagtaaagcggaaaagaagagtttgatcgaaagcgtcattggaggtattgagagaggagacgtcacggacacttcatctcaggccctgccctcagatcaaactctccggtcaccaccgattgattcggttgacgaaaatggtgatggcatgggtaagctgatcagtatgtcaaaagaacggatttacaagcggcgagcgtcccgattagcaatgtcgttctcttttcctgctggtgtctcgcccaacctgtcctcgccggcatcgaggtcttctccctttggtctttcgaacgcacaaggcggttcactatccacttcatcccagctggttccaaatctcacaacagactcactctcgagagaacggttcctgtcggaaccagtaatcacctcatcaggtctccttcgacaactaccctcttctccactcctgctccggtacctgccgccttcgataaggaactacactccttttattctttcctctgaggcatcgacctcgtcgtcgatgtcgaatctgagcccaccacaattaacaaaatcgctcgctgcatggtttcagcaaaacacttccctccttcattcgaccttacactccatccttgcctcactctcgaccacggccgatgtttgggccgttcgggctcacgttggtcagttgctagccaaagtacccggtttgaaaccggatgaacggaaaatccttgaagatgtactggaggaaggctgggcgggccgagtgaaggacgtttgggactctgcgttcaaggatctaggtgatagagttgaacggagcgttcggtccaaagtcagtaccctcagcgaggctccctccacatctggcggaccactgttggctggaggaaaagagatcgagggggatcttaatccatcgagtttcttgttctccgcctcgattccgttcccttcgaacgcagagtcgattccaccttcaacgagcctgccgattttccgggctgcgcttcggagaagggtcgccggccggacggctctattggatggcgtgttgagagaggccgaggctgctgccggtgccatcaaaattgacctggaggggctcagaaagctagctgaaggcggagaaggaatcgagagcactttgttaggaaagtacaaggtgttggcgacagaggcacttgaagggctagctgtccggttaggagctgttttggatgatcaaagtttacttggtgagtccagttgtgcgtgtattccatgtgtattccttctgatatccttgttccattctgtatgcaaactcttagcggattcgatcaataccgaaatctttgtgggcagggtcgcgcttcatttggtatcaagcggttcattttactcggatatcatgggtccgggcgtctctcctggtaggtttctttttctcttgcatccatttaatacccggctaagatgaccaaggtctcactctcatccatccttctgtttttatttgcaatccagatatctggcgtgctcgtctaaaggagattcatacacggtctcttgtgaagttcgagtcggcctcaattcaccgggcgctcgaccatgtccggcgcatctttgagttggatgaggtggtagcaaacacgacatcattgtatttgtggaaacgtatgtccttctttccataagaagtccaattcttttctgtctggtattgcgctcggaactgactagccaagatgggatatcatagcatgtaccatgaacccctcagttgttttacctggactcccatcgagagaactccacctcgccctcaactcgctcgtcagttcgattcagacattgggtacgccaccttcgttcgacctcaaactatatggaagttctcttcttgagaactttctcagaagattccgtgagtcggacagttgggagactgtcaagggaaagactgctgtccaggtgctttgggacgtgttgttcttgagaacgttgagctccatccaactgagatcagagccgggcacggatggcactgtgtgggatgatttgattgatcggttgaccataaaggtatgtttttctttctttcttcgcttcattatcacgtacatctaaaccggtactttatcgtctaattcacattccttttgaatacatgacaggcccgggatgttctcgccatcgaccaacaatctgtagatttatctgaactgatgcgaccatcgattgaatctgaactcattcgttgccaaactgtgctttgtccgatattgaaacttgggtccgcctcgcaattgaaaatggattccaacgggtcggcagagaaagcacaaggcgaggccgactcgaaacatcaagctttacttgcccttggggtctctgggttgacgaccacaacaacaacggctgcagcggaattacaatcatctttggctctgatcgctccttcccaacggttcagtctgttgtcaattaccgcaactttccgatgacttctagtatttcaaccaggtttttttcactatcgtcgctacatatacattatacatatacctttcctttgtgatgtttctattcctatttgtttgttcgcctatggcaattacgtggcttcttctactcgtcttcagccttgctgaattcttatagagtgtcttttacaaagcgcgaagaccttgcatacgtgaacgcgatgcttggttctacttgcccgcctgtgttcatgtctttaccttcttcagggaaaaagcaacaagaatcgattttaaaaaaaggtcattggttgaacaaatacaatacacgttagcatctctgcgctagatgcagctctttcttcaacaggaaaagattaaagaagatagatcagaggaggggaagaaagagaagacggagagaagagatatcttaaatcagaccgagcccccaccatctctttctctttggcttcgactctccttctgttaacgacacaggtgccgactctgccaccgtagcctttaccgctgatactgatacgggtgccgggtctgttttaacctgtccggtagctccctcgacggcctgaacgatagcctctcctcctttagtcgtactgaacatatcacggagtaatactccaacggatcgatttcgtttctcttgaagatcaactagctcagcttcaagtaggttgatccttccttgagcttcatcaagttttctttcagttgttaaagataatcggataaggtgaagtcccttgttgagttgttaaacggaaagagcgaaaagtttggatgagagtggagtagacagaaatggatccaaacgaacaaagaagtcgaaacaggttaggctgggtctgacaacatgagatacgacgatcgatccaagaggccgtcgttccaatatgactttgacactggaagcgatggctgaacgacataccatatagattccgatggctactccaagagcaggtagagcggcagggacgagctcactgtaccagattggtcgtttgggcgaatgcggaattctttttgaatgagcatgtccggaggaagagaagtttgaggaagacgacgacgacgacgacgatgatgatgaggacgatgacgaagaagacgaggagaacggagatgttgactgagaccctagacgagtggctgatgaggcagaagagggatataagtgagattgagagggaggatacgagatcggggaggacgtatggaaaggcgagttgtgaaggtcacgaccggagcgttcaagttcgagtctttgaagaacccgaacacaggatcgtgggatacccattgagcggagtgtgaacgacatctttagtctcctgcttgatgatttggagcaaaggatactgctgttcttgctgttgtcgctgctgttgccgtcgctgctagagaagaagggagcgttgcgtcgttgcgagagcaaaagacttaagccgaagacttggttacgcgggtgacgtaagttggaactgtcgtggttacaacccaagtaagacgtacacttacgtaagcttctgcacagcccgcttgaaaagttaactaatttcactttccagcctacgccttctttcccacacccaaccatcgacaccagcctcactactctaccactagacgacacagcaacaatggctaaagacgaagagaaaaagtccaagaagagaaagtccattgttcccggagaggaggctgccgcccctgttgccgaggccgaggttagttttgtcagtgaaaatattcggcccaatcctcggctaatcctagtttcttgaaacagtctcctgctaaaaagtccaagaaggagaagcgcaagtcccttgctggcgaggaggctgccgacgtctccatggtcgatgccgccgacgttgccgatgtttcatctcctgtcaagaaggacaagaaggataagaaggataagaaagaagacaaggacgagtttgccgtgcctttggaggccatcgctccgatcgctgccccgttggccggaaagaagctcagcaaaaagttgttcaagaccgtcaagaagggttcgtttgttgtcattctggtggaaacatagtaaaaggcgacgctcgtgttttcttcgcaaacaaagactgactggatgtttaccgtgcttcttcctttctaccgcttgttgccgcgtcattgatttttttctttgctaacgccaaaacccaatcggatcttttatcttgtctctgttggccgtcgcgtgtcttttcttcgcatttctcccacatcctttccatacctaattctacagcttctaaggctcgacagctcaagcggggagtcaaggaggttgtcaagtctctccgaaagggagagaagggtcttctcctcctcgcgtccaacatcactcctatcgacattctttcccacttgcctatcctcgctgaggagtctggtgtgaagtacgtctgggtgcttgctaagtgagtttatgtccttcaatatttgtcttaattgtatcctcttgcgtgagcttcggcttttctttttccgcccttcatgggggaaaacacacagaaagaaaccaatccccatgatctctgtctgttcttcggaatgcacggagggatttgcgtctgagtctgtaatactctagctttgggattctgacttctattgttgtttgtccttttcctcccttgccggatctttccttctgtgttactcgctcctcgtgccctgtcatctatcgtccgcgctctcgcgccttcgctatccttcatctccaccaactcttcattcttgcctctgttcttaaattcctctcgttccttctttgaaaattcaaatgaaaaagggaggaactgggacaggctgctggtaccaagcgagctacgtcttgcgtcttgatctgtgaggctcagaggaagcgtaaggcgtctgctacgggcgaggttgccaagggtggagaggactggaaggagggatgggacgagttaatcaaggaggttgacgaacttgtgagatctttttttgtcttcttttgaatgtttatattctaacggtttacgcaaattcatctttcggtggctaatcctaaactttatacacttcaatttggtaggaccagaagattgctttctaaaatcagaaggaagaaagaaagaaagaaagaaaagtgagaccgtgactggtatactggcatttgattcctatgtcttttctttgtttatattgtatctaagattagagaaaattggacgtaattagagggatacagagaaattggtttgtgaaagataaatttgtgaaacaagtaatagactacgcatgatcacaagaggaagtatgcaaatatgttttgtattgtcgacagcacaggaaagaaaggcaaggagagaagtaaaagggttataaaagggtgaaagataaacgagtgtcattgagaaaaagaaacatcatcaatcataattttccggcttgtgtagctcgaagttgagctcttagcttctgaacttcgtcctgaagagagttcagttcgtcaagaagagctattcccggaccttgcatctcccttggtgagagaaatacaggaagataccgcaagagtcgaatagtcggttggcaagtctcccatctcttctttgtagcctatgaaagaagaaagaggacgaaaggaggacgtactttgctctgtaatcatccaggtcattttgggtcttatccagttgtaccctcagcctgtcgatctctgactctaatctctgctggaccactcgtttctcctgggacgcctcgttcgctactgtcatcgctctgatcgataatgctctgtttcaagaacaagttcgaattcaaatgtttcgttattttcatgtcagggtccgcttccaacagaacaagaattacaagaaaagggaagctgtccgcactcattagcttcactcagagattcacaggcctcaatttgagcggcgagcgaactttccaaccgtcgtttgtcttctttgagtgaggtgatggccgcttccagctcattatatttctggaagctgtgtgtgtgtgtgtgtgtgtgcgcgcgcgcgcggaaggaggcaaggataatggagaagaagtgtcgaccgacagtcagagaaagtgaaagacagattgcgcgcgcacaagaggaaaaagaaagaaacagacttttgatgatcgacacctttaccagcatgctcgacgtatgccaacctatcttccaacatcctgacttgtcgctggtatgtctctagcccggctttactgtccatcacaagccgctgcgctctttctgagttacttttatggatgtctctctcccgcttgaacttcgctgttcgttcgatcaacattcgaccgtcctcgatcaatgctcggactcgttcggaaaacatttggataccaggatagggagtcgtgccgtttgtcaagttgtaagaagcgacaagggatgaaaggtcgggtgtttgtgacaaagaggacgacgacgataaggcgggggaagagatagttgggcctagcggccgagagaatgaagagggagccaaggcagaagacgaaggatgagacaaggacagagatgggctgggcattgtggacgattcggggagagatgggctcgagaagaatggactagacgatgggtttggtgtgaaagggaacaatgttgtggtcgatcgagaaggaaggagactccatagattttgaaggtgggcgagtgtcgtttcttgttcgatagatatcgtcgactcaatcgactttgtctgtatgctttggtttgaccttttttacgtgatagaagagagaagatggagaaataaggttagcaatgggaaagaaagaatgacggatagaggaaagagaagagcctgacagactagcgatcttggccttcaaaacttctcgttcctcactccatcttttttccagttcttccaccctctgcctctctgccgtcttttcttgctctagtaagacccgttcggtctctgccttctgactgactgccagtagctctgcctttccttcctttacctgagcttccagactgaagaattcatctcttacgagtcgggcgactgtatctatcggctccccctcaacggaaacatcttgacctatcgaccgggatgagagaagtggaccaaatatcttattgatggcatcggcagggcggccgagtcgttcgacctctgcagtcttctcctgcagcgatctttccaaacgacaaacagtgtcctccaatcgatctctgcattcgatgtgttctttaacaagtactctctcggcttcaaacgacttggtggcgtggtctaactgactggcggagctattctctttgtgttgtgcattcgagatcgattctttcagttgcactaccgtacattctagcctttcgacctggtcaatcagagactgttctcgttcttgatcttttcccgacgctgaggcaagcagaggagacgactgggtgcctagcgtccgaagtcgacgggcctcccaagcgagggcggatgcgtaatgttcgttcaagcgacgacggagctgggtctcgcgttccataatgacgtacatatcctgaaaatggaaagtgatgcattggaaacaaagatcaggacaacaaatttcgagcatgaataagatagacgaagacagagaggaatggagagaaatgaacatagaggataacaaggacgaatgatgaaagtgacgagctcaccttttcagcggaagccgagcgcttttcggctgtctgaagttcttccgttgtttgcttgctcattctagatgatggggtttcccgcgatgtttagataattaacaactctactcaatttggagaaaggaagagaaagagatggtgagcttaccgtttgtgtccgacatgtaatctgtccaacgtcctggcagccgtcagaatcttttgctctcttccaaacctgagcttgagaacatcaagtctgtcgacaacaaggcccagttctttcttcaagctctctacctcttcccagctgagggtgtgataggaatcctgatcgacgtcgagagcggcctgacctgctagaagggagagtccgagttgttgatcgttcggttgttgaggggaggatgaatcggcagaagagatggtctcgtctgaggtctgtctagtgtgaggctgtcgatcatggtggtcgtacgaagagctggcgtaggatgaaccgactgaagaggatgatggagaatccaaatgttgtttgtcttgtaaagagtgggagcgaggatgagaatatgaggaaaacgattgctgttggctggatgatgagagtgatgatgatggtcgatgaggtttctgctgttgttgttgttgttgttgttgttgttgttgttgttgttgctgttgctgttgctgctgctgttgatgaggcggcagatcgaatgctgggtagagttcagtggacgaaagatggggagaatgacccacggtgacgatgggagaaccaggggcggatgattcgacggacagcggtgccgagggaagtggacgagctggattgttagtgtttcgctgtttccagaacgccccagcatttatcttgccagagccactctcagagagagcacctatcggtgacggaggtgagcgtgatgtagacgacttccaatccccagacgagccgggatgtggatgggacatgatcggtgtatcccttcgttggtgtgtgtatgtgtgtatgttctgatcttctcttctggattcggctgtctgtcgtttttttgttggctattgtttgggaaaatcacacgacgcgtcgagaggtagcgcgcgtcgagcgtgttcacgctcggagggttacacactgggagggttacacactgggagtaaccgtgagggacagtgaggttagtcaaccacgtggccttttggtttgtcacctatgggccgattagaagattcagaaccacacccgggtatactttcggaaggcactttgctgcacatcaattatagtctgggtccagaacggaagagacattgggccgagaacgttggtgaagcaaaaatgagctatgaaggctgcaggctcggatcggtttacacaggcacgaggattcaggtacataacgggtgatcggggagctcagagcttggcggtaaaatgagcaagcactcacgggccggtcgttccacgtttaggcatccagagagagggacacagagagcatttaccgatcgggacaacgatagaacccgtcacaaacaacgtggcggcgtgcatcgcgagggctcaacggcacgagagcgcgagaacatgagaatggatgagaacaaggatacaccgagggtcgtacccggtgagtgaacacgccatgtattattattattatcattattattattaccatcactcactcttccgtcttgcaaaccgcctcgggtacactcccacttccgatgcttctataagggaacaccctcgcacctcttcttcgtctcttcgacactcattcattcaaccaacctgcatttctctcgttctcttcttgcctttcttgccttgccttgccttgcctcgcgtcacttgctctgcatcttcatcgtttgcttcattatcccactcgtttcctgtgtccaccatgctcaaactacaaaagtcaccaaatacctcggtgtatgatttacccacgctcgcttcagaaaagctaccaccaccaacaacagcacccactcagggccgcatccactttattgtcctttctaaacggaccttcttctctgtccttgccttccttattttaaccgtctctttagtttcactctcaccaacgttcctgtcgctctacaactcacactcccatcgccacggacattcgctcactatttcttccacctatccaccaaacgcgaccgtggtcgtcgttggcaatcacgtcgtgaaggccaagatccggatcggcacatggaacctcaaatttgatccactggccgccaccaccatccctgttggtcaagacggagatggcagcgaatacaagccaaacgcggactacaatacccagatcagcggtctccgtgtcaacgagagggtatgttcggatgtatttctcttccagccttgcttgttatcacaagcttgtcctctctttggtttcaacttctaatcattcgcctgtatttgtagccctgggcggaacgacggtggagaattgcggattctattttcaactcggcctacgatattattgggtgagtccacttgcgttcctttatagttcggtataccgtgttgatgtcggcgtctatattggcatgttgttctctcccctcccggacacctcagtttccaagaggctttggtcacccaggtgaccgacatgcaatcccttcttggctcgtcctggtcacatttcggagtgggcaggaacgatggcgggcagaagggtgaatttagcccaatcttttacgattcaacccgattcacactgttgaactcaaccaccaggtggttgagtaccacacctaccgtcgccgggagtataagttgggacgcagtgagtagcattccttcttccaagtacctacttcttctgacttattcgatgtgtctctcattttcttcaaaagagccaaacaagaatagtgacgctggtgactctggaagacaaacaatcctcggccatacttcacctcggaaacactcactgggacgaccaaggtgtcaccgcaagagagatgagcggtagattgctccgaactctcctccccgactatgccaaacaagtcgagaagcaactaggcctcggagatggaaagaatttagtcggaaacgttctactcatgggcgatcttagtaggtgttcccctcgttcttgtctacttgtgtcgtcttctgatcatctccatttaacccctttccatagactcccctgcggaagaacaaggctaccaggcattgacaaacgttactctcaccgcaagctccctcgacgccaacgcctccctcacttcgcctgctttccacgacactcttcgtatccttccccgtcgagcggcgtcgccgtcaaacatgacgacccagttacctctcctaccttatgggccgtacctcacctggacgtcttttaaccctaccagctctgtcgttcaaaccaggatcgactttgtcttcttgtacgaccgttcgtggctcggttccaatgacgctaccaccagctcagcgacgaacgcgactagtctgacggtgtcccgattcggtgtaggctcaaactacaacgagggtgacctgtatggatggaagggttatctcaccgatcatcgacccgtcctcgtcgaattactcgtcgtttgatgaaacctacacccctttgtacttctccccgttcatagtttatacacatcctgttgtaatcatctttgcaaaatatatgtacctgtttgtatgattcagttccactcagacggtcgcaagcaaagtgccactaaaacattctccgaccagattgttacatgaattgtctacatcagagtgtccgacatgagattttactgtggctcaaaactagaagcagattacatttctgaatgctaaagacagcgcgctagacgctcttcaccacgcttactgctcgttttgtcttggcagacgaacggagccctttccatcgttggcttatgtcgatacaactgattgccttacaaacatttccgcaaactctctttgtcttttcttctcttcagaatgttatctgcgttcctattgacaagcgatggtcatatgtgtgcgtcggggcacacacacaagtgctcaatatccttttcttctcactctgccttaaaacttcgggcatcgacctctagttgatctaaaggctcaatgttttctaacttgatgaagatgacattcttccgtccagaagtatgcagttatgaagcactgattgatctcatgtaaactatcaagaagtggaatgagaggctttggcttggaaacctttaataatggttgttcaaggtacgttcgaggtacgttcgtccctggaaagctcgttcgattagttcgcttttgatattgattgatttaatttcgaaacaaaacgaaacttgtacactcgtttaccctcgtcttctatggatagcaatactgcctaaacaggtacgcaagatatctcaagatattggttttgttcttctagaacgttcttgacatcatgcgtgatacctttcgtcaccctgttttcttccatctccttctcatacttgatagacgttacctacttcgagtcgttcggatcgaagagttctaagtcacatcatataagaaattcaaacaagtggaaagatatgacaagaggaagcacagatagtaaaatgacagaaagggaagaatgcgacagatagtgcttgtcgagaaagagagactagggcaagaatctataagaggtgtatcgatagaaagatctcaaaccttgccggatccaatgaactgcccatacagccacggtccaacgaactgtgaaatcgatttgagataatactcagcgccctctcgtgtatcgtgcgcgcgtcgaactatcgtcacggacgaaatacgaaagaacgactcacaaatatgaatgctactacctgatcgagacaagacaaaaacaaggaagcggacaagacagagtgttttgtttagtcaacaatttaatgagacgatgttgccaagatcagatgagtatatatgaagaagagaaagaagaagaaaatgaggccacgcactaagaaagggttgatactagccaacccaccgctgttggtgcttatcccagccggcttcccactcaatgtgtttccaggaccagcaggccaccccccagctggagcaggtccggatagtgaggcaacaagcgatgcaagctttgatggattggcacctttaagtctatcaacttctttgccgttccgaagaaagacaaaagtcggcatagccgaaatcgagaacctagacgcgacggatcgattggcatcggtgtctaccttgacgaaggtggttgtcggatactggttcgggaatagatatctcggattagaacatgttgtcttgataaatttgacatggattgaatcttatatctaagacagaaagagtcatacttgtttggcgagtttctttcaaacaggagagacaacagtggttaaagattagctcaaatgttataataagccaacgccaggcatgattccaccaacctcaaatacaggcgcaattgcatggctgtcggccatgccttgaccgaggtggccgcatcagcacgatcccgtttgtcatgaatcactctcctacgattgatactaatggatcagtaaactcaccaaggtccacaccatgtggcatgaaagtcaacgctgatcatacacatgatgtccaatcccagtcaattccacgagattttatataatcaatacagacaaaacgccaaatcagtatccatcgtacttacacgacgagcccggacgacccagcagatgagacgaaagagtcgaattctggacatcgagaaaaggcaaagtgacatgcgatcagccgacggaacgacgaaagaaccttatgtagagggtttgggcggctactcaccagaagctgaagaggcgattttaatagacatgtttctaacagaaaagcagagataaagagagcgcgatgcagatggttgagaagtagaggcaatggggtcaagtgttgaggcggagaacacagtggtgacacatctcgagcacaacacgaaacacgtgattaattaagctttggccaagagttgttcggctgtgtttgaggttaagtgtcagggtccgggttcagagggtaacgggaaggttacaagaatgtaaccaggcagggaatagggctggcaagaaggaagttcaggctctctagcttggtgactgtgacgagagcgcaaggcagggaaatcgtatgaataaggttgatacaacaatg

SEQ ID NO: 439 - DNA, 4101 bp, Xanthophyllomyces dendrorhous
tatgggtggcaaagggggacccgtcttatatatcatccttagactccaacgattatgcataatagaacaggtcatagaaggtgctagaagcacctgcgctggaaggtcatatacctgcatgttgatgtaatggaagagcataaggaataccgaggcaggagaaacaacagaaccaaaagaaggttaccgaggtgtaacactcaggtcacatccctaacattgagtatccagatcacgtgactactgataagatgatcaaaacacatcgttcttcctttggagaactcgacttcttacatagactcgcaaacgacttgcaaagatgcagaactcgtcttcatcgccaccgtcttcagtagaatctctgagtgttttggtcgcttatgctaatacgttctctgatcaatgcatccagccgaaagacataatatgggcactagatctgccatgtgcacctccagtgctgaactttctggcagaattgattgcttcagaagacgacagtatgccggagcgaacgtccgggttagacagagaggaaagagaaacgtcagtttgcttgtatcgaatcattccagaagcacgatcgctgactgttgttcataaatttagcgtcacagttgggacaaagccgttcaagcaggattagtcaacgcagagccttcagatgaggcagatctagaactatccgagccttatctaacacctgctcaactcaggcaagtctgtttctcaacgagggtgcccttatcttgcacactcagcacgccaatagctgatagtgattcaaaactgaacagagaactaacaacctatgaccaacaaatcatcacaatcaaggaacagcaaattaagcatgtccttgcaagaaacgagatgctgcagtaaggggtttcttgagtggcctcttctcatcgaattcaaccactaatggcagtactgtacctttttcgttcaactatagggaaacatatgatcagatctcttcggaaatcaacgagtctcgacaaactcgcactcgcctcggagaaaagatcagagacgttgaggcatccttactagaattttcaatcaaggtaccaattatctacaaagtcacgttccaaccagtgtccttgtctcatatgctgaacactgaccactgtattggctctacagatgaattacgtcctgcttcctcaattaaccgcgcaactctccttgtctttcaaccctaagcctcttcaaaacgagttgaaccatctgattgaaaatctgtctacaaaccttcctactccaccattccttccatcctctcgagcaccactttcaaggctatctcccgagagcctagagagagaaacctttcgtatatcagactcgttgaggtctctattgaggcagaaagacgtattggaaatgtcttcggatgatagcatggagaaaatttgggagcgcgagatggaagaaattctgagaagaatggatgacgaagatttcgggagtgacgacgaggatgaaaacgaatgggaagtggagggtcaagaatctagccaaggagagagagctcccatgacactcgtgaaagaattgatcgagggggcttgggagtgggatatgatggacgaactagagaattcgattgaaagggctcgaaatgtaagtgactcttttgctctgatcccttggttttctggagtcgagttagattcgtatattgagtctcttcatctttctgattcaactgactatttgatcggctctttaaggcaaaaacgacgttgactgaggttcagctgcctatactcttacttctccaaacaacactacaaactgattctgaacaaacgctcagctctctggatgtctggcaagccattcagctcgagatgaatcgtttgagaatccagaaagtagtattgaactcaaagggaatggtttcaacagctgaactaagcaatatagacgaagaaggactcaaatggaaaggtaacctcagacttcaggatgtcctgttttacaagtttatacttactaggtcggacattctctctgctcaatcatattctcccagaatcaatatggacgatcctccggtcgaatttgactacatcaacgcctttcttagttggcaagacggtagaactagcctctttcgatgacgtgctcgcctatctgcactctttgaaagcccaagtatgttggctgaggacacagacaaatgaagagcttgacagattgatcagaggaggaactttcaaaaggtgtgatccttatttatcgatgttctgaccaactttttctctgattttcatcttaacacaaattcacttgaaacagccaacgaatcttctctgttccgatttcctctcaagcgcctacacctctacactccactcttgagccaccgaaggagattcgacaggccaaggacagtattcaaaaaatgatgcatactgtcgaagggctagtgagagaatgggtagtactaggtgaatctttgggaaagaacaaagagggcaaaaagcaaatcacgaggttcgttgccgagaatacaatgcgtacatgatgtatgatttggtaggatgcccctggttgtaagaaatcgactctgtctcctttgtatatctcagtcatgtcactgttgcaactaatagttcatcatccgattacatgagagataggccaaggaaattaaatgcagaaagagcaaattcattcatcatcatccttcaattctttctttgcttgaacctttttctcgttttttgccttccatcttgcgttgatcacatccgggatctctcccctttttcgcgtctccaacggagggtatacggaacatcgctccaccttaaattcgttcgctcccaatggggttttaacgatcaacccacctccctctaattctccattggacattttctttcggccgtaaccaacaggcgcgtccaacacgagcattggattatgcttcctgagcgcggcgtggaaatgggcgttcatcaagctctcaatcacgttctggtggtaggactctagcattgaggtcgaaagctgagtgtagttgaacaggaggtatttatctgagtcgaaacctagatgagataatggggtagccaccgagtcttccgaggcagatctgtcgagggcaggaaccgagagagggatacttccgtactgccattcgactgaaccttcgggaaacccacaatcccacaaaagaagaggtcgctcgtctgccatttcatatgacggtttggattcccatttaaacagatcaaggataatcgtaggcttctctagacgtgatccgacgaggaaaagaacggccatgatatgacgaacttggtgatagaggaaagccttgcccattaaatccagtacgtagaaggtccctggctgctcagacgtggtggtggtagaaggcgtaggagaggttgccttaggcgtgatgtttgagtaaggagacggaacaaaaggaagagccaagagtgggtcgacaggagagattgtagcagagtggataccccgaatatgatgggtcacctgtttgctgccgtcaactttacataaatttctaaaatcatgctcgcctactaaatacccagccgcttgtcgcatcgcttctagatccagcccaggtccatctccagaggggcatgcattgagggagaagaagtacttgtagtgtcgagagatgcaagaatgtcgggcatcgaaactgtcgtctggagaaagagatgaccaggcaaggatccgaatggtcggcggaagaaatctattgatgatgctaacatatggaaattctagccgcttggatggtgttttagggttgttgatcgggctgtaagaaagagtggccgtagatggaatggcaagagcttcttcctcagagagctcgtcagaagacaaagcggtcttgctcccgttctccaagccttccttttgaaggcttgattcttcaagcctctctgcaatttcgtccactctatgttcatgcacctttccgtcataagcgattctacttcgcacccacaggctaacaacctgaccggcagcgcttactcctctgtcagttcggccacagcgactgaacccacaaccctcccagccctttcc

SEQ ID NO: 440 - DNA, 50556 bp, Xanthophyllomyces dendrorhous
cttctcgagtgcactcatcaaaacagcctcaaccgtgggttttggagaggacgcctcgtcctggatggccagaccgcaatagggcgtaccaaggtatgagaacttgagagcaatctttcgtcgagggagcttttcaaaaggagacgcatctgtccgatgcttgttctcgtatttgttgcgagttcgaagtttcctttttgaaatttcttgggtagccgtagttccctggggaacgttagaagtagaagcagctgcaggagaaggacttgacaagctggactcaagcttgataagatgagcgacgagctcttgcttggaccacgaatcgtacttgccagccatttgagtcaatgagcgaatcctaccaaacccagacatgtgctgtttgactcaaaagagccaagtttcaaaagcgtgtaaaagaaagaagattaaccctaagaagtttatttgaatattttgtaattcatatattctagatcttatctttgacgctgacgacaaccactactatagccacaaccatcactaatctacgtgatctactttcgagttcatcatctctgaattctgctcaaaaaccaagacgactctctatcgttgaatctcacatcagtatggcggagacattgtcgtacggagctcagcttccagatcaggcacagcctctactcaatcatatccaatctgtcctgtcattctatgcggatgtcgagaagtttaccttagaacgagcagctttagagcgagagtttggacagaagcttcaagcgctgaccaagagaatgatggaaaagaaagccaagagaggagactctctttggaccggggaattggccggtcatggaagtggtttgggtgataaatggtgagaaactatcttgaattcatatactatcaactgcttctgacacccgcctttccatcattgtttgcaatcaaaagcacattgagcacggccctagatagcgttctcaatttcacagaagaagcttcgaacgctcatgtgacactggcggaccagctcacaaagcaggtagccgatgtcttgcgcgaaaaggagaagcgaaaggaagtcattagaactagagtgagtactcttgatctccgcttctgatgaagcatcagtttgatatcactaacgttaacaatcgaacaacagtacggaacctactaccaagagctgctagatcaaagagacaagtattatcaggatcggttaaaggtagacgagtcttctcagttgtgattcacgacttggagctctgcaagatcaaataacaggtagttgatcatgtatgctctaattttcaatccagactaagcagaagtaccaagaagcttgtaataatgtagaagctgcccgaatcaaacatgatcgatctgccgcatctggagatcgacatgttgatcgcgcccacaaatcattcttagaagccaaggataaagcaggcgaggccaagaagtaagtacctcttctcgatgcagctcaactgtgccctaatttgctttctcacacgtcgatgcttgtagcgcatttatcattcaaacaggaatcgccaacaagatgaaagaaaaattctataggatagatttaccagctttcgaagatgtaagctgttgtcgccctctcaccgcggtactggattgtgcaatgctgatctttctccttatcctatcatacagaaacttcgtaagaacatacatttccaggtttatcttcagaagacgttctcgcattaaacacgtcattgcttctcattcttttcaagaggacctccatctctcgtctttgaacacactatctagcttgctagcaacagatcaatctcttcaggttgcccacctctcatcactctcaaaaataacgaattcttccataacgtctcttcagaactgtgacaatataaaggatttggagctttttgtacgatgcaacactcgagttggaagttggcaagaacctccagactgggtctgggaacctgcagaaggcctatacgaagtcggtgtatggtgtgcgtctatcaattcctccatctctgcgttgattgttgtctgtcaaagcaagtttggcctgacttttcaagcttaatatatgctttcgactatctgccgtaggtctcgacccgggacccaagatagttcttcagaacagtgagtatatcccaacgatattcatactatcgagtttgcgtgtataactatgctcagcttgtgcggttatggtcgatttataacgattgtagggcttgctcgatctgctggacggattgagtccacctctcctgttctccataccaaacaaacagagttgacgaatctgattggtttggtcggcaagtattcggcggatcctagtttgggagatccggataagattatggagggtattcttggcaatctaactgaagttgctacactggacaaccaggtggctgcaggacatgtagttgcagatctattgcaggatgcgctgggaggtaagtttatcttttggctaagttcgataaaaacccttgaaagctcaacttgaacaatggtacaacaatgtgctctcctctgtcatagatgatcaaggctcgctacaaccgcacgatttcaaatcttcctctttcaccattcctacccattgcgctcattgtaaacagtcaatttggggtcttagcaagcagggaaagacatgtaaagcttgtgggattactgtccacagtaaatgcgagttgaaggtatataccaatgcttacatcttattcgacatgctattatcgagagtcatcatacgacaataatttctgaccttactgagttatttgatctagatcccctctaactgtcgatcgacccctgctttagcccggcgctcctctatgacatcgaatctaacccgatcgtcttcatccgcgtctcgagcttctgggttctctgctccacgaggaaacaatgcctcacatataacggctaaccttgctccctcagtcttcgaagaagaggaagagggagattcatttgtggatggaggtagagaaactaaggtattattcgattatgaggcaacgtccgagtctgaaatatctattcgcgaaggccggactgtgagggttatagaggaagatgatggatcgtaagttctgtcaactgatctttgatcaacgtgaacaacatgccatatctgacggtctgagtcttcttgatttgacatttgcataatagtggatgggtgaaggtggacgacggaacgggttatcagggtctctgtccggcggcttatcttgaggttgttgatacatccccgaaggagtcctctgcagcaacaaccacgaataatgtaagagatcagggcgataattatggtaagtcatgcagactttcaggaactatctatcctctgtaacggcgactgaatggccgatcgctcggtctttgaatgtctggaatattgtactgtgttgcgcttgatagtctcggcaatttatagttatgactctcagggacccgatgaactctccttggtcgaaggagaaagagttcaactcacaccaaacgggaggaactactctgatggatggtgggaaggcatcaaggatggaagagtaggaattttcccttcgaactattgtcaaggctaaggggtttgcaggtggcgtatccacatggatcacagcggttagaaggatgatgtatgaccggttgtcttgagttccaatagttgactgttttgtaaggtacttttggacccagctgaccttattgacgtgctagaacatctgcttgtcaggcacttgcccttgtttgccaacccgggcctccttcgagcgcatggacctccttgactgacagctgtcctcctgtctttctctaacacctcggcgactccttccttttcttcatctgctttacccttttcttctcttctttcttgccacctctcttctttctccttgccacatctcctctttcctttgccacctccgaatcctttctttcaaccccttcctttgcaccaccttcctgtccttcgagaaaacagctcttttcaatcaatcatgtatgtgtcaattcttctacgcattaagcgcattgacaggtcatcgactgatctgatgtgaccttgtcaatcatcatagataacctaacgatctagttgcttcaacgacatcatgagcgctgtatcttccgtgagcactttcacggaacatcctgaaatcgcagtgagtctctaccttgtgttacatttcaggttatatctgtattcaatcttgtagattaatgggactcgtgcctgatggtcttttgatctagcctgtcgttagtgagtggtttgtcttgaccatgcatttgaagtcatagccaattttgactaatctttcaatcgtcactgttcattcagtttttcctagaccgggtctgcagctactggctgcttttgtttgtaagtctgttccatctttccatcctccggattgatgtgtcagagacttaccgggttttcgttcctgtccctgtccctgctttgtgctgagcgcatatagtcatgggaggttcgtccgcacatccgatgttcgacatcgatctttagtcgatacacttcatatttaacccattctataggtctctctgttctgtcatttatcctcgctcgtcgatcactcaatctcggcgcgctttcaacgactgcgtggaggcgatggtcgattcctaggttggcctgtcttgccactttcttcacatcgtaagctatctctgtatcacaattgtctctatcgtcgaagatttcacgatgtatctgatcgcttagtggaaatgcaacgtgagtagttgggcctttctattttcgtctggaattttggtgtttggtgtagggactagctcaagggcagcgatctgtagtttggggattttcagctgtatctgtaagcaccacgtaactgccaggcatagagtatcgattggaatgtatcactgatcgcgtttgtgagacagtgttctatgcgttctccaaggtctttagtgagtaactagccgcgttctgatttgtttcattagcactgaccgagtttctgtgatgatcagtctatctcttcctcattgagaaggttcatattgtttcgaacacaaaactggcgagaacgcaatcttggatgtaccgagtttgcttggcctgttgggctccatatttgattattgtgatcatgatgattatcggtgcgccttgcgatgttgttttgtctcgatcagaacactagatagtgtgctgaacttgagcttatcttataggacgtatctctactatcgatcctgagactatggtgtgccatattggactcgagacttatgcgtttgtcctcttttttttcgttcattctcatactccttttccaattatttttgtcctgaatgacttgtgattttgtcctgatctttagatcactatctctcttgatctatgatctcttcctcaatgttttcgtccgtcatccgcttcatccaatcatcccgagtctcgaggatctaaaagctgattctttgaacaaatttgatacagctcacgagtctatttgtttggcctctccttaaatctaagtgtgagttacatacgaatatatgaccgaataaaagaccccacttattcgtcttgtccttgcacttctaaactcaagtcgtcaaccctaagattcgggcggtcgctatgagaactgtacgtgcaattcccatcaacgtgatgaacttgtttttgctcaagcctcataattgtgtttttgatcattcggaatgtatctccatgtttttttttcggtaataaagatgttgtgcgtccgctactttcttgcctgatttcatcatcgcgctctatactaatggttttactgtttcacttgtatccttcagtgcggctcttgcggccttgacgacgtctacgataaacatactagttctcactctgatgcatgggcggcagttaggatggttgtgtgtaagccggactctctctttgactttccatcacatcatgtacctccatatcctaacaacatcgctataagcgcccccttcgatatagctctcttcctgtggaggcgatgtgagtttcttgcacatctctaccactctataccctactcacatgcttactcaaagttaactctttgggtctgtcttaggtgacaataaatgtaagggagaagttcctgcgtaatatcatggagattgactaatctttgtctattcggcccactccactttaggccctggtcctcttctacgtcacgatggtaagttaaatcttggaaagcttacaagctgctgcgtatcgctcactagtttgtacatatgcccctgattgtctggtaattacagagccctggtcagggtcgtcgtgagagagataccgctgccgctgccgagtcatatctggacaccggcgttcgagcatccatcaaacttccaactatgcccggacgggcgggtcatccaggcactcgtggcgctgcgtcgcagaatgaatactttgatttccctgagccgactgatgttcacaaacaagggtttgtcgaaatcaattcaatatacagctgtagctgtacctgacaagacggtggtctcatattctctcatgtttttatcgttcaggcagaccgctattcctgcagaagagggaggtggatatgttgtgaatcgcgacgagggttctacgcgatgccctctaggttctgtcgccatcatggccaaggatgatgctttcgtgcaaaggaaagtcgatgctaactatatgcaggagcgagagaagaacagagcaaagggcagagcgaatcaagagagcaagaagtcgagcttatggtcaaccctgaagcaagcaacaggcattgagaataccgaacggcatggcgtggaattgggttcaaacagcattcaagtatgtccgcatctcagtggatggacctccaactctcacgatcagcgttcttacaacctaatattattttttgcttagattcgggtgaataccgaggttgccatgtccgaattacagcctgctaacgagtatgatcttgacaaccggcgaggacggggcatcaacagaactcccttcagcgaccctatatcttcatcatctcctcttccctcacgaccagagagtcctcactcaccatccaacggatcgttcgattgcgagaaagattcaatcgatgacctaggcgatctgacctcaaccacaggactgcgtgatgacaaccgacctgatcatcggaatgaagaatcactcgcagagttcttaaatgataccagagtcaagtttacgtagaaaccttgtttcgcagacttgtaactgtcacctgaatttcgactgtccagatacctagccacttgtgtggactgtgcctcctttgctttcagacttcttatctcttacatatcttcgcttagtagtgaacctttgtcactttcgattcttcttcgttatatatcttaaacgtctgtatttcgccaggttctttcttggtcactacactatattttatctcttgacgacttttcttttatcgccgacattctattgtcattcaacaccctcttatacgtatgacttggtatctgtgtttctctggttatactctcataatctgattattgacggccttgtaggaacgagaagagagtattgctgaaagtcgcgatctttcagagacacataaaactgatgtcattcagagacaccgttccacactataccgagttcccattcgttgttgagggtggcaatactcaagaccggaatgaaggtcacagcgcatgatttcagataaggatgtagtgacaggattctgtcttgaactaaggcgtaaagaatgacaataagataaacgcttgcaagtgacacaatctgaagagagtagacaaactttcagaaacccgttgcttgggtgaatagaaaactttcacgctcaaagcagcattcaacgaagactttgcccattcgggggctattgcatttgaaattgaatctatccgatcgagaaagaggagaaaggaaagagaggtttcagtggtgattctctcgacgaaaagggaagaggaaccgaccgatatcgttgaagccggctactccccatcgggcatctccctctctaaactcagattcgatccattccaccgatcccttcttttcgaacgatcttataattggttctggactctttctattctcttcgtcatccgaatcagagtctgagcccgaggttctggaagcaaaagtggatatagcgcctgtaggccgaggaagacggggcgacgtctgcccggtgtgcaggaaagattgccattctagcttggcagatcgaggaagagatgatggttggacaagcagtgttggaggcggaattgatgatgtcaggaacaaaggattttctgcttcggtctgttaagttgataatatcaagggtgtttgatagataagcgaacgcaagagactgatgataaggaaatgaccggaacatacctcggcctctagagtcgtcgtccatgctgtccttgctccatccaaatcagaccaactgctgacccatccgatagatccttctatgaagcaccgttttagatcgcttccaccagtgccctctttgagcgctcggatgagcgatcgaacgtgtttcaagcaaagcgctgcctccaaaggaaaggacggaggatccggaagagccaacgtagctggaatcatcggaatctgacccgataaggtaatgcgagagttgacctgtgaaaggtcgtatgtttcggaacaacggagcaaacggtcagttatattcgtaatcgacatgacaccagtggcgagaggggctgacgatgaccgcttgtgaatacggtccgatattggcgggagcccaatggctcagtccttgaacatgcaatcctcttctttctctacccatctgattccgggtgtttcccttttgtctgctctcttcaaaagcgatcgcttcgaagagaatccgagtgcccttaggaagaggaacttccacacacgcacgcgctggcggagacgaatggaagtgagctgagtaagccttattgatgactgggaaatcagccatatttgcaatgtatacagtcagagactgtaccaccgagagaggagtcggatggagtgcgtctgtttggtagagagagaagagggattgaccaataagaaacgtatatgcattcgcattcagaacgaaccgacagacttttgataattttgaagcattcatcgacctcctcctcgagactcatctcgtctttctttttgatacttggtccactaaaagcagtcacatcaccaattgaaatccatccaccgtttctgcaaatgccaaaagtacgatctgagcgttgttcttccatacttctgatgagctcagatgagctgctctgtttggtgatccctgataaagcgctgtagacctgagagaccgactctctgacctccttgccttgttcgtctaaccagtcatccccgtattcttcttctagatcatatcccagcaatgctcgcgcatcagcagtagtgagaggtttatagtcaggtttaggttggagggatgccttttgaatcagcaggtgggccacaggtgcgacaggggacggatcggtcagctcggtcatcgtttcatctctgtcagagaagacaggttggctcagtgagctcatgatcggttgttcgtccgtatcgaaatttggaatatgaatgggtaggacaagacctacaagactattgtgtcgtgaaacatggggctatcgagggttaccgtctcatattcgcctccttctccgcagatatggagaccatagatcgagttctgtaccgaggacgggtaacgagaagaaaagtttggtaaaaaatcaaagggatctcagttcaaatgagcgaaaataaagtaaacacgagaagcaacgtacaagtttgaatagttctctcctcatctgacccaagtcttttccgaggtgctcctccttgagacctactcctgctaccttgaccaggatcgctcgaaggccagagttgatcatccggggaagcagtaaatcttgaggctgttgccatagataagccagtgaaaccaaatcaagacgcgcgcacctgatgggttccaaggttgattgtgatgataggctgtatgagtccaagacaatgtagaccagcgacagctcgaggaaataaagacggacacatgttcaacccggatccgttgataggaggacaggatggcccctaccgagactgcttcagcgtctgggtgattttcctgtgcgtcatcattacacaaggaaggcagagggagtcaggaagtgagctacagtctgccttctccgaatacgtcgaagcaaggacggaagcaggacgtactttgacgagcttgagcaattcaaacagatcttctgtctcatcgccttctgtttctctatcgccatattcagcatctacattgatcggtttcccttggatgatcctggtgtataacggtagtctcagcgcctgagagatcgtcggtatgagagatagtccgacagtttggtacatgaagctgtcgagctcatccgtctgaggcggaggaagcaggccggcaacggcaataggaggatgtccgttggctagacattcaagtagattgaagcatgagtctttaccaccagagagaagaccgataaccttcatcgttcgagggattgtcgagtgtacggcgagggatgaacgagaatgaggggaaaaggcatttgccaatcatcagaaatcaacggtcagggaagtatttacgtgcggcacacgaatacataactaaaccaaccgctacgcactcgaggcaaactctggctactctgagatatacgttgtgtatttatcatccatcctgacgtgcttagcagtcactggcttttgcaaacatctcatgacgaaagccatcgcagatcaaattctagatagagaagaaaaccgctttctgccggatcccaagacgctcaaagccaacacctgttgaaaggtgggaatagtagccagtgcggaaacgtagaaagtgtcaagacaaaaaagagaccagattgaatagaagaaaggcgaaaggtgaagggagaagggagaaggaaggaataaagaggaaccaaaagccacaaggtaactggaagaatgaacagatgaacagaaagaaatatagacgaaacggatctgtaaatgaaggaggaaaataaacttcaacagcattcaagaacaaccagacccaaggcaagatcatctactgttgcttgcctgtaggatagtagaaaaggagcaatatcgaatcagcttatcagctgccgttccgagatggcagatagcagatgtctgagagagaaaaaaacatacattcttgaggatcctgctgagagcttccaggtactgggtgtcggacatcctcctcctcctcatcctaggaaccggccgtagagacgagttagttcaagaaccagggttcccaggacaaatggtttcgtgaggattaacatgtactcacatcatcaccatagtcatcttcatcaaattcgtcactgtcatccaaatcatcgaaagcctcctgcattgccttgccggtgtagaagtcgatggctcggggaataatctgaacaggaaagcacccgggttagccaacgttgcagccgacacaaaatagatactatttggatagttacttactcgctctttgaggtcctctccgatctatagtcaattcatgttgaaaagtcagtcgagtgagtaacatatcacgatggagtttaagtgctcacctggtagtcaagctccagcctctcgtccaaatcctcgagctcgtcagggttgagatcctcctcaggggtatcatcagagggaggtgtagggggtttgaagaagttgactgaacaagaacaaaagtcaaactctgtgtcagcgacaaagaatcactcagggttgtgaatcatgcgtagggaaagacatacagaaagaatcggcaggaatgaccttcttgactactcgtgttcggttagtgtctacgggttaaaataaaaatgatcgcaactgcggcaatcagccaaacgtttcttctatgatattgtgaacactctaagacaaacttactcttgttcctctgcttcttgatttcaaccttcttggtcagatccttgtcctccttccacttaatgtcagttccctcggctcggtcgtaaactaagggagagatcacatgttagtataatttgtgcgaatgttgaacaagaatgtgaacacagacgtaccgaggtcgccctcatacccgacctcctcctgaatagaaatgaacattcgagatgggcaagtccgttagaactgaccaatcgagggtgaacaaaaatgagagtaacgaacctggtagtggtaggttttctcgagtttggagtcctcaaagtattcgttgggagcaaagtggaagacaagggtaaatccaggcttcgtgccctcgaggaacttaagttcgatgttcttgagtgatcgcagggcctgtgtttgataagtgaggaatgagcattcaaatcgggtttactgaaggtcacacatgaggccgaaaataattttgaacatacatcctcatcctgctcagtgactggaaacgcaggagagacagttagtccggtacgcacgacgccacaggtctatcaagtctcagacttactgagctcattgataccaatgtggttcttcaaagcggctaaacaaggtaatggagtgtcagctagttagccgaaaggaagatcttcaacggacgcatatttgattgaggtaaacttactgagccagaagtcagggatacccttggtcttgtcatcgtcctcgttgatttcctgaacagatgcagactgctcttcttcgtcatcatcaacggcttcaccggcagcgacctcagcatcagtcggctcagcctctccagagacgatagccgttcgtcgagcatagataggggcgtatcgggcggcgaactagggaattgagcgagacccaggtcagtcgtgacattggagaaagagagagcagaaaggaagagcatagacaaagatgcctaccttcttctccagagcaaggatctcgagttggaattcactctcaacctttgcgtgctcctgctgaagacccttgaggccttccactcgctttcggatagcgggaggaagtgtctcgaggaagccagagttagaagacccaccaaacgctcgggattccatcaggttcaagagggcggggttctgtcaaggccaatgaacgagggtgagaagaaagggccgtgtttgggtgaatcgcacaaacagtgattggcaggggaaagcaaagaattgaaacgtaagacgggggtgtcagaagatcaactggacaaatcacattgttttgttctgacgacggagaaaaggaacgtcgaaaatgaaaaagagaaaagagaaagaagagcagggtggaaaccaaggaggaggcctctctgctagaaagatagcaagatacctcgacactgatagatggacgatatcgttggggaaggatgacttcgggtaaaaaataaacggtcatcactgtgtattatgaagacgacagctcaactcgacccctgccacctatcggacaaaacatccactcatcgctcacaacgctgatatatcttatgaattttcatttccctttattggaattacttgatggcagcagtagatcggccgaaggaagatgatgacagtactgtatcgatcaaagacacaatgcactcacgttggccaacaaagaagcagggtttccaccagtgtgctcactctcatcctcctccggcacgttcgacacacctggagcggtcgacgaggcggtatgaagagtagaattagcaaacgagttggcaggagtgggagcagaatgaccggaagaagagggaatatccatcgtgattgttttgtcaataaagagcaagatgggcgggttcagtcgggttggggagagaaagagggagagatgaaagaaggattctgatcagggtaatagaggaattcggatgttgtaactatgtcacgtgactgtcattgtgtaaccactagaccgccatgcatccacactatccgtctgtatgtctgccagtcgatcggtgctttcattcgccatcgttcgagggggagagcttgtgaggaggttgcaggctgggtcgctttggatacatataatattaaccgttagaaagaaagtataggacaaggattgctatatatatgtgtatataaagaggacacccatttcgagtccagtctctacctattcagaacacgccgagatctaagtggacagacgaacccgtacaacagtcagggaatagaagagagaagacagaccctttggacgattaaagacactggttcactcaccagttgacctccttggctgctagtcgagcctcaaacttttcaaattcgtctagggcgacctgctcctcttcacccaggacctgtaatgaagcgatacatcaatcaagcacacagatggtcagcggtgcaacgaagagaccttctgataaaaagaaaccccgacttaaatagttgggacatacctgttcgacacccttgacctcaggcacgtagtgcatcaacatcctctccactccgcttttgagcgtcacagcactgctcgagcatccacggcaactacccttcagcttgatcttaaccagcccgtcggtgtcctcgccgaaacccataaactccagatcacctccgtcctccatgatgctcggccggatccttgtggccaatagctccttgatcatcgcaaccacctccgaatcactgtccaaaatcctcgtgtcttccggctccgaatcttcggcctccttggagccttctttgaagagaggcagtccggatgagaagtgttccataatgatcgagaaaacttcgggcttgatgagcgaccaaggcgtagcctcatccttctgaacagacacgaagtcagggccgtaaaacacagagagtacaccctcgatccccatcaaacgaattgccagtggagaggctaaagcagactttgtgtcaagaaactcgtgggtgcctccggacgaaagaaccggtgttccgggaatgaattgaagtgagttaggattcggtgtggtctgggtctgaacgaaaagtgaacgggctttataatcgattgataatgttttggaaaaggttcatagtcggtcctctacagatcagcattttgtgtttgaatcaaacgagttcaaaacatatctcaaagcttacacaaagaaggagttgacttgaggaccgaagaccgagaaagagtcgagcgtggcaacccgatgaaagatctttgttgggtcagatacggcgacgatacgtaggacgatcgaaccggtgcacggacggcctgtttgccccatgaggcagctgacgggcgagtagcacgaagagctgaagcagcaattcttgaagtggaagccatggttgttggtatgaggatgtatagggttcagagaaaggcgaaaaagcgtcttgtcacaggatggatgattaatatgaggatgtaaaatgtcgaatgagagcaaagctgatttattacgcgagttcgctctcgcttgtgttttgccacctttttaaataaatttatatctcgttcacggcaaccagtccgactggccggccgaacggacaaaaaaagaagaagaaaaaaaaagagacacactctattaatcatgcatagatgagcaagcagagacactatacagatgtattcggccagaagagaaagacaaaaaccgttatatatggtcggagagaacgcatgtagaaaataagtatgaggtagaaaagggaaaggaaattctcaaagtatataacagagaagctgtcatcaattcaaccgacgttctcacagagaccaaactttgacggtagcatccttgccaccagaaaccatgtatttgtcttcgtagcgcagcctctcggcaggaagcgtatgtccattcgtggtcagcctagaatgctgatgggacgtccggttgtaaacctataagacagaaggtccaatattgatcaaggtgaggagaaagaagctgtcagtctacggaaagccgcagtgaatcgcatcaagagatactgacatcaatcccgttctcgcctgtgcaagaaatgatctttcgcgagtcgaactgaacagaagtcacagggaattcatgtttcagaacttccgaaacagcgcccatacgcagatcccaaatctgttaacacgacccaggagaaacaagagcgcatggaatcagattttgaagatacgaccagacaagtagttcaatcataacatacccggatggtcttgtctagacttccagtcactatgttcatctcatcgaactggagacaggtgacaggcccggtatggcctagaagcgtcctatgcgcttgaccagtcctcactgtggaaaagaaaataagtgataacattcagtactgagcatgatgggtgatttaaagcgtaacgacttgactcactatcccacattcttacgccgccatccccactcgcactagccaacgcatatccccagaactgaacaccgccgacaaaatcttgatacatgtcccaacttccatccgaatatggtggtgtcggtacagcaaatgcgcctgatgtcacagaagccaataggtttgaaccaggcaggatgctttccgatgtcagcgggccataggggtcgaaagacgtgggtgctggctgaggaggaggtgcgctagagatagcccagagaatatccattgtcaggacacattggcctgtgttgacatcccattgtcggatggtcttatcagatgaaccggtcacctggtagcggttgcgaatgatttgagccagacgatcagcttcagctcgtcatctctgtatgcgtcaaacaaaagacgcaagtcaacttactaaacacccgctttcgtagtacaaacagctgacagccttgctgtgaccttccaatgtccttatacacgggtttccaacagaagtttcttcctttgaagcctctcccccatcctcctgaacattattcgacgcgctggcgtatatcaccgatgagttttgcatgtcccttgccagcttgtcctcataatcatcaactagacggagatcccaaagacggatatccccatcaactcctcctgtgaagcagagctggtcctcgcattgaatcgctttgacagttcctgatcgaaagaatgaaccatgataagaaaacccgcttagactttccaccttcataggatgcaagagcggataacttatacgaacctcgatgtcctcgaagtcgaccgctttcttctccactgcaaagatcccagactctcaaagagtcatcggccgcggcggacacaagtactccgtaaggttcagaaaagtccaacgctgttatcggtgctgtatggttgaccaacgtctgaccccaacagcatgtttttataaccggtttttagtctagttaccagacagaaacgcgttgcaggaaaaacacttaccatgaaagcgacacctgaaggtagatcatcatgctctgaaggaaggaaagcaggtcccttccttcttctagaggagggtccggcatgctgaccggtggcatcggctatacttcgattcccctccggggttatcgataatagcctatcctgaatgccttccactgatttagaaaacaaaaacggacaaatgaaagagctagttagtccgaccatcttatgaaagaatccgatggtatttgtttcaacttgtttggtgaatcgaggaacggggcacgaacgctcatcttgtaatcctaaatcttcctcttttaacttcaggatgtcttgttctagttccatacggatcttctccagcgcggatatttttgatgaaagctcctcgatctcggagttgattaaagactagcatgcgaaacccaacacaatccgtcaagaatatataccaagagtatttattgaacaggctgactggacgcatacagatagatgacacagagaaattacactaaccttcctgacaaccagattctcacggtcccatttgatctcatcctccatcctcaagagttcctctcttccgagttcatgcttggcaaacgacccgccctttgaagatgaggccgcgagctttgctttttccctccttctccttcttcgttccttcccggtcatcatcacaccctcttccacttctccatcctcgttttcctctcctgaggctccaagaaggccactattttgcgctgccagtcttttcacacccagccgaccaccacccagtccgacctcggccaagtttcctcggacctttcgccttcgctccttcccacgttcagagctcggcacggtcgcctgaaaccctcgaagcaaactaactgccgtgttgctatctgtagatgacgatgaaggctctgggaggggggcagacagaagagaagggatcgcctcaaggatactgagcgaagccgaagttttctgacggggtcccaaagaaggcatggtcatcttgagaggggtcatgatggatgtgcgtgacggaggtgctaaggtttgacgattgaccggatgatttgatgcgttggctataaaacgcggattgaatatcataggagccactatttaattgatgaggtcgccaatatcagcatgttagcttgagttcagaagcttcttgacgagtaccatagcaaggaggagagaagagaaaaaagagatcctctctttttctgtccacacatcgtcttcgtaaatacagagacatgaagacgtactttcatgtaaaacgtctccaccattggacccggcgttccaaccagagcctattcccttgacggcatgtccaaggaccgcaaaggaagaaggagcggtatcagttattggatccaatgcagctttgatcggcctctgggattcatgaggttgagatcgatctgcagaagatagagatggctcctgcggacgagaggtcgagtcggagaagaactttggcatatagactgccggaaagtatcagactctatctatatacgtagggttgtgtatggaactgtctttcctcggagataacttgagggtgttcaagaggaaagatgtagtttgggtcgccagaccgagatacgcacaagatctttcgctgaggtcattttccagcaaagctctagcagcttcaaataaactacggaattgtccagtccgtctgatagtgttcgctcgtcgattctctaatacttttctactcaccctcatccgcttctctgtgtcgttctttttcctcttccatcatcagagccttgtcatcgtacgtcctcttcgtcatctagtcaacatgaactcattccatcaagtctgtgcttacttgttctctttgtatctgcccaagatagatgtctgctgtgagaaaatctgccaagcttagcgtaaagtcgctcacacagtacctcagcagctacccctccgacaagccaattgcacttccggcagccattgaaagactgaagttctctgtcgccaatactggttcgaaatcgttagtcgccgtgctcttctcttagttcgttcgttgctgtttgagttcaaactgttaagactctatcccgattcttggatctgggggtcatttttttttagacagcagtcccatcggtttcttggaaagacataccttccagagaatcttgatgagaaagagttgattcagcgaccccttcgacacttagcctataacaacgtcaatgttcctttcgagtttgctctccgtaaggacaacaggccaacagaagagactaaggcaagcaaagagagtgcgaaaaccctcgacccatattggacccgagagtttgtcgacatctggacaggtatgttttggaagcaatccatgacctgattttgtacttattacctcttcaaccggctgatcttctcttcactcgcaccaacttcatagagggttcatcttctcctatccgactggacatcactcgacagccccaatcgaagattgtcgagcttcttacctcattcgatgcttctacatcttcgagccttccgtccgtcccgttggaggagggtcccgagctagatgcctacgtagtcgcccgaaacgcatctgatctagccacctacaaagcttcttccgagtggaagacgcccgagcagctgatggcccatcgggaacatactaaactcactgtcgagaagacaaaggcagaggccgctgtgaaggaggcagccgatgaagcggacaagcaggggccctatgcagctctccctctttttgggacgagcaaagttggctctaagcttggagagaacgttcagaggacattcaatagcggagtagagaaggtagaggagacgttggagagcgtaaaggaggatttacaagagatggttgggtcgatcgagaagcaggagtcgaagccatgaagaataaaaggacgacgttcagtaactttggttctcggtcataaacattggttgtcatccaagcttttgtatcatcgcagcaacaaaaattgaatatattgagatatgttatacatattgagctgaactagcgtatcatagcatactgctctttctggtcaagtgagctgatcgcgtcgttacaggtactcatagcgactgaagaagtcactatgtgagtgtcaacgcaagtgattgatggtttttgtttacggtaatgatgaacaaaaggttgttcaaaaagaaaagatagaaaaaatacaatctagaccgatgccgggatcgaaccgacgaccagcagcgagcgaaatcgatcttgcgaccgaataccgaaaactgctgtgatagccactacaccaatcggccaattatatctggcacaattggacatattgaatatttcctttggaaggtttctttttggcttcacatcttcattttcctcttcttatcagcttcaatccacttttttttatcattttgaggcaacactcatagaccttgcgtgaagcgtttaaacgtgactctgaagagcttcaaaacttcagtcagtttgtctgtattttcctggtttctcaatccactcttacctagacacctaggtggtgtgtatatgatcttggaagccagccagacagacactgaggactcaactaggaacaaccgcaagaacgagagtctactttcgctctgaattttagtggagtttcattgcttgcattgactcttgtttacaaatcattacaaaactgtatgttctccggctccaacggtgtgaacaaagagaagaggacaaaagcgcggctggcagtcaaaaagagtggagattgtaagaatcgaactcacgacctcaaccatgctaagattgcgctctgccaactgagctaaatccccgtcatatttaatgctgtgaatgcattctataatggatggaaaaaaataagaaattgaattagtttactgaaatacaagggtgcaactggacttttcgttccggcacttgttcccactcaagtcctcactggtttcccacaccatatacacaccacccaggtgtttcagtaagatggattgagaaatcaggaaaacagaagggaaacccgctagaaatttatagctcttcggaaagagagccttgggactccgcgcaaacggaagtcggaaggtgatgcctcaagaatagataacaaataacagatgaaatcatgtcaaaactgctgaaactccaacaatgttgaacaaagggaaagagggacgtccacatgacaacccatcactgtttcctagccaacataagtttcgaatcatcgttggacatggtaaagaatacatgtctcatcattgataggtcgtcagcgtttcaagatatcgaatatttcacaatcaactggctctactgaagaaggagaatcatctttttatctcctgtataacgtttgtgttcattttagcaaatgtatcagaaggatgctcggcagcaacaaggcatacgagaactcaatctaaaaaaatgagactagccccatgggggggtcgaacccccaaccttcagataatcgtagttgtaaaagtctgacgctctaccgattgagctaacagggcgattgtgacaaaacattgtcgatgttcatatgatcatgttcggaaaagaaagccaacaagaatagaaatcaagaaacaagttgtgtttcaactttagttttctatgatatttggattcagagaactctttgaaatcagaaagccttcgtttgcgatctcgttgattgatgatggcaaaacagtaagcatatccaacccacgatcctcgggagtggcccaaacgatttgactgataaaacctagcttggctccgtgcaaattacttctatcggttgagaaggcgatcggctggtaaacccagggtgcaccattttcatctaagcttccatttactggacttgattgtcagtccttcaactgcatgttttgtttgtttgacacctggacataacttgacctgaaacacccttccttgtcatactcttggttcgattcttggagagtccagattgtctgggtgtattgtcagtgctgaagttcgggcggatcgacttagcttgttccggctggttgcatccaaagaaatatggctgttgacttgaattgcattgattggtattgctattgccgtagacgtgtctttggtcgtcttttattttgacctccttgatatgcgccaacagagccgtggtcttatgttctagcaggcttcgaaagttaccatcgtattcaggaggactcggacactgtcgaaagccaagtgttaggccttcaatattgatgtcggatagacctcgtacggattgcccttgagtctgtcgagtacgctttggaggtgtcccttgttcaagatgtcttgtttaaaagcctcaatctcttccggtggatgtccatcccatcaagatatgtgactgcctttatgtgtgggcatcgcgcctaaatatatttctgttgaggccgtattatctgagtacaagtgggtttgtcatagtcgtcctccgaagtatctatagagaagacacgatgcttgcttctttctggacgatgccctatctgatgctgatctgtagtatcgacagcacagtcgatgatgcctttttttgacctgccttcgagggtaatgacgcggccttaccccttggactaagttttgtaatcagagtgtccccattgtctataattctgatacgattgaccgagacttctcctagcagaacatccttggcctggtaattccaggaatcaaagtatccatgcagattgagcaagacagggtgcgtggtgtattcactcaggggtttccattctccataggcaactctgatctgggttcgcgatagattggcagttaacccgcaacgctgtttccaaatccaaaacatatcaacattagtcttcagaaaccggattatatgtgaacgacataggaaaccaacagagataacctgagtcagagaaacatacctatctcccagcccaagtattcaccgaccgtggcagtcaaaagatggagtcattgtgcgacggtaaagagatcatcagttacggttgatataagtgatgtctacattgcctactctgaaactgcacacaagtgaaatggtcaggattgggaactttcgagcaatgccccgaggatgcatgagatgaaacaaaaacaagcccaaacgcggatttgaaccacggacctcaccgttacgagcggcgcactataaccacttagctattcgggcctattcgactgcaaacttacccatgaatatatcgtacttgcatcactgaccaccgacagtcggatgtagcgggcgagacttgtcccaaatcatagctcttaaacttgttgcagtgcagtcagatacacagattttgtcaaatgtgatagtatatgcttacactgtaggtttctgttctctaggagaccagtgaagcatgttggttcgtctcttctctttctctgttcgtctctgttcgtctgttttggctgttttcctccctcttctcgtctttcggctctcggatacacagcagtagccagcctcttcctcttgcttttccagctctctcggccgtcttgcttgcgcctgtgtatgtgtatgtgtgtgtgtgtgtgtgtgcgcacacctgaaagaaccagtgtcaggcatagagagagctgggactatatctaagtgatttatcgaatcaatcagcgcagaaagctctctggtttcgccacaggtaagaactatgaggatctatatatgatgtataagaaacattcgcgctaacagaaacttgatgggttgtacgaaagaaaagaaaaagttgaaaagcaaactcttcgttcttgtacttgttcccagtcaagtcctcactgctcttctaaagccatacacacaccatccagttgtctcggtaagaatggggtaagaaaccagaagagaaagaagaaacagaaatagaaaaggagaaggaaacagaaaaagaggaataaatgaatgaaaacgcgagagaagagagtcaagtgatagctagggtgttgtatcttctcagagagaagaccttgggactccgcgcaagatctgagggtgctatcttggtaaaagcaacgaactgcaactgaaattataacaagactgccgaaatgtcaacatcagattctgtgcttctgtctatgttcctctttccggtcgtctactcaagaagactctcactattatctgtgatgtgtatttatcacgatgatactgttcagaaattaaataatgcgaaacgatgcaacatacgaactctgatgccaaggtatgcatttatataattgaaaactaattcctctttgacttcttaaccacacgcttcctcccgttgtatgatctagtagcttgaaggtctccgaattttcgtttcgcatacgcctgggactcctcatctgccatgagctccttgaggatcgagcctgggcgagcagaagactccgaacgaagagtagtcgattggagtactttggattgactatgaagtgttccaatctgtgagagcagagcgagattgaacaaagcagaagaagaaaataggataagtgattagactacgaaggtcaactcacagcagacaaagaaagaaggcagaagatacatacagcgaacacttcaggcacatgcttaattgatccctgacccttgtagaaccgcttgggatctagcgaattccgaagcttgagagcgtggtactccctgaccatctctttccgcttatcttcggggatcataggcaactctccccaagcaaggggagcgttggctttccttgcctggaagtaaaagaggtatcaaagagcaaagtgaatcagaaggtattaaaagagagcaaatcagatggacaactgaggatctcgaaggatagatatcgagcaggcagagaacaaacctcttgagcttctttcttggatagagctcgctcgaccaccgtagtatctaactcatgttgctttttaataattgatggtccagcttctgcatttggcgtggcggtagagagcgagtgaggggctctagatagcttggagctcgatgttcgggaggcccgagaaaactttccttcttgtttgaacgacaaatatggtgttgggagcgaaggcgcggttaaagagggaagttttctttatgattttgtgagaaggaaacaatcaacattttcagcacagtttttgtattcttgaattccaatcaacaagagaaaacgaacgtttctttggtttcctcttccatagtgagaaccatctcctcactagccttgcgcaaccgctcttcctcctctgatctttcggcgttcgcgtacgctttcgatagaagggattctagatatgcttcctcgtccgaatgattctctccctctgtttcgtcatcttcttcttcatcatcgtcatcagacgattcttccgaggaagaactctcgtcctcagagtcttcaaataaaattttgctgttccctatatccttcatctttgggatcgagccattcccctcagtggagtctgactcttcgatcaaatttccaacttggtcttctacgtcctccatactttcatctggctgttcgctcagtctttcgatctgaacatgctcggacacgtcggtctcatcatcaattgtcttgttagaggggacggacgtggtcgagctcgattgggatgcagagaggttagaagcggcagagacgggggtagacgtcgaggtagagtgggcaggagtaggtatcaaactcgtgtcggatgaattttttgatttcgaagggcttgtagtggaaggaagcgcgacagaagcagcaacgggagtagactctgttgaatacagaatgatcgttccttcttcttcttctccgtcgttgccatcaatatcgacggcctcaatggtcgacccagtcccagtcttgactgaagactgcttcttgctcagcgccagtcgggagagaccctcaacgtctccctcgaacaaaggctcaatctccttctgctgtctttccatcgcttcttcctcgagctcatcatggactgctttggcaacaacgtcagcaattacatctgataatggctggtgggatggggaaggaacggcccctcgagctctggaaggtgacgttgatcgggttgaataatgatgctgggctggggaagcgatggcagcggcagtatgaactgactgactgacggaatgagaattaggagtctgttttcctgattgagccgatgagggtggtttaggtgaggctgtggatcgtttaggggtagagtcgttgctatggatcttaaacgccttggaaggactagcttgtgtctgcgaaggactaatcaagtttttaaccgattgcgaggagctagcaggagaggaagcagcggaccgtgtggacgctctggtcaatctacgagtggtcggagtgtctgacatagatgcttgaagaagaggagaggagaggagaggagagaggaatggagaaggctgaaagactgtctaaattggttccaagtctaggatgagaggaagagtttttggatgggaggaataggaatttggccggtggcgtttgatacagcatatgtcacgtgtcaaaccacatgacgtccctcatgggcggcaacatgggctcatcgggggtcaatctgaaatgaggcgtcatccgaccgtctatctcactcattttccttctttcctcttgcacttcattgtccattgatgtcttcatggtgctttcaacatcaccagaacaaatagggtggagcaaagagttaggaatattttctgttttcttaattttggttgttttcttttttgtttgatttggtttcttcgagaggtctctgactgatcgtcgtcctttcacacttggaaatcacagacctgagaaaccaaattaccgttcgtgctttccttcctcgatctggtcaaagatagaagacaactactcacataaggaagcattacttcattgtggctcagtagatcaggaagtctcaagttcaccgacccgtctatacgttcttccccgtccaacgttctatcacgatccaagaacatcctctttcagcgttgtttcagatatcacggccgaatcgatacaggaagaaactagctcgggcgaagactttacaccatcctatctatatataaaccaaccagatccagaggaaaccgagggttccgctctgtcccttctttgggatgatacaaactctctggacactgtcggatcgacagcatgctcggccagatccagatgtcgtcgtccttcgcctggccagcgccgagaacggaaccctgaacttacctctcaggctgtttcggacacgcccgataacgctcctagtagttcccccagacggtccagaggcctttatccttcccagagctcagccaagagacgttcagcgtcagcatcatcatcatccaactcatcctcctgctcatccgtacttccatcatcatcctctttgacgcacacaaggactcgatcccaatcgttctcgctcgagcccacgatcatggagacctcgaacggatatctctctcctgcaccacgaccaatacctacaccccgatccgttcgattcaatccccgaacccttctccgaactgcgtatggatcctattcatccgacagatcgggtgagctcgacttggcctccccagcggtcagtttcatcggttggcgatttccgaatgcaaaggtagcaggcaagaggagggcaatgtccctctcggtcgaacggtccgcctcgatcgataattggacagcattctatgggtccataggctcgaccccgcgtccaggaggaacttcactagaacgttcatcgaccgagccctcaatatacccttctaggtctttgcccggatcgtcttacctaaccaatgcgcctcttcttgcaagaccggaagatcctttggcccgtccggatttgatatcagatagttctgagcctccgtggtgggagagaatctgggaagggtctttttgggcgcaaaagtttggtggatgctgctctttcttgtctctggaggacgaggattggtcgggttcgatcagctccatagatcgcggggtaagatcggcaggcgattcaaacagaggattcttctgacgtgcagacacagttgtttgcatcgactcttcttccctctatctatcgtttcctctttttctttttctttttctttttctctttctttttggttcaattaatctttgacttttcctttgtactctgtttgattttcgttagacttactggattatgcccgagtcatctcctccatcatagaattctttaaaaatctcattctatcctctcttcgcctttgtaaagctaagcttcttgttcaactgtacaattatatgccactttcacagatcctctcctgctttgatgaattcagctatccacccaagtctggatacgtctgataggaatgaacgaacgcgtaaccaaccctaacattctggttacaagtcgtaaccacaacatctcaaaccgaaatgtccaacacgctttctccattctcattcaacctgactctggaagaaaagacctggaagagcagacggacggacagacaaaggaacgaacggacctactgttagaaaaagcttgccttcaccacccgcgaactatcgattagacacctgaggatggattcacccaaaagatcttttccgtccgaaagtaccagtggtttgccctccagcctggagacaaaacgactcaagctcgccggctcgccatcagatcccgcttctactgctgatgttgccgatgccgggcctgtttcagaagtcgaaggagcaaccgcccatgaagctgcatctgcgcccggtaagatcatggagaaacaacctatcgactcgaccgcaattggaaacctcagtcaagctggagtggatgatgatagaatggacgtcggtacgtgactcgcttctttttcttttttttttctctccctcttttctgtactattgtttccttcttcagctactctatcccctgtgtttcgctgagaaagacgtgtcaaacatctgaaggaagagcttactgaagctactttatgaagttaccaatgggatggaagggagaagctaacaaaacgcgtttttattcatccacatatgcctcgcttgctcgttcaacaaacagttcaagatacttccatcccttcttccaatacctcagttccagctcttgtgactcaactcgaatctgtaactgacacagcatcctcgatcgagacttccagacaagaaccggtctccactacccttccgaacgcgtcccagctcccggaatctcagccacaagacgatgttccttcagagccggaggacgctgaagaggacctacccgcactccgagctcgagcagctgcctacttggccgctcagacccaaccgatcatcatcccttcgtactccgcgtggttcaactttgccacgattgctcctatcgagagacggtcgattccagagtttttttcaaacaagaatcgaagcaaaacccctcagatctacaaggattacagagacttcatgatcaacacatacagacttaatccaagcgagtacttaactgtcaccgcttgccggagaaatttggcaggtgatgtgtgtgctatcatgagggttcatgcctttctggagcagtggggattgatcaactatcaggtatgttctatgaatggtctccatggataatgttcgtttcgtcgcgtctttttgcctgtttgtctaactcaatttgtgcttttcgctttctttcttcttcactctacttccgaaacttttcactgtgtctgtcagattgatccagatacaaaaccttcatcacttggtccaccctttactggccatttcagagtcacgctcgacacccctaaaggtcttcaacctttgcatcctgggatcaagccaaacacatcttctcctcagccagtcgcgtcgacttcgagaccgacaaccggatctcttaacctagatctccgaaaacaagtctaccagacgacgtctaaaggacttcaccgatcgattacaccgaccgaggggtcgaccttggcgtccaagaacgccggtctgaacggatcctctgtcggtggtcaacagaaagcgtactcatgcgacacgtgtggggtcgattgtactcgtgttaggtaccattccctcaaggatgctaaatactcggtctgcccagcttgctacctttcgggtcggttcccctctacgatgttctctggagatttcgttcggatagacgatgcagctttcaagcatgcctcgacggatgactggaccgatcaagagcttctccttctcctcgaggcaatcgagatgcacgacgaggattggacatcgatctcggaccacgtccaaacaagaacaagagatcagtgtatccttaaattcttgcagttgccgattgaggatccgtatctggcagccgcttcggcagagactgatcttggtccgttgaagtatgcggttgggctaggtgggaatgccgaggctttgccattcgcaaaggcggacaacccggtgatgagcgtggttgccttcttggcgagcacgattgggccgggcgtggccgcagcggctgctggtcgggcgatgggtgagctcacaggagacctcaagcaaattgcgaagaagccggaggaaggagactctagagcggacgtgtctgagaacaaggatgagagcgagaaagaaaaggagggagagcagaaggagaacgtagacgaggaggacaaggataagccgagggaggtagtcgaaggagatgtgtctatgcaggacgacgaggcggtcgtcggaagcccatcgaaagagatcaaagaggagaaggaggatggacagacgacgaccgaccaatctgacccggtctctgttgctcctgctccatctcggtcggctctccaacaggctgcgtcggtttcactctctgctgctgcatcaaaggcatcggtgctggcctcggaagaggaacgtcagcttcagtcgcttgtatcccggctagtagctgctcagttgaagaagctcgagctcaagatggctcatttcgaacagctcgaagagatggttgaacacgagagacgggcggttgaagtggctagacagaatgtgtacagagagaggatcaaggtgcttgagcagacggccaaagttaaggcaatgatggagcaggcccaaggtgcaatcagagccgtagaagggcagattggaaacgagagagctgcttcggtcaacccagcggttcgactagcggtcaactctccttctttctctgctccaccgcctgctcctgcccctgcctctactttttctaacgccttcacatctgctcctgtctctactccttcgacttcagtcgttcaaccttctctgcctcctacttcttcctcattggctcctgctggtccctcacccggtttgcttccttctgggtcgccttcgaccgttccatccgcacagcctccggctactgagcaaagcttgccgacaactgccaccaccatcatcccatctactgttcccacgcttactgctcctacaactaatgcgccggttggatcggcaaatcctgcgatggtgttctcggcggacatccaggccggattagatcagctcaaacaggcgacggacaagtcgacaggacctgtagtcggcgaggcggatgtatcgatggaaccgagtctatcgaccgacgaatctgctggtgagtgagcttctagaagaaaattgtttcgtttcgtttcataatctgacgacggggcttttatgttgattgtctcgatcttccttctctttccacagccttgttgcctctataacaaacatgcctagttctctaaaggccagatagcctatggagatcctttttatacagaggtcgctctaccacatataccacttctttgtctctacctctaccctttctcgatcctttcttctttcgaccttctctctgtgtcctatttagttatatttccatctttcaattcttcctacctttgtcttggtttccgaacatttatttttcttgttggttggatcgaccgtgttatacatttgttcatgtgtgttagggaacggatccgtcggttaaagccggtatgttacataagctgctaagatcgaagcaagacacaaaccctcagtccgagggaagagaaacctcgtcaacatggagacattgactctcaacaatgaggacaagcaaatgaacggggcgcgcatggagaggacacggctagagagaaagtagttggcatgagagcgacaaaaaaaaacagaagcaagatcgtcaagttggatgttgaagatgtcgagtgatcgaggatacctcgtgacctccaagagtgagaatcgcccgctgccgaccaattgccgttctcaagtggatctttcatccacctttgctctgttcagcgtccatccatttatctaatcatactaggcatactcaactcgttcatctgaacttgcgctcaccctgcctcaagaagatatgtcagacgcgtcgagtcagccgaagaagagaagacggtcatcagagatcgtcgaaaagcctcgacaagtgccttcgtgtgattgttgccgcatacgaaaaggtaagtcggatctctttcaactcttccgttctgtacttgtctctctcgatcgatcattgctatatatactccactaggatcatctgagtctttcccttagaggatcatcgctctttgtcgacctacggtaacgcgctgttcgacggacaaagccgtgggtagggttcacaaccagtcagaacgcaagcttaccgtatgcgtatgtcgttggttcgatgaatggacaaacatccggacaaacggttgggatctatctggatctacctcaatctgcacagtgaaatgccacagagaacctccgttggatccgtctatcaacctttacgatcctcaattgaagattccgccttgccgacattgcttatctctcaagattccatgtctgtacacatatcatcccaaaaagagaggtcccccaaaccaatacgtgaagtaagcgtctgaagtaatgttatcttgagaatcgggcttatagtttccttgttctattagaaaaatgaaccgggaagcagctgaggctgcagaaaacagagaatcgttaatgtccaaaggttcactattaagcaacaatggcagccgtttcccgatgcccgagcttaaacatctttcgagtgccaacagcctttccaccatatccatttcaacagctcaatcgagctccgaatcgccgggaggttcgtcgggttcggtctcttcggaacctaccggtaagatgtcttcctttgtctcgtcagctttgtccgccctaggtatagaccaggccgcccaaccgactccccagagacgacatactgttgatgggttgattcaggacaattctcagctcacagaagatgacccggtgagctcccagtggccaaactttacgaggagcggatcgctttctcgggtggacgatcatccgaatcacttgggttcagatctatcctctcttcaacgacacgcatttccctcaatgtcgttcgcgtcattaacgttaccacccattgcaccttcaccacctgtgggatccccgactggatactcacaaagatcaccgtcggaaaattatgccctgagtctttctgggatgagcgaatttcatgcagtatctcaggcgccgttgcctcagtcacaacataatcatcaattacggcaaccccaacttccatccgatcgttctcctaaggagatgtccagttcgttccccaaatcccatctttcgtctcatctcagaggagattcttcatatttgatgtcaagccagatatcaagtgctaacaagacttcagaccttccctctgccatgcacgaagattcaccctcatttgccgaggaatttaatagtgggactagaggatttcaacacatcttgtccgaagaacgttcctcggccatcacacctccaacttctacttctagcaatggccctgctccagcaacaatattcacccctccagcagtccatccttatcgatcgagcgcggaaaaaatcttttcacagcttggtgagaggatgccgactggattgagtgattcaggaagtaccgtcgggcttgaagttgccacgagtgatacatcgaccccaaggagtgacgcgacttctaaaaggttgcattccatcgaagacattcttccgagagacgctgcaatctatataatatcgctcttttttgattatgtatgtcttcgcgctctctatcttcttctggctgatcttcggatgatccaggaggacctgatcaactgacggatgatgcacatacttctttcaaacgtttggtcgctacaggtatggccgttgacaccgtgtctccatcaaccgacgttcatcgctgatctcagcgcccgacgaggttcatgaaattcacatgatttatgctagtccaaaatatctcacactgactatgtcacttgtaccggcttgccctgtttgcttcatatagaggaacgagattcgctgttcttcgctttggtcatgagcaccctggcggcgaccctagttcaagtatgtatacctttcctctaaatcttgctttttgactgttcgcccgatcgatagacatctcgtttaactttcgcttgatatctctcgctgtacctcgcatcggttttacacaacctttctaggttccgaaagtttacgtcccagtagaaaacagtcaggtccgaggactcgctggaaggtgtcaaaaagcatcgagggcaatcacaataaacgcgtatgacccacctaccttccttatggttatcatcaggtatgttaagttgactacacatgaagagaagagaactttgtagggacctcatcatatctcttggtcatgatggaggacaggtatttcgattgcgtgtaccattttggtaagtgagcgtacttcctgatgatactcctgaggtttcgtctgaataaactttgttccatatgtatggtgtcagtcatcgggaagcctggagcaaatagtatgttgtcagattatccatgcgtcatgtacatttctatgctgacgacctgatcgctggctttcggtcaattagctgcctcattcgccgaagccttagatatcgctgtgtctttgggtttacatcgtagggaggtaagtctttcgaccgcaacaccattagaatcacaaaccttatatccttgtaaattttcccgcttttacgcgcagtcatatatagacctaggtatgttaaggcctgctgctcataggttatctgtctgtcaatttgtcttgacctatcttatttcggatcgaatcaatctcctcaagatccaatcgaagatgagcttaggaggagaatatactggctattgtttgtcgcagataaatcgatgtaagtgctaatcttctcttccattgtttacgacgcaacataaatggcaaggactccactgacgatatcttgtcactttgatcttgtagggcttgtctgatagacaggattatcactatccaaatcgagaatatatcaaccccattgcctacagagattgatgatgaatttattacaaggcaggcttatctcccccagccatcgactaggactcctatcatcgtcggtcagtatatttcgtcaggctggattgtgagatataaacacaaaaggactggccagctgattattatcaatcgcgcgatgatcaggcttcaatctcgctacaaagatttttgctttacttggttctattctgcaaggtgggcctttgttgttatctcgcctgcaagggaataaataataagtcttagagaagtttaacaatctcacgctgtgctcgtcctcctcaccaacaaaaccagctcaacgagagactaaacggcatcctcctgttggggcagaagaggtgttacataaacttcgggttgtggcgtcatttatatcagacatggccagtgtccttcgagatatacctaccgcattcgttcaacaggactcgttcgattcggcggccaactcgtgagtcaatcttcgttgaaaatctcacagcacacagaaaccacgtagaagtcttaactttctgatcgctttctcttcggacgctttatctatcagaccatgtcatggctgggaagaggaagccaaaacccaactcacacttttcttctcggatccaacctcttcaagagagaatgcaaaagatgcgttcctggttagtcaaggaaacatatacgttacccaggccctagtgcgatttgttctcatgtacgcttttttttcttgacttgcatcatgtgattctcactttcgggctgagcccgtatgtaaatcttagctgatccattgattggggtctgtagacaataccgagatgaactattggatatgagtggcgctatcggctcgccaagtcggaaaggtgaggacttgtcccgtttcagaagtatttgtttactatatgctatatcctgacaacggtatcactatctcttaaccgctgtactcagccgccgaactggttatacaagagcgtgcgggtgcgtttgaccgccgagaagccgtcgctgtggacttgttgaacgctgtgagtggaatctcttcttatgtcaacattcgaaggcaaagacgtgctttgttcaattgactgggtgcccaatctggctgaaacaaatcatcagcttcatcgaatccctattcaatctgtaaattcaatatttttatttttccttttcctcaaaggctcgaactctatccttcttccttgattatgacatactaacttaaaacaacggcactgatgacggcgatggtcaaagcttgctgtgaacggaccatcgttggttcaaaaagtccgttttgtagcgtcaaccctacgtatgttctctttcacttttcttgagcgctaccgagaagagtttcatctgatctcatactgatgtctttgaaaatgttgtcaaaatggttgtagtggaaatcgatgcagacaccacgatgaataaatcagagccgatatccggccgtttaaatgcgtatgtttgcttcttcctgcttgttggactgtctagtcgtaaactggggctaacgttcacttggccggactcatagatacctctggggtacgagtctctgctttagttatctacctgaatgcgcagaaagaatttatttgccgactgacccttcctttctgaactagacttcctatcggtgctgagtgagatcgaaaaagtaaggtcctacccacctctttctgttctcttggactacaacttttgtgagaacccgttctgatctcttctcttttctcttctcgtcttgattctctaagaacttctccgagtgaacgcattcctcaaaagggtcgtcgatcctatcaagataagttctggtcacgcacgatgtactggaggcgaaaaaaagattgtaatgaacagacaaacggatgaacgcatatcatatttaccgataattatgtgctttgacaagaaataagtttctcgatgttagaggagaaaacggaggtacatgaatgaaatgagtggggtcaacatatcagtctacaaccacgatgggaagagaaaggatgggagaaggttgtcgatgtgtgatgaggaaggattagaaagactattcagaggcaggcataattgcgtctttgaagaagaagacctctgggcacaagaaagacactcggttgatcagatctttgatactttgcaggctaacagatgtttcgggtttcgttacctggtgctgattggatgagatccgagttttccctatacgaaacgagcttaacaaggttagcgctctgctcaatgtacatagaggtgaagtggactttaagacacacactaggagctgaaactcttcgcctttaacgtatgagaaagaaagcaaagacaaggtgctatgtcaatgaactgtagactggttgcaatttttctttttgatgataagaaaaaataaaaagtgatttactctgcagatgaaggtcaaaagcatcgtcgtccatgaatctgtccgaaacagagcgaggacgtggatggactagtcagctccttgcttagatgaacgatcgaaagcgcacgcattcactcgaatgtttcagaaaggaataccttccctatgtctagatagaagagactcactctgcataagctagaaactttgtgcctactacatcgtcatcttcatcatccacgcaacgcaatgttctatggaacaagacgccggctgaaatcatccagaaataatgagattgaacaatgttcctcagatttgacgagtcagcaattgttagtgtagactgacgctccttttccaagatgcgctgtgaagctctggaaaagcaagacagggttgattgatcttgtcagctcatcataaatgatcccagctcgagttgactgtgattgtgacacatgcagcaagatatactaaccctgccaagaacgttgttagttcttctgcaagtcccggcctggatctcaactgatcagagaagactccgtagtcagggagtcaatgtctgagcaacgttgttcatatagtgaaattttgtttatattctcagtgagtgcacctaccacggtcatccatacgaaaggggcagccgcagaatttgagctcgagacggatcctcctgaaggccgtgatattgtttggtgtttgtttttggtttgttcaaataacaaagaaaggagtttctcgtttcacgttagctaatctatcgccacatcaaatagaacgcatagatcgagtgacccgttcataccgttcgagacgaaactctcggcattgctgctgaggctgttgcttctcgctctagcagacgatctgtacattgagaaggcctcgttagcggagtccgagtttctggagtagtccgaatggatctgaactagttttgatgggcatgtgtatggtgaagacttattcaatgacatctgaacggtgtgatggttgaatagatcgaagatcgtgagatgtgactacgttgatatgccttgccttcaagcaagtttagaggaaccctaaccaatgatgatggatacgtaatcctcttgatctgagtttcttcagaccacaagtcaccagcatctcgtagctcataggtctagtttccttcgtcgatgaggtagcttcggcgggaagagcagcagtggcaaacaccagcaccactgatgagtgttgaacgtggacgattgccctcatcatcctcgacttctttatatcttctaagctgttggggtctatgcctgcttctttgcaggaaatccctcttaatcggttcaaccgactgcaggtcatgatgaacaacctggtgaaggctctaaagctcatagtccacagacaaagacacaaatagtcaaagagaaagagacacaaagagacagagacgatatgtcgaatcgagccaggtgcagctggattaattattcgtccggatccccaatgttgagtatacaaaacgaacatcaaagcagtcgagtcaacccagcactgactccgacatgtctcaaacagtgaacgttcggtgaagctttcgtatctgtttcatcagtcgctttctgttctcttgtgtaacgtagcacgtacaaacatgtatatgacacacatcttatccttcccgccaggacactggcgtctggacagaagggcatgatggtgtctgggaggcagacgcacaagcaacttgccacatcacgtgaccataatttcactgccttgaatttactcacgctcagaaatttcagatagtcctttccccgttctctttgcctctgctgcttgccgaccagtctttgcaccaacaaaataacgcttgatcgccatgcctaaggacaaatctgataccacttctgttcagaagaaggagcgaaaagaaaagaaggagaagaaggagaaaaaggagaagaaggagaagaaagaaaagaaagaaaagaaagaggagaccgcttcggaggtcgagcagcccaaggtggaggaggaagccaacggaactgtcgatacgtctacccctcagccggaagcatcaacatcttcgaatcagtctcccgctccggaggaggtcgtatctgattctattgaggatgttgccccgacagatgatgccgatcttctcgaaattgatcctaatgctcctgctcccctctctcgtgctgctctccgaaaatctaagtcaaaatctaatctccgagaaggcgccgaaccctcgacagactctgccatcagcacttcgaccacctctgctactacctctagcaagaaggctaaggacgattcgaagccgggtaagtattcggtctgggtaggaaatctgtcgttcaagaccaacgaggatcaactcaggcagtacttcaccaaagccttggtcaactcggctgctaaaggaaaagggaaaggaaagaagccggccaagagtgaggacgagtctggagaggatagtgagagtgatagcgagggagatagcgataacgaggaggaggagagtggagaggcacggatcacaaggatcaagatgcccagaggacccgctcaatcgggcggacgacctggccagaacaaggggtacgtttaccttcatctcgatctctttccttagatatttttgcgcaaatcaaattcactgtctgaacgcaatctatcaaccttaatatgcgaactcgatacaggtttgcctatgtagacttttcaaatcgagaatcgtgtctggaagccgtcaagctatccgaagggcacctcagtgcgtacattcgttccttccatgagtttgctcgttcaattcctctgacctgaccaggtttctcttcttaattatgttccctctagacggtagagcattgctcatcaagctcggatcagacttcaccaatcgaccagtcgcacccaccgcagccgtcgcctcccttcctgaaggacagtccaagtccaaaaccgcccaggctctgttggctaagcagaagaacccggttggtagtacgctctttgtcggaaacttggggtaagcctttccatcttattacctcttctcggctcgcgcccaagcatgctatacgcacgcgtccttattcccattgatttctccatccatcagattcgccgcgactgaggagatccttcgaaatctaatcgagtctcactggtccacttcgctttccaactctaagaaacacgctcagaagcaacctcggtccaagttcctccctgagaagagtgagattgatgccgccgctgccgctgccgacgctactgctgccgatgacgaagacaagactgagaagaaagagaccaagtcggacgccaaggatggggcgactgagacagccgtggaggagatttcaggagctgggttgagaaaggttaggatgggtcagttccaggataccggtcgatgcaaagggttcgttctgtctccactttcaccctctgtctgtggtatccttgactgacatcatcaacgacgcatgcgtccctgataggtttgccttcttggatttcttcactcccgcacaagcgacggctgcgttgatcgacatgcgaaaccaccgattggacggtcgaccattaagcatcgaggttagtgcccctgtttcaaggtctctttctccttctttcctcctgagtcttatccgttattatgctttgtctccttgttgtcgagatacagtttgcctcggcagccgccgccgctcgatctggcacgggccgcaatacgttcaacaccccaatcatcgatccccactcctccacctcaaacagctcttcgaacgcgaaccaaacgacggatgacgccgcccaacctcaggttcaaatcccaaggaagaaggtccgacctatgaagagtgagcgagcggccctcaaggctgccgctgctgctgctgccggtggggccgccggaactgaaggcgaaggagaagacggccgaaagaggaaggagaccgccgatgacgatgacgctcagggagaaggaaaggcaaagagaccggccaagatggccaagtgggagaaagcaggtagacagagacctggtgctgctttggcaatggccaagagagagaacgtggggatcgtggagagtttgggaacaaaagtcacttttgactgagtcccccttcttcgtcaggttgtttcgtcttgtgttgtcatgtcgtttctttcattgcatgattaattctgttctaggagaaaaggaagaggaaaagaaaagaaaagataagagacaacgtattcatgccgtatgcaagtatgtagtaaggcaatgctagtctggatgaaatgatccagacaatggatttgaaaaaggaaagagaggaagaaggaagaaacccgtaaacgaaaaagatgaacgggctctttatgcaactgtgtcaagaagagagtgaaaatgaacgaatagagaagaaatagaatggtaacaaatttctctatggatagaaaatcgaaagctaaagaacagcaaaaaaactacgaaagctgtagaaaaaaatcaagactaagaatagataaacaaatagatggatggacgaacggactgacgtttggacgataagaataaaaggaaaaggacgaccaaaaaaggagaagacattgctagacatgcacatgtctatacggtcgtctgtgaagtctctctctctttctcccgtccccgctctctttcttcagcttcacgaacgagcgcgcaagcgacttttttgattgagttttgtcacaatcacgcgataaagaaacaattgatcaacttgagactcccaatagatgatgaaaaaggggcgagagcaagaaaaaggacatacttttagaccgggcacgtaacttctttccatacagaaagatcagaagcggacagaacccgcccacaaaggctatgcaacctagtaacgtcgatgcactgcattggagaaggagacaagcccctcatatattcaattcatgtaacggacgagcgcaagataggaaaaaaaaagcgggattgctcactaaggatacccaaggttttcgtacaacgaaggagcaaataacgggaagaccgctgcaaacaaatttcgaaggagcgattgagcggcctgtgccgaagatgagtattgctcatagctatcggaaaaagaaagacgatgattttaattaagcatataagccaaaagaaattggtagagagggaagaaaacggaccagtcgctcaaataattgaaaacgccggtgtagcagagatagattccaatgtttgcaaagagcagagcggccgctggtgaaacccaggagattcccggtcgacctgtccatgcgtaccaaaagatacctaccaacgtgagggaagcgtgaagtaaattaacgaaatggacaaggccgagcgcatgatgagtcagggcgagggatgagatgaaagcaggacgtacctgcagggaagatgaaggctccgatcaatgtccaatacaacctagcctctggctcggcacggccgcccgctctggctgtagccttttggtagagtacgttttggtggaactcgatcaagactccgatagtggctgcaattcccaacgttctgtattcgtacatgttcagagaggaagaagcagtcagaggggcgaagagagacggtgttgttgagaagacagtggaaagacaactgacagaagaaccaaaccggattcaccagaattgaatccgtactgtccaaagaccatggcgacagagttgatgaacaaaaagaggcatccccatacgaatccgacccaaaggctgatcgcggagacgatcggttcggtgaacaggaatactaagatatcacaaacaagtacaaaaaccttcaatacatttgcacataaaagcgacagaaaccaaagatggaaggaagttgcagaacggaacttactaagaggccgactgattgagatcttgactagggttttgatatcctttcgttcagcgtctcccggagcggcatgtggcttcccagtctgtttcgtcaacttgaccgctcgtcgcgatactgttcgattcaaaagaaccgatcaagcgacccacagatgttctatcagcgatgacttaggtcggaaaacgagatcaccggacgaatacaaagacgtacacaagatcgatcctcgagtctcttttaatgcaaagatcagaactacaaacaagcctccgaacatgatcaactagagagggagataaggttttcagttccagagtggtcagatcatcaagatcgcagacaagacaaaaaggaatcgcgtacctctaaccagaaggtccactggtatccaagccggatagacacccaacccatcactaaggaccgcatggggaattcagactagagtatcaatgtcggaacgagagatacatgtatagtaaccttcaaagaaagcgacgaaagaacatactggcaggtcctaatgcttgaccccaaaagacaaacagagagtaaacgctcatagcttgccctcgagctgtgttccagaggaatgagcaaaaagattggagacttcaacgagatattctggggcatatgtcagcctgtggaagaatggctgccactcacactctgcagggaacatgtcggcaatcgagcctccgaccatagagtttccaacggaggaacacattccctggaagaatctggagacaaagattccagtggggccacactgcaagatgccaaaaagagagttcaggaatcgagaagagatgacacaaaaagttaccaaagaacaaagacacgagactgaccaatgcctgaggaagacagagaatagtgttgagaaaactagtgacgagataaattttgtttcttccgatgagctccgaatagggcgcgaggaagagaggggtgaacgagattccaacaagaaactatcggcgccgagacagaagtagcgttgatattggtttaataagaaagattatcagcagatgagaaagagtgacctacacccaggtaaggagaatacagggagagaggacttaccaaagtgtttcctatcgtccaagtgactttggagactccgagcttagtttgtgcatctgaaaaggccaaactgtaggccgtggcgttgaaagcggtgagggaggtaatcgacacgcaacacagggtgatgatccatttcctcaggtttaaccagttcagcgggtcctttgggaagaagaaagagaaaatgttatgtcagaacatgtctaaagaatttaaaccaacgaacgtacttggaaacacaaacaaatatgtgggacatacctctggatcacctataggaaaatcaatgtaaatgatttcttcatgcgtacgaacatcggtgaggggttcttcaaaacgctcgcctctaccggacctggtagggtagagttggccgtccatcaggacggatccgaccttgtggagcggttcgcccgagatgattccaggttgggtctccttcggacgaagctctgattcctgggtttcctcccccacttttccttcaggcaaagaaccgaggtcgtgagacttttcccagctgggagccaagtgaaagagtttatcttccgcggacggagtgttgacggccgtttgaggaccggttgaagagatctcataatcgtatagcgtgtttgcgcacgagacgtcctctgaggattcgtgtctgtggtgatgatagtggtggagcgggtggggatgagaacggtgtatcgaggaggaagatggaagggcagctatcgaggctggggagcgaggcgagccaggagcactcggagaaatcgatccatcggcagtcgtgtgatcgatcatgtgtatatgtgtatacgtgtatatgtgtatatgtgtatatgtgtgtgtctgtgtgtgggtcgatagaggagctatttggccgcggtgtatgtgtctgcggcgacggttcggagggacgagctaggctagcaatctgagctaattggagaatataaagaagagtgaatgagtgcgtgcacgttgtgcgccaacaaagcaggtttgtctgaccgactggaccaatcaggttttgacgatgatggtgacaacaatgttgtagttcagcaggagactccaacgaagaggaagaaaaaagaatgaaaaatgagtgtataaagaaacggataaagaaaaagccagcgttcaagaaaatgactagttctgataaagcaacttgaaataaatagatgaatatttaagttgattaaggttgagatatgggttcaactagtgaatcaagccgccccggttgaaatcccggaccggattgccggaaccgaaggccgtggagataccgcgttgtaaccaagagtagtgaccactctgcgcatgagcatgatgagtacaagagaccgagtgacatccagacaagcgatcaggccaaactctttgaatacatacacatgcacatacacacaaattccgtttatacaacaaggaccttattgatgtctcatcagattacatttctttctccaatctgctctctcctccgctattgaatagtattttttatggaatagcttttgacgagatgcagtttacacctttgtcatgtttcatgtttcattcattcttgttccatatgtcaagaaaagattggtcaatcccgtgttgaatcgggtccgtcattcttgccaaagaacaagctacaagagagactatgattgtcaagatgactggtttgacggccacatcgacggcacatttactagaaaccgatcagatcgcgtcatgtcacagttcaagttacctggatgttttcgctactgtgagaacatgcgttggatcgaagatctatgtgaacgttcgtgcggacgcccgcctgtttgactgccccgcgtgctgaccgaagaaaaaagaagaagaagagataaatagaattgaaagccaaaaaaaattctgaagaaaaccctgcaagcagaagaagaaaaagaagagaaaggctgggctcctagatccggggaggaaggagaaagccatgaaagaatgttaaccaaattcgagactagaccgagtgggcaatcaagtgcaacgtacttcgtactcattggaacccgcagttggggactaaggtgaaagaaatataaagacgacgaagagaaaagaaaagatccgaaaaaggcaaagaagacaagcgtcactcgggcggaggagcagaggattttttttccaattaatacaggaaaaagaaacgaaacaaaacaaaataagataaatacaataaaatttaatagaccgtctggacgactaacgactgacgactgactcaggcaggattgggcggctcttctatcatttccatgtcaaccaaccgcctccacacgacgcaatctcaaacacatggttgtcacttgtcattagatcccagactgcgagctagttccgtcctggggtgaacggtcggtcgccgaccgccgtggggcttgatgtgcctctactgcgtaatcctgggcatccagccctttcaattgcctatctcttcggatttatttagcgggtttccccctgtcccctgtcccctctcccctttcgccttgtcgtccaaacctctgggcccttttagtctttttctgttgtcgtgcctatttgtcgtcgggtcgatcgggtgcctgcttgtgtgaaaaagtaaaaacaaggggaagacggccgtcgtcacattcagatgacaatcaggaacagacagcgagcgaccgaccgaccgatcattctaatcggcctttggccttttgcaagttccagttcgagctgtgtgtccatataaaattcaatttcgcacggaccgcctacaacctaaatgttgactgcgtcggccggctcgctcacttttggttcagttataaatccccccgttgtctgttctcttttattctctctttttttccttctttctttctttcccttcttgtctctttcttcgttttatttctctttgcttcctttccgtgaatccttctcgatcacaaaccagcatcctactcgtattcgtatcagcatactcctcctatcatcattcatagggaatgtccgccgtcgttcgtggtgggtcgaaccagaagtcgctgagcgaactatcgatacatacctgtacgtcagcatgtctgtccttttgtccgagatcatcacccttggcaccggctgacatgatgcgcggttcaactcatgtctccagcgcgcatggcaacctttatctctcaccggccacctccgttcactcaatcacaccaacacccacacccagcaaaccgactcctgcctagacatctcgaacctaccccggcgtttgccagctttgtctcgaccgtgctcgagtccactcagatcaatcagctcgtcgtcgtccttgccttgctctttcttgaacggtaccatcgccaaagatcactacgccaagacgtcgacgttccgactgacgcgcagctggatccggagcacactctctttcttagctcactcctcgtcgccaataaggttgcggacgactgcaattacaccaaccgttccttcgctgatgtctcgggtctttcccttcctgaagtcaacgcaatcgagcgagcttttcttcgaaccatcgctttcgatctatgggtctcgaccgaagagtttcacgcctggctctatcgtctcactgatctcggcaaggctcgccatcgcgccctccaggcattcgttcatccctatcagccgttcttaccctccttccaccaacgactatccacccctctctccgtccctggctcgacattcttatccctagcccaggtcgttcctcccccagccggttgctacgtgcccacggccaataagtctcccaagctgccgtcggccctgcttacaccaaactcaaattctcaacggaccgtcaatcatcccggaggtcacgctccccgaccgttcaagcgttctgccgaggacgcgttttctagtctcgatccttcatttggaacagacgtccggccagtcaagaaacagcaaccctcaggaatctcacctacgaccgtatctgtcggtcaaaagcccaacccggctgtctccacccttcccactcatccatcatcactgtatccgtctgttcagcaacatgttttcttacagcataccaccccatctgcacctatcgtcacatcctacccacatccgcaccaactgcatctgcatcagccgtctcttccagcatcgcgcttatatacccagaccggtcaaccggcttacccctcgccccaccatcctacctatccctcatgcgcacctcaccagaccgttctttccgctgggtacagccatttgcttcctcatctgtacccgcattcgtacccgtactcttacccgttctcaatcccagaccgatccaaaccatacgacgtcatccgtccggatccgtccgtcttgccggccgctccgacgacgatagcgatggcagcagtgatagctccattcgccagtttgaaggcctcggcacaaggaaaagacgatccggataagatgtcggcctcatcctggcaagctgtcgaccggtggcgaaaggctgtcgtccctctcaccgccgacgaaggcatccttccttgggctggcttggacgtcgttctcgtctaaatctatatttgcttctcccatcttccatctcggtttctcacttgtccaaatagatatctggaactgcatctacacttttcatacatgtatcaccttacacccatcatttgctcccttttctttctcgctcatacagagtttatgtaaattttactactagcaatacctctcatgagaaactttcttacgatacacatatatatgtctttcattgtaaacgtcctagtcatcttctatttcacgaacctgatgatcctttcctcgttattttccaaatttcggatgaccgagcgaaaagggaaagaatgaaaaaagcacaagtttttgatatatctgtaagcgaaaacaacggtatcgaaaggtagaaggaggaaagcaagataactagagcaggtt

SEQ ID NO: 441 - DNA, 17361 bp, Xanthophyllomyces dendrorhous
caaaaaaagatcacgagaaagaatgaatagaaagacaggttcgtcttttaccttgcgacgtttgtcagaaagccgcgggtcaaggaaaaaaaaagaaaaaggaaataaccgttgatgagagtcaaaaaggatgagagatagacaggcagtccacacacgaaaaaaaaagttcgaagcaatccgagaaggggaacaaaaggagacaagaacatccggagagaagaaagggagagtagagacagaaaaaagaaagaaaagaccacaaagacccaaatgttgacaaacgaaaagaaaaacaatgaaagacaaagaaaagatcattctcaaccccaaacgccagtagacgcgttcaaccttacttgtcctgcaccatcacggatgtcttgaccgttttcggtctctggagtaggcaacaacggtcttcccagttcgttcggatccgtattcaagatctggctcagattcgaatttgtattcgaatccaagttaaaattagggttccgatgattgttcgaggcagattgggaacggagatcgacacttcggttggctgacactcgagatcttctccgagcaaggaacccttggactctggccgatggacctgttgtgttggtactgttggtgctgttgatcccattaggtccagcgggagtgcctatgaaggtcggggcaggagtcgttgccgataaagaaggaagaatagcgttttgcgagaaatctatgacaaaccagagagagagaagaaaggtttagatacaacatcgcatgagtcaagaaatgataagaataaagaaggaaagggaaccttttcgacaaagaggacagactgcgcttatctcaatgagccagctgtcgatacaatctaaaaaaaccaaccccgaagtctctatttcagcgagagcttcttttttcatgctggaaaagagcaagtgaaacaaacctttatggaaccgatgagaaccttgacaaggtaaaactctaataccatccccatcttcgaattcaagcaagcagattggacaactctcttcgacatcctcgaccgacatgacatcttgtgtctttgatattgtttcattcgcatctgatgcctcttgacgataatggatgttctgttgaccggggccttcatcaatcgtccgagacgtcccgtccgaagcgagtctggatgtggacgaatttcgagtgcgacggtcggtaggggagcttggtgatgatgggtcgtcgaacttcgactcatcctcctcgtcgccgagggatccagcttggtttgattgtcgaagcacatttaatgtccatacctcatcttctcccaagtgacgatgatgaccgcccagtcctacctcggctttctttttcaccggactgtcaccattctctggcaatggtcgatgagccccttctgacgatgacgcgccacctcgacgaacatatcgaacgatgggaaaactatcgacaatagctctagcaagtcctgctgttcttgtctgagggacgtaagattcagtcccggatggactgaaatcgtcaaaggcaggatcatcgtagttgtacggatactgtctggcggcgggaactcgtcttctaggaccgtaccgctcaggatgacgtattgaacgaaacacccctagggcgatcacgctgatcacaatagctgcgacacagcctgtggaaagaacacgaccaagaggtaaaatttatcaaagacttagtaagcgcgaaaagcaaagaggatcgcgtctgcagaagggttctcaccaatcacaacgtatagaatgatcatcgccaagctcttgcccttcccacctccggattgagcattgctgccagaagacgaggtcgaccctggagcggttgcagttgccgtagggacaacagtggtgtctgtactagtagcgttgaaggctctgaggaaagcaacgacataggtgtttgagagaggatatattccactcaatagagacgtcaccgagctgtaagatgagtttaagagtgaagggttgaagttatgaaacgcagcagcgcagtgttgttcgaatctataaagacaaggagatgaagagagacaggacatgtgatgtaagtcgaagctttggcaggtcgcagaaaaagaactcgccaagaaggaaacgtactgagactcgatgatgatggcgtcatttttgttccttgttgtatacacatctaggggtttttcataattatctagataattctgggtgatctggcatccttcggacgtgttcgagtataacaactggaacagaatcggagaaaacccgcttcagccatccatcatactcaggcaacataatcaacagaaacaacagactcactgctgccatagctccccgatcccgcgcgagggaaaagatgtctgaacagagttaatcaaaggacggtcaggaagggccaaaggaaaaagaaaaaaagggattgtagcaagagaagtttgtatgattgaccgttttccatactcatgtctgtgatgtttgagtcacaagacacgaatgctattgagatcaaaaaactatttagcaactttcttacgtaaaagtattacacaggaatcatacaggaaacgcaccaatccaaggagtattggaagaatcgtttgtttgtgcgagatcctcgctgtgaagagacagaggtgtcagaaaagaaggtgagccatcagtaggagtttcaatctccctcttttcgatcagctcgacgaaacaacatttacgaaaagtgcacaagagctccctggacgacggagataagaacaatgtttgattagcttggaatatcttttgtattaaaagggccaagagcgactgggggattggcgatgaaacataccctgtccaatcctccatttgcgaactcatttggaaagtagtcagacgtattggcatcggccgtgctgaattgatagccgaaacgagagccaaggtcaacacgcgaacagacctcgactacgaaccaaaatttcagatagaggcgggtcggacaagggagcgagaaaatagttagacagacagttgaagcgatatgtaagcgttgtatgttccctgtacccagataaagtccagcatagacgaatcgtttctggagagggccgcagtgttgttcaaggcgaaagctagaatcaagcatgcaaacagacgatttagctagcttgcaaaaaaaactgattgagggatgtaacgaactgacctgggatgtatccccgagcgcaaaccgaacacacaagaacgatccaaacaaccatcatgttgaagatagagagcaccacgtcgggttgtttgtccttgccttccctctttgttccttgaaaagattttacctgactcgccttgaatctcctttggtttagctattgccgcctagccaggtttgagtaaagatacgatggaccagtatatgtttgtatccagagtccaacagattgaatgaaagctcggtgaatgtataagctgctcccgcttgggcacttggcccggccggtaattaactccggtgagtcacctgtgtgatcgttgtaaccacagagatggctggttggtcagcggaagtctcacgtgtttacatcctgcaccgctcgatcgtcgccgatatcctacgtcatagactgatgatgcccagggttgattacactctaatcggcccctgggagaccactcagtccgtatatgcaatccatggactttctctcgatcctctcgacgtagcccgggaacggcagaacgcccgagggaggcctaatgaatctagactatggatccagatttgtattcgatcggtaggaacaaggtacgggagaacaattagattgaaaaaaggtacacaacaaagcgcgaggactattcttcggagaattcatccaacaagatccatggctgtctctgctggacggcgtaggatatgcatgattacggttgatggcggatcatcaagcagacaatccacagaatgctgatgatgctgatgatactgatgatgacgatttgaacagaacaaacagaaagtacgggaagataagaagaatcaaaacggaagagaacaacggcttgatccttctttcgttcgcttcaatcctcgattcttcccatcttgccttctatatatctagcttgatatctggattcacacagcattcaccgcaagatgtcaggtaaacttcaacagaatgggtcgcttccgcttcctgcttcggcagaaccgaagattgaacagtcgaagaagcaggaacgaatgaccgaccttaaaaaccattgtaagaaattattttcagtactggattcattctcgagcgcatcgtgcacgagcagtcactgagatggtttatcaccactcgatctggaacagtcgtagctgctattggttggtttgtcttcatatatagcgtccacaaaggttgagttgttaactaaaccatgtctaccaaattccaatctcaggagagtttgtcggcaccacgatgttcttgttcatggcctttggaggaaccaatgtcgctggcgttggaacaggttcgtttgagaatacaccatgagcaggtgaatcctcaagttcgctcatctgaacttttctaaatttttatcatcaccaactagatactaatggcctcaacgtcaaccagattctcttcatctccctggctttcgggttttcccttttagtcaacgtctgggtgtttttccggtatgacctatgcaccattactctttcccttatagttccttttctatgctgacgtcttgcactaaatcgaccgtccctcagagtctctggaggtcttttcaacccggcggtctctctaggactagctctcgtcggagccatcactccggcacgagccgtgattcttgtgatctctcaaatgatcggaggtatctgcgggagcgccttgatttatggtctgcttcctggcaggctcaatgtccggacaacactctctgaagggatctcgatttcacagggcctgttcctggagatgtttttgactgccatgctcagtacgtctgttgaggacaatctaccgagacagtgtgttcgatctgataaaacttccctttctggccgtctccagtgctcacaatcctcctgctcgccgccgagaaagtttgtgaatcttcatgcgtttagttccttcgctatttcaatcatattcttacgtactttgttttgcgtcggtgaataatagaacaaggctactttcttggctcctgtggccatcggactggcgttgttcatctgcgagatggtgggaggtaagtcctcagtttctctgttcttgtcagctcaacatggatcacgccaactcttattgacttacaaatttcatcgcatcatcggttgtcagtatactagtaagtacatatctctttccgcaatcaaccttgacaacaaagtcagctaatatgcattattctttcgtggatttctcccctataagtactggtggttctctcaatccagcccgtagttttggacccaatgtagtgcttggtgaatttgaaagttcccattggatctattggctaggtgaggatttaacaacttttacactctttcgcttccatcaagtgcgtgattcagataaacacacccgctgaatctcgttgatgtattacttctctgatccgaaggtcctgccatgggttccgtactgtgagtgcacccattggtgtatcttttaaagaccaagggcctgatatccgtcaatctttttactacctcatagcgccgtcggattttatttgctcatgaaggcaatgcatttcgaagaggttgtccccgatcaagatgccacatccgatgcccagggtgaccatcagaaacatttgattgctcgaaaatccaaattgtcgcaaaagccctcggatggatctcacgctctaggaacccacaatgacgactcgcgatcgatggctacactttacggcaactcggttcaggcaaagcacgaacccgagccggaagaagctgatggcgaaaaccttgatcccatctacagacgattcgacgaacttgatgcaaagctcgatgcgctcctcacccagagagagcataccgctcaacagagcatttctcatcgagtaaaacctgccgacaaagacgtcagcaatgacgaaaagttagagcaacgtgttgactttggagacgccggtagagagaaagatgggacatctactttgcttggacgaccatacaaagttgaatgaacgagtactcacgtcccatgaatctgtctacccaccctatttatcttctttattcctgtgtagatctattcaagcagacccagcctgtacctaaagagattctagagcttactcatttttccctaaccccttgatatggtacttatgaatccatctataaattatcattaaaagtttatcgagaatcacatgtaaattagtctttgattgtgtctctttcccttcctcttcctctttctgataaatacctggtagccgtgatgactttcaactctctgacctgattagtactcaatatattttcaacggagaacaacaagaatcgtacaaatatttcacattattatcgggtcgagaaagagcagaacggaaacatagactaaagagaacacggatgaacaaaccaaaagaagagggaagcggaagaggaacataaggtgatgttggacaattgtctatccatctatcgagcagccctggcttgacctctggcccctctagcctgtttttgtctttccttagcagcagcagcatctgctcgacgtttggcgcaagtaggacaatgccatgttcctgccggaggagcatctagattgagacatgttaagtggaactttgatggaaagttcaagagatgacaagtgttagttctcgttgaatcaagacggatagaaaagatccagagaagaaagagacgaacccattcgatctcgcaatccatatcgtcacaaccaatcatctcgccgtaacttatatcgttacaatagcagtagttcctcttgtctccaccttcaccaccttcaccttccgtctcttgcgaagctcccgtcggattcgtcgaccctcctccagctggtccgactccgggagcaccagaagagccggcggcaatggcagaagcagcagcggcttcggcaccatgtccgatgaatctggatgacgggaagggtccaccacctgatccaacgacagccgataccgtcctcgtcggtccgttttcatcagaatcggatgaacctcctcctgctcctccgcctgtggccatatctacatcaggtccaccaggttgggatgaagctttggctttgtgtgatccatttctcttcttgactcctgccgggtttcgtcggtgttttgaaccgccagcggttccagtattgctgtttgtgttgtcgtcttcatcttccaaagctctagaagtgttagcagtgctcgtttctggagaggagtgtcgactgttcttctgaccagcgccagcaccagcaccaccactactaccaccatttccacgaccaccccggcttctagctttctttccaacgtcaccggcatcaaggttatcgatccctgcaccgtaaccgtcgccaagggaagtcacagaatctaccaggttgagatgttcgaccgcgtttggaatttctgcgttcttgggttgagaagactctgctcggtttcctctgggctgacgcgacgttggctcggcatgagagattcggggagatactccgctcgttccgatctgggaaccaagggttgaaagtgcaggtgaaccgtttctgctaggatcactaggggaaatgaaaaagcaagcaagaaacggtcgaagttgttcccattggcactgagatcagtctgcaagcctcagataccaaaggaaacaagtcaaacaaaatattacacatacgctttcttcttatcttttcggcgacctccagctgtggaaccattcgtctttgccggacttttcgtcccggccggtagactttcatcccagtcatcctgccttgatttcactttctctgcggcagctgcagcggcagcggcggcggcggccgctcctcctgggttccttctctgtttcttctgaggcgtacccgaaccggatgggtcagcatgagcgtttgcacctcctcgagtcgcccgagttcgtttgccgggaatagtcggtggaagaaagagagtgccttctgcttgaacagcggatcgggctgtgagaagagtggactgagagagtagattgagtagatgggtttgatgagaaattacctgaggaagaaagcgtcagaaatccatccatccatccatcagttttcatcacctcgatcgaattgagcggtcgtttcgcctgattgaaacacgaattccatcccaaaggcaacgggcgacggtgaccaaaacaaagcttgactcactccttcacagactccacccacgactcggatcttgtcttctcctccgagtttgaaccgttgagcaaacacggctacttcccggaggatagctaaccgttcggcgggggtggccgtcgggtctagcaagatggatgtgagtgccttgatggactctgtcagatggataagcgaggctatacgtagaatcaacagatatcatgggtctgtgagtttcatgtctagaagtatccaccaatggaagtgaggctgaagagaagataaaagcgaaaagccgaattgagaatgattgaagtgaaagagacacgaacaactaagaacagcgtccagctctcgcaaatccgagaatcccctcgtcagttcgagtggaagggcatcaagagtgtctgcaaagttagcgaccgtgatcaggtcatgagaaatcggagagtgagccatctcgaggcgatgagtggtagttgttcaatgaatgctgatccagcagaaggcagaggatgctttgtggtagatgatctgagccagagcacagctttcacgtctggcctatatgttgcatatttctgccaaacatccaagctccttcttcaccatgatcttgtgcatatttcattgaccgtgtggaaaaaccagatgggttaaataacatgtagatacaacgtcgttggcattcgtcttttcttttgttggcaacagaaaactacagatgaggaaaataacattaacgacaacaataatcaagctagttccttccggaccggcggttgaggaactccccatcccaactttccaaacctgaatccgttttcatcctcaaacgcgccgtcatatgcaaaaaatgagacgagaaggcctgttccgatgataggcactagagcccaaacccagaagaacggaacgagccatcgccaaagctgttcttcctccaggttttcccaccagaataggatactcgccggcctgtcggccctggtcggagggagccccatcttttctcgaaccaggacccagccattcggatcgtcgacttctgcatcaaacatatcccacgccttctgaacccagccttgatctttacctttcacaggcctagccatgatacgagctcggtatagctcagccatcgtttctggagggagatctctataccgaacagtagggaggtgatctacaggccgaggggatgatgggagcaccggttctgggtaggccggcacgctaatcggtcgagggaacgtcggtaacggattgtgccgttggtcatttgggcggattttatcatgaatgctaagggattcccacgggtgatccggagggaatgctagaggtacgagattttcttctcgtagtacactcggcttgaagagttgcctaggatcatcgggcacagcggcgaccggcacctcgatatcagcttcttgagcgaaaggaagtgaagtcaggggcgatgacgtcggaaggagttgacgctgggcatgaaaagattcctgacgccggtataacgatggacgaggggtatctgacgaggaagaatgcgatgagggagaaggcgaagaagctggagaagatggagatggacttggcggaacggatggatctttggaatagcgtacgtggcaggaagcgaatgtacgataactgggtatcgagctatccatgatctgatagataggaaagtttgagcaaaaagcatcatgagcaacatgcgaggaagagactatcgttcttacaggtctgagtgggaatctagttctattgatcgacataaacgtcgaccgggcaagacggcttgtcgacgagacaaacatctagagtaacacatagaaagacgagaagaatcagagaatcagccagtgaattcgatcgatcgattggccaaataggatgtcaaactgactgcctaagagttcctctggactgataggaaactggagaggtgagcgataggtagtaattcctaagtgatggtgttgatggctcgaatggtcgaatggcgttagcgacaaataagcgcagtaaagtcgatcgaacacaacattctccatcacccatcgtgctcaccatctcatacgatgagcaacatgtcggactgcaacacagatacagatcaggagccaaatctactcgcaagtcttacaccaacaaacactctcgagtgtgacattgctatcgttcatttgtacgtctgatattgctgggtcgatcgagactgaccccttccgtgccaggtcgtccatccgtcactcactttcgttctcattttggctggatgatcctcttcacaaaatcatgggactagtcaactgagggatctgatagtgtgtccaaacaagcgaggggaattgtactatgtcggctcggagaaattgatgaaagggacgttcaagtcacctactaagcgttcggtacgtctgatgctgctggtttggtttgacagagcgttgaaattaagctttctaattctcacgtcaggcctgtgtatgcatctattgagtagaagcagcagctacaaatgacaaccgatttcacagccaactgccttagctttgggtacaaccactttctttcttcgtagtcttgaccgcatccacacgtatgtacgcacgctgacctggacttcgcttaaacactttaatatgcgctactctacgtggcttggccgattgattggttcacccaatgattcagctgtggccatctagccctaggaggctctcgatcggacattctgctctaccctgtcaactcgtcccagtcggtcgcctctactcaggtcgtccacaaacagttgcgctggccggcgacgatcaataactcgatctttctgactgatagtctgaatgagcggcccagtgatacgcaggatggctttcaggtgtttgtgagcaataacgatgggacagtgagttcctctatatttgatggctatctgtttgaaaatggcatgggcatgaaaaaatggaaatggaattgaaaccatctctcacttccgttgaccaactgagcatagatcaaggttttgacgcttgatgaaaagcctggctctgcgtccacaccgacgaggacgctctcgaagtttagcgagatcgagatcggtgtgtgtgtcaaccattgtgtgtatcaggcttcttcttgactatttgccaaagcagccttggaggagatgcaagatactgatctctctttccgcttttcgctcacgatgataatccatgcagcgtctctctcgcctgatggacggactctgttatctgttggagatacagctgatgtgtttttggtatgagttcaaccgcaaagctcgctgatacgattcatgcatgccaaatctgactgggcgatcatcattgtcgttacagcaccaagtgatgcctggaggtacatcgttcccacagattgcaaaatatactggagggaacgaaggcgggttttcgtaagtcattatcccttcttttttttttttgttttgttttgtataacttgtgatctaaacttgtttattgttcgtgtacctaccatggggcgtttacacgtgcgcgaactcgtctcgaacaggactgcttggtctcatgatggaagaaaatttgctgtagccaaccaaggtaagccttgtctgattacgaaagttcgaaccgattagtttcaaaggataaagctgtctcacagagtatgtccggtttggttatcttgatgcgtcgaacacagatgggacgtgagtactgttccgacacgcatacactcaagacttacaccacgtttgaaagtgttgacaactccttttcttcctgacagcgtggccgtgtgggaccaacgatcctcccatcgattagctacgttgacaactcgagggacgactggtgatcgagcaccagcggctagggttgtcaagttttcgccacctggttcacctcaagaggtcctcatctttactgatgagacgtcagggatgacggtggctgacggtctgtctttccagacgatagatagagtatcgattccttgtggaacgaatgcgcagactggggaggccaagactctgcaggaacgagcggaccggttgattgaacttggagagaaccggtccagggttggcggtgggggttacgtcagaggttctgccggttggagtggaatgaatgtcgtacctgggaccgctggttgttgttttagtccatgtggccggtgggtgtacgcggcaaccgaggtgggaataagtgagtgggaattggcagccgggccgggaactgatggggatagaggcgtgggaacttttgcattctgaactctgtcaacaacactgggccgtaagggttttaagccgtgagaagaagaagaaaaaagaacgagaaccgggaatggggcgcaggcttatctttcaacagacgaagggcggaggatcacttaatcgtagtctgaatttcggattcattcagagcctgttgtatgttcaacattgtttgactcacggtcacggagataattaagttattgcttttctagagcatccatcatcctggttgctttttttttcttcgtttgtaaagacagacggatcaactgatgatcgatgtctatctaaatcactcaagctttcggccggtatctgtcagactatcaccatagaagaacgaaagacaaccaggctcaaacttgggtttcacgtgtcctcaagtatcttataggacccgaggcgtgggcgggtcaagatgtagagggtgttcgttctcaagagggagagatctgggcgagtgggcactctgcactatctttttatcagattatactcttgtctttctatgtctttctactgccatgttcttactttcgatccatgaagttttccctttctttctatctttgttgaatagtttcatctggttacataaaaggagatgtacaaaccagatcatccaagcatccaagcgttggcctaggtaactctgcagccgaccggaacaggcggaccagacggaccagacggaccagacggaccagacggaccagacggaccagacggaccagacggaccagacggactgaacggactgaacggaccaaacggaccaaacggaccgtccacgagccggatggatggtacatgtgagatcagctgagctggaagatcgactacctctcgttcgatctggatggaggcctcatcgacgaacggcaaaatgaaacatcgaacggttaaatgaagggggaaagaagaagaaactcttgactaattttagctttgaccgaattctggtggcggtttactctgaatcttccgttcttaggccacgcgcgcgagagaacacacaccacacacacacacacatacacacacactctctccctctcgcacacccgagaaggtgacccggtaagtttattctagtcgtgtgtctcgccacgtatctacatttcgcttactaacacctacggttgcatccgtcccaagactgacgccgagactaatgctgacatctctaatacatctctggttcaaactctttccttgagccgctcccggaccggattctttccggccgagcccctcatgtttcttgcctcttctccttcggcggttgagatctactgacggattcgcccgaagagccatcctccccatatactctccacattggtaccacaacactttataaagctgacagaccagtcggtcgatctacaagaagcctctctttctcttcatcagactctgtcttctccttgtccttctttcgactttcccttacaattcctttgaatccttctcccgcatcatacctacccctcccttgaggccgtataaagcgagactcgactaagctataaacgcagacaaactcgcacacacccacccacacctgcacacacacatacacacatcatgggtttgtttggcaaagccaagcccgacaatagggtctactcttcgggtgaagattctagaactcagaattccagggtgtatctcgttggtaagtaacacactccttgccgtctgtcgtggctgaatagagaattcgttcacttacccggtcaatctcttctgtcgcatgtagcattaattgcgtacatgggcatctttctttttggtacgcatggtttctccgctccgagtcacgatcgttctcttctctctattccttgttgcggcttcatgccgcagatttcaatttctttcatgcgataagcatcggggtcacttacgcaaaaatctttatttgtacttcttctgtatgtttaggttacgattccggagtggccggtggagtgatcagctgtacgtatctttcctatcaaccgacaaagcgattgccacaatactgatatcacaccgttcatctattcaaatgtaatacattattgacagtgacatctttccaacgagacttcaattacattaatgacactgcagttcaaaaggcaagcaagggttccaacgtcgttgccctccttcaagttggagccttcttcggagcgcttggagcagccccggtctgtcagaagataggtcgaaagaagagcttgttcattggaacaattgtctttatgattggaggggttgtctccgtaagtctttcttcccggtttgtttccatagttggttttttttcaaacgcggatgatattgactatatgttatccgggcatctgcagaccgttgccatgaaacatatcgaaattatgatcgtcggtcggtaggtgttctcattggagtgatcgttcgactgaatagatgaaaactaatccagtcatatcacgcatcatcttgttttcttctagagtgatctgtgggcttggtattggtctgctgagtaccgtttggtaagtttccctgccatctttatcaccctcagggttgtcatcattctaacttctcgatcttggtccttttcgactgtcagtccgacttacgtcgccgaaatgacccctaagaacgttcgaggaagaatcactggactctttcagatcatcgtcgtcattggagttgccttcaggtaagtagttcagggaatcgtaatagtcttgcgcgtccgagcacgactgatagtattatgtacgtttctattcaatcccattctagttattggatgtgagtacctttctcttcagattaatacaccacgatatttcagacaccctgtgctcaccttgagtggtacactctgactcggtactctctcttcacaacagcgaatacgccatatctgtcaccatgggttccacaaagtctgccacatggagaatccccatcgctttccagcttgttccctgcggtctgatgcttatactcctcccattgatcaaagagtcccctcgatggctcatccttaaaggcagaaacgacgaagctctggcaaacttggcttgggtgagaaaacgtggaatcgaagacccaagagtagttgctgaatttgacgagaatgtcgccgccatcaccgaggagcttgccgtcactagcggagcttcctacaatgagctcctcaagagtcagttccctctttccgtctgcttcgatcgtccataaccccatcctgactgttccaatttgaaaccctgtggttggttctatcgattcaatagagggaatgaaaatcagagtcttcatcgctttcgcatgtttcttcctgcagcagtggtctggtcagaactcgatttcatactacgcccccacaatcttccaatcgatcggtctccgagggacttctgtcagtttgctcgcctctggtatctacggtatcggtgagtatctctagttcttctcaaatgcacccatcgcgcacactgaccaacattctcaaaacatatgtctcctcttctacagtcaaaatcttctccacctcgttgtttatcttcgttggtatcgagcgagtcggtagaaaatggtcgcttgctttcggagctcttggaatgagtcttttcctctggatcgtaggtgccatatttgtcactcacgtacctaacgccaaagccacctcaccatccggcgcctcgatcggaatggccgctatgatctacatgtttgtcgtacgtcccatgatgcgcttccctcatatgatttctctgggtcatcgtcatcaccaagcttactcaagctggattgatattctggcgaacatcagatcccgtactgtttctcttggggacctgtgccatgggtatactgctccgagattttccccacccgagttcgagcacaaggaatgtccatcgctgcagccactcaatggtgcttcaactttgtgttgacaaagatcacgccttacctcgtactcgacctcccgaacggaaagatcttcttcctctttgcttgcacaaacctgctttccgccgctttcggattctggattcctgagaccaagggtttgagtctggagcaaatggatgtcttgttcggatcgattacccaggaggaacgagacaaacacgtatgtcttctgcttcgtttcttctctgacctcctttgtttcaaattctctctacttggctaggagctgacctctttctctcgactaatgcttgtctccttaaacagattgccgaggcggaaagagcccgagagttgcaacaggctggcggttacctttcgaaggagaaggaactcgagatcgatcatgtcgagcacgtcgaaggtgtagatgcttcctctagggtataagcacgagttctcttttcaacgctcttcacaggcttctttctctttgtttcgttttcttcttattctcttggtatttagtaggttactacacaagttgtattcatgtatctcctggttttcaacaatgttgtacgattcttgacggaactttaatgtatggtttttgtatgtgcatgatagtcaagcatgaaattgattgcagaaagacaaagagagatcgtgttatagagagcgagagagataactagttatacaagattcacatctttttctgaaaagcctcatgatttctttctccccccccccc

SEQ ID NO: 442 - DNA, 80584 bp, Xanthophyllomyces dendrorhous
ttgcgccatcagccaaaccatccagacccttatctcacaagccaaacgatcaaagctcgacccagatgacttgaaaggaaggaaaggggttttttttttggctttctcttcaccgctgcctgctggctccctgttccagccgctcgctcaccatttctcggaagttggcaacgatcatcgattctcgtttctgtttgaagattttcatgtaatcgtttgttttgttaggacgatcaaagcaaaggtcagaatcactttgcgaaaagctagagaaaacaacgacaatgcaagtaaaacaagatgaatggacgaacggctttttcttcggcttgcatcttcaagataccacgcctattagatgagaaagaaagagttggaaataacgcagggtcaggttctctcactaaaaagccgttattcgaggcaagcccgatgaaagaaagagggccctcaaaaggggaaaaaaaggaaagggacaaacttttcctcggcactgatgacttggttctcctttctcattcggactgcattcatcctggtatgtctcgaaccagacatgacataaccggaggcttcgaattgttcaatcgcggtcgacgccaaaccgatctctcctcgtcgggggatacgttgtccgtctgagacgaaagcggccatggcggaaccttctcctggtcggagatggcctccgaaactagagacaacggacagtggcgacaaaaaaggtaaaaagcgtcaaatcaagaactgagtctactggagaagtgaagagagaaacatactctctggaatttcctctttcgtctttggattgtgccaggacaggtcccactacatcgtcgtcatcgtcttcctcaacttttgtaggagggacaaacgcatctcccatctcgagccttattctgtcctctccagcctcatctttactcttgatgacagcttcctcttcgtctgatgaatcgtccgagtcagacgagtcgtccgtcttacgcttcttggacgacctacgacgagatcgacttctatcttgtctatcagaagctgtatcagcatcagattctggatcagatcgtctgctagaactggacttcttataccgtgacgatgacgacttgtgtcggctagatcgagacgacttttctttatgtcgacggtatcgacggtcggaggagtcagaatcagtatccgagggagttgttcttcgttttctgcttgactttttggagctatgctttgtcttgacgggcttgtccctcctgagaattttggtacgcaagacattagacacaacgaacggcacagagaacgacgaaagaaatgatagaatggaaaaggaggacaaacgcattggacgcaggccctttgggcgaaggaggccaaatcgatagcgggtttgcatctcgttgctttcgtcgactataatttgcgatccgagcgaaattgttagtctcgaccggcaagtgtgcgtttgaaagcaatcgatgcaaagggactcactcggccaaaaaactggggccttgcaccaagaaattgccaggtcctccgccaccacttcttccgccatatcctccacctccgttgaatccagaatcttgatgaggtgctgattgtctctgccagccgcctgctccaggtggtccggatggaggaggccctcgagatctatcatcctctcttctgtcgtaaggcgcgtatgatggcgatgctcgtcgttcgcctcgatctcgaggtggataatctccggatctaaacacacacacatgatacagtggcaaaaagactcagccacgattctttttggacgtgatataattgacactgaaggtgttgaactcaccttctattatcacctctgtcatcatagtctcggcctcgacctccgtccctatctctttcatatctctccctatcccgatagtcagctcgcctatcgtcacgtctgtctctgtcttggccatctctcctagcataagaaccttcccgacggtcagagttagatcctccagctccttcggtggcatcgtgggatctatggatagcgtttttgacgcgctctttgagatcagcctcccggtcggttccagactgggaaggctcgacagacgacgccgaaactggcggagcagaatagtggggagtggacgccagtgatccctgtgggatgtttgccagtctagacggatgaactgacatggttctgcaacgctcgttagatgatgggtgtatgctaagggagaagccttccaacaggctaacgagagaaggcgagaggtgaccacataaatactgtcaattaaggtagatgaaaataaatttcgaatattttgtttgctttccatctgctcttcagcgtttgctttcccttggaaactctcacccttgacctcaatcccgacacacatacactttccctgttctttctccagcagaccatgtttggcggaggaaataatacctggggacaacagaaccagcagcagcagcagcagcagcagcaacaacagccaaccggaggtcttttcggtgggggagctcctgccaacacgggaggaggcttcggagcacctgcaaccggttcgtttgttcttcctgatcttgtttttggttcaatttttcctcgtatctctatttttctttcttcgcttcgctctactactgtcgttgagtgagatcgctggcgatagtgatgacgatcgccattaaaaaagtgattttctcgcaaaaccgggcgaaacagtccggccatgttgaaggattcaactagagatgatggccaaattgatttcttcaagaaaatccatgcatcacttcgcatcattgcttggatttcaaggaccttctagactgaacaagaccttatcaactacacatcaaacaggctttggagcaaccccatcaccttttggtcagccagctcagcctcaacagaactcgatctttggaggaggtgctgcccctgcatcaactggtttcggttagctctcgatcctgctcaatcttgtttcgattctgttgtgtttgactgactggctgtatttctgactttcacgcgcgctcttgtgattaggtgggttcggagctagtaatacggccgccaggcccacttttggagccgcccaaacccctgcgttcggtgctcctaatccccctagtggaggtttgtttggcagcaaccctggtatgtttttctcactcgcgtttcctcttcggaaccttcgtcttggactggaaatctaaggaaaattacgtgttcccacatcgcagcccccacgagtacattcggagcggctcctacctcgacttttggcgcgcctcaggcaaacactggaggagggttgttcggaggaggctctaccggcggatttggtgctccggctacaagtgggttcggtcagcctgcggcttcgggtggcatgtttggagctcccaagaccaacgcttttggttcgacttccagtccgtctgcttcttgtctgttgccctaagttcttgataatgacagatgcacgtgctcacgcttctcttttttacgttcacagctaatgtaattccgggcgaagtcccagcgaatggtacctcggctccagcctggattcaagttcaagatcaggaccccaacactggtgtcaagaataatgattactatcaaaccatcaccgccatgcccgagtacaagtttgccagtttggaggtatgttctgacagatttacgcgtgattaatcagtttttttcgtttgccggctacgagtctgaatcaatatacgaattactggtttggccaacataggagcttcgtttgaaggactatgaacaaaaccgaaagacccctcagcagcagcctcaatcaacctttggggctcctgcttctacggggttcggaggctttggatccgcccccgccgctccttccacagggatcttcggaagctcccacaccgctgcgtcctcccctttcggagctcccaagccggctggaggcctcttcggctcttccactccagctgctaccccaacctttggtgcccctgccgcctccaacacaagcgggggtttgttcggaaacaccggttctggtggttttggacaaccccccgctgccgcaccctctacagggtttggattcggtcagacgagtcagcagcaacagcctccgaaaccttctttcggattcggaagtcagcccgccgctcagcctgctacaaatgcgtttggagcaccagcggcgccagccacatcctcttccttctctgggttcgggcaacctcaacagcagcaacaaccacagccacagtcaaccgggtcgactttcggcggatttggacagcctcctcagcaacagcccgcgactggctcttcgctcttcggaaactccaacactatggctcctgcctccggaggtttattcggtcaagcgcccaaaccggctggaacaggacttttcggagcttccacaggagctcctcctgcctctaatggcatattgggtggtcagagcaacacaggtggaggttgtacgtacatgggtttttgcctattgagaaaagtattgatctaacttcttgcccaactcctttcctctcccgcgaacatcatcacgtcacagtgtttggaaacacctcctctgccccttcttctgggggtctattcggaaacactaacaataccggcactggctcctcgcttttcggagggcagcaacaaactcaacagcaacaacaacctgctcaacagagcacttccttgttcggtggaggtgctgccggaggaggtctctttggcgcaaagccagctgccccacctgcttccggcggtggactcttcggcaacaccgcttctcagcctcaacagaacactaccggaggtggactctttgggaataccggcgcggccggagggtcaggcggccttttcggcagcacctccaccaacacgaaccctgcgccgaacaacactagtctctttggtgcccccaagcccggaggattgttcggcgggggtagctcaatgtttggaagttctcaaccacaacagcaacagcaacaacagcagcaacctccccagcaatctctccaagcctcgatcgatcaaaacccgtacggtaggaaccctttgtttgaccagcccaccactactctcccgctgctccaggatctgcccgagaagaagacgcctttgcccaacttggctagccgagctcgatcctctccagcttccaagagtttgactcgactccgaggtttcgccgtctcgcctgctgcctcaaacggtcggtccagccctggactaaacagctcatccggtcgaggatcccccatcattggagaggagcccttcgtaccacgagcgagtgtcaaaaagctcgtgcttgatcgaagagacggctcggactttctctcgtccagcggaggccacttgaactcgtctggctcccgaatttcgaatgatagacgatccgtcacattcgaaaatagtctggatgtcgaaagcatcttccgaaatgactttttgaacggtgtgcttcccaatcgacagcttcccaacgatcttcctgttgagcctgttcgaaccactaccgtcgcttctccagccgctcatgtccgaggcctttcctcttctggatcagcagcctctcccgcccctaagcaggcgtcatcaaagcctgcttctcaaaaaggacctctactccaacatggtgactactacactattcccgagatcagtacgcttgtcaagtttggctaccaggacttgacctcgctttccaacttcgttgtcggtcgaaagggttatggtgaagtcgcgttccttgagccggtcgacctgacttcagtatcttccattcaagacattcctggtcacatcgtcctctttgaagaaaagatgtgtgaggtctaccctgacaacgtcgctaaagccccgagaggaaccggcttgaatgttccggctcagatcactttagaaaagtgctggccacttgacaaagccaagagagaaccaatcaaggatatcgctagtccaaagatgaagcaacaccttcgagttcttaaaggaatggccgaaacggagtttgtgagatatgaagcagagagcggaacatgggtgttcaaggttgaacacttttcccgatacggtcttcttggcagcgacgacgaggatgaggatgaggtggatgaggaaaccgctgtggtcgagacaaagtcggctgagcctttcaaggctacttccaaacaaccgttcgttagtcaaaaggctggaagcgtgaaacgatcgatgtatcctccttcgtccgatgaaaccgaggcttccgacgagaccatcggagaaactgatcttcctcctgtaacgtacggctcagaagacgaacaaagtggtccggacagtatgtcaaactccaaacgaccggccgatcgacattcatctcgaactggctctgtttccgataggaggcagcatcaggattttcagtacggccgtcgaacaggttatgatgaggagatgtacgaccattcgacggccggacagagtgatgtaggaaccgaagatgaggaagacgatgatgaggctgaagagacggaagaggatgagatggatgactcggagtacgacgaagaagaggaaaggcgacacagagcttctcgacaggattctttgcacccctcggatctggatgaagcccctggagattctattcggccgtggggagcgttcgttggtgtcgagccgcgcaaagtccaggttatgcaggcttccttcttccgaaatgaagaacccgaatcgactgaatcaaccataagatcaaaccgggcgccgaggttgcgaccgaacaccttgtccggctcgttcgctcagtctagaatagataggatcgggcaacacgatcacactgatcgtcagacttcgttcggaatgtcccgaaaggtggaacagctggatgaagaagacgaggagcctcccttgagtcgaccgaggaagaaatttgctagaattgagatcgggagagacaccattcgaccaaacgagggtctcatgcttgatgctggagcttccatgagaggctccttcagggttggatggggcccagacgggacgattgttcatcttggtcaattatgcggtctgcaccaatctgcctcgccggctcctggatcttccgttatacttgaaaaggtgcagatgttttctgctgctgcttctgttgaaaagacccgatctgaacatctcctagacactcaattgagaaacactgagatctacttcgaagacggggttccttccgcctcgcccgcgtcaaaccttcggttccgacactttacttcctctctcgcccctgacgatcaatccttcgaggcgcagctttggagattaggtgctgccttgtttgacgagatcgatcttggacttccggacgctgctagcgcccctctcttcgacagagttcatcacatccgacgtaagctggccttttcgaaatggcttgccagcgctgtcgctcccgcggttgatcatgatctcatcaactctcaagagtctggcccctccagagcattcatctacttgaccggtcatcaaatcgagcaagccgcacagaccgctttgagtgctggcgatctccggttggccactcttcttactcgagtaggaggaaatcaggcgttccgagatgagatgttcctacagttggagaagtggcgagagcatcggatcgactcggacattagtccagattatcgaaagctctactgcttattagctggtatcgtggatgtttccgaaggaacccgagttcgggacccggtggattcctctcctcaactagaaatagcagagggacttgactggaagcgagctcttggcttgcacatctggtatggatcctcgtatgatcttgatctttctgacgggctaaggcgttatcaacatgcgttgacaacctcagtcgcccctgctgccccgctcccctggtatgaagaacgaccgtccttggtcaagaatctcaccaaatggaaaactcctcaaggcatatccgacgctcttttccttctaatcaacctttatgctgatacggccactccgatggaagacgtgctcgatccatctgcattcggtccaacgcctctggattatcggttgccttggcatctctacactgtcttagctctagcattgaggactagagactttggggatcgacaggagcccaacgaagaaaacaacgtggatctagggtacagtcggtcggcaaatgcactgacaacgagctatgctacccagctcgaacgactaggactttgggatcaggcgatctttatattgctacatttggaaatacctgagttgtgagtcgacttaatggattcgactcactgcatataatttttgtttgtgtactgattttctactcattcgttcattgcagacgtttgagcgccatcaaggaagtcctgtttcgaaatgtcggaaccgatgcaaagaaggagaaatttgttgtggaaaagcttcaggttccggctgaatggatttcagaggccaaagtgagaaagaaacgtctgtcattatgctgcacgaaatttgttctaaacgtttctctttttcttcataggccaatatcgcaaactacgagggagatccttataaggcttatttccttctaattgagtctaagctctacgaccgagcttgtgccgtcgccgtgcatgatttggtacctgaggtcctgcttcgggaggactttgcgttggtcaaaaaactgttagcaccactcaaagaagtgaaggtgaccgattggcagataactggccaggtaggtttctctcttatacgcgttgcgtttcttatcttgttttgaattgggttcatggcagttgctcaaacgttccatgtgctcctccgttcgttcgatcaaacccaggttttccttgatctggttgaagctctcgagcgtctgcctgtgctcatctccgagacgctttctgccccagatgcggctcaaatggacgagctctctcgcttgagtagtcgtctgccgacaatcatcaggttgcttccttccttgtttgctgattcctcgttgcagtcgaacgtcgtcttgtccgacatgttatcaaggttattacgccttggtagcagtttgagcgtcagcaaatgggtaagatttttctgcctgtcttgattcacgctagaactcacaggctgaacctcaattgttttctattcctcaagttggatgcccctccagctattcctcatggagatcatttattggagagtgacgagctctcattgctgcaatctgccgctcttgatcggtacgtgcaacctcgaacgtttgcccttttttattgcgccgcgtagtgacttcatcgtttctttctctgaatagtttctctatgtccctggaggcattcgcctagataatcttttctttcatctcccttatgtctcacaaatttgtctccttttttccttgcgcctatttctatctttcagtccagccatgcaatgagaatttggatcaaactgttttattagagcccaaaaacaaaacaaagcagatagtctacattgtgattcgaagagaacgaatgattgtttatattgtgatctcacttttgttttcagtttcaaagactacctgttctcattactctgacagatgcttgagatggcaaaacgcaatagataaagagaacatgataaaaacgacttccttgtacttaatttctaccgaaccaaccaccaagccaacctttctttttcggctccccattcgcaatctcttcttcatcttccactccatgctcctcctcctcttcgtcttgagccttctcattcttagtggctaccgaagatttggtttctggttttacgagctccccatcttcgggttgatcgtctcctcgctcgagttcgacgaagttgaacgctagatccaagaaagtcttctcctctccttcatcctgggtcgactcccaaaggctaactttgacaacactctccaattgacccacggaccgttcaagcgcagttacatcgtcctcggataagggtgttaaatctgaaggataagttgatggaaggccgtgtatctgccgaagaaggagagatgctcgggacagaagaaggagggcctggaccaaggaagttgaagtcgcacccgaggaagaagttgaagaggtggacacagaagaaagaagatagtgcaaggttgagagatagccaattcgtttggctcgatagaacgcgatctttttctcgatgcattctcctacttcaacctcctcatcttctccatcagtcggctggatcctcgccttctcaatcgtctgtagcacccgaatcttttcgaatgatcctatgactgaatcataaagtttcaagatccctggcaatgctctcatgaagatttctttttgagcaggcgtttgactgctgagagcgttaacatgtggagaggacaaatgatgggggacaggatcggggaacggtcggaggatagctcgaatgagaacaagatctcgagtgatacgttgggtgagaaggatgtgctgtaggtagtcaagtaagataggcaaggtcgacgcttgagaggtggagttggtcgagttctgggcgttggtctgtgaaagtttgttataacgacagcaaaataagaattcaacagcaggtacagtgagaatgttatcaaaggaggtctggtttgaacagacggaacaaaaattgaccgacctggctctcatccaaaattcgctgaacaacacccacggcctcacccagcgatcctaaagctcgatcgaatgccttcatcttgccacctctctgcttccccgctttcttccttccttcaaactcatccaacctggcaagtgctttgctgactttggacagagagctcacaatgtctgggtttctaacttcaatctcttctcccagccaagaaatctttctctcacctccaaacgctggtccttgctctattcgtgtgctcgacgctttgagcttcttgagatcttccagcatggccttaacaccctgatcctccaaaagtccgtccatctcgtcttcgaagtcggcgacaataccctcaaccccttcggacgcgctatcagacctcctacctaacttccatgccccgtaccggatcctcggatcgacttgctcatcgacccatccaagcgccagagcttctttcctaccactttcagcagcatgaacatcagcgagggcgagaagcagttgtcgagtcacaataaacaaaggcaaagcatccatgaacgactctctgaataaatggaggtgaatcgcctgaagcagaaggtggttgatcttagcctgggcgatcgtctgaaggcgaacggaggcttcggctgggagtgcgatgaggagagcgtaaaggttaccagagtggaagagtgaacgctgagatcgcatgcgtactcggtgcatctgagctgacgttcgtcggtccgagggagtctggagccatgcttgatgtaatgcgagggaggtggtgtgagctcgctcggcttcaagcaaaaccatctcaagatatctgatgatgaagtgaagcggtatatatataagtgggcatgcttaatccgtctaaactcatgcatgggtcaagcagagatagagggcgtacctaacatccttgacctcttccggcttgaggacctctgcttttttgaagggcttgactttggcaccatttcctcctccggacgagtattgcagtcctaaagacgctctaagtttagctaatcgggatgataggtgtttgctgagtaaagcaagagaggtcgagcgaatgagcaatttgcacatgaagacagagagaagccacccttacttgtatcggtcgtaatctcccgaacgaaggccgaatgtatttcgctcctgatggaggatctcgaaaactacggatagaaagggtgaaggagtgagaatgacaatcgaaaaacaatacagagagcaagaaagagtgcggactgactgtccaggtttagatctgtcgacatgaaggttctggaatcaagagagatagagagtgtaatgctgaaaggaaagagatgggaaaaaaggcacgactgagggcgcacaatgaaactaggaacaggatttccttatgtaaataggtgaagtatatgattttctcgtcgtcaacccaaacggattacgtaacacatcacctcctcccggggctaaacgaagaatttcgtttgaaactttcgtctggccgatttcaaccagcgagcaaccacacataccagaccatagcaaacatgtcatcccaagcaggcccatcttcgtcctcttcaaagcctcaattcatctctacttccagggaggatgaagagatggattccgatgatgaggtcatgctcgattcgaccgctcttccttccacttctgcctctggcaccaacacacctgctgaaggatcagtcgaggacccttccttgccctcattcaaacctctacctgctcacgctcaggtgatttctaagaaggatgaattccgaagaatccctatccctggtcaccgaatgaccccactcaaaaaagaatggatcaacatttacactcctttagtcgaaatggccggactgcaggtcaggatgaacgtaaagaggaagagtgtcgagatcaaggtggggcctgttcttctgttttgttctgctgccttcaggagtttccttctagtttctgtttcactgccgagttccactcaggataaggctcttgtgtgtaaacagagctgtaccgaaaggcaaagctgtcgaagcaatcggtgtggggcgactaagaatgaagcgatattgcagacatctgataaatggtgtagtgcttttcaggctaatcactctctatattttcctctccgtttttgtcaatacagacttcgaaacacaccgatgatgttggacaaatccagaagggagctgatttcatcaaggctttcactctgggatttgacgttgctgtaagtcacttgtctctatttgccatgtatcatcgattgatagtcttctttattaaatatttttctcaatcatcgaaattcgtgcttccacctttttgtccttatcaaattacttcataatcaatattgtgcacttcttattcaaccgccgaataggatgctatcgcccttctccggatggacgacctgtacatcgatactttcgagatcaaggatgtcaaaacgcttcacggagaccatctgtctcgagcaattggtcgaatagcaggtcatgccggaaagaccagattcactatcgagaacgcctcccgaactcgaattgttctcgctgataccaaaatccacattctcggaaatgttcagaacatcaagattgctagagacgctattgtcagcctaatcttgggtagtccaccgggaaaagtgtatgctggtttgagaacggttggaagcaggatgagagagcgattttagacgtctacattcgtccttgttctatacacatcaatttttgctttcccttctctttgctcggtgcagcttcctcctccacacatattcctccggctctctttacctccttcatccatatctcccctatcatttcttcttcgttcggggctctcattcactactctttgattgtctcttttacttaaagattcataaaatatatatatatctcttcctaactgttcttgttcttcctcgccacgggcttgctcttgtttctcaaaaggttcctgcccatatatcttcacctcatcctcatttgacatgtgctttaatcactttctcttctttccttctccgaccctcaatgttatggttcatcataaattccaaatcctcgtatacagacagaaacgtttgattttgcgctaacagtaacgaattaacctcacaacttgctttcccccctcttcccacttagatttgcaaatccaacattattcggtttgcctttaccccgtttagagaatgtggctatggcctcagtgagatcttgggtttggcccatcacagagttccagagtgcagtgtattctaaaccttcttgaattctttatcatatggtatcacaaaacaagaacgtatttaaaaagggatcagttagggtagttctagacgaggagagttggtaatcagacatacgaatgctctcttccatctatccgtccggtatgtttgacccagagggtattcatcaatgacgagtgatgtatacaaatgcaaatgttgtgaagagttaaggtgaacggcttcctacaatcagcatcgcaaatcgacgacgacgaaggagaagatttgatgttagaacgcacggtcgagaaggtgtttggtccccaagacagcgataggcgagttctccgcgatttgctctgccagctccagcgctttttctgagatcacgattgataatgaaagattcaagtcaaattctagagaatccgtgaagaaaacaagaacaaaattagggacagaccaaggacctctttctgactacctggaatgatccgactaatcaagcctaattgaagagcaacctctggcttgaagaatcttcctgtcagagctagttctctaacgagggaatcatttcccgtgatttttggaacctgaagtcgatattcacgaatcagaaacaagttgagctagtgtgctggttttatgctatagatggatccaacgctcactcgctgtagagaaccgatgtctgcagccatagctatggctacttcctatgagtccgcaccgacgcgctcaaaacaaagtaagaatcgcttgtttcatatcaagttgagaagagaagacgctgagaagatatgctcaccctgatagcgaaggtagtgtcggcggctgccaaccttatatcacacgcggatgcaatatcaatacctaatcctacacaaaccccatggatcgaagcgatcacaggaactcgagattttgatatcttggtgatacactcttggaagtcctttttcatcaagatcgtcgacaaaaatcattggattcagaagattaactcggttttcttcccaaaattgcggtgaaacagagtttggcctactagaacgtgatgtcgaagcgggatcgatgccctagctggatctttgagtcccttcgttccacctagtgaaacgttttcaggagcgaccactagatgtatagttggtatcaatgtatcagttgaagcttctcagctaattgaaatttcggaacaatgagacgtacagtccagcccggctgagaaccctttagaaacattagacgccaggacaacacaccggatgtcatccattgagttcaccttgtcaaatacccttcctaactcttgccaatattcttcggaaaatgcgttgacaggatttcgggaaagcgacaacaggagaacatgaggcgatggattagaggaaacgatgtaggatggcatggttatcggtttagatgtgtcaatgtatatagtagtctagttggtcgatgaaagttgagatgggatgtgaacattggctagtagccggttaaacaaatgaccgtaaagccgagaatagatatattaagattttgagaaagattctcgatatatcgacatcatcttcctactcaaaagtgatgaggtggttcgagacagtgttcacactcacagaccgctcaaagcaatgaatcattcataatcaaagagaaacacgaaacccatgaatccatcacctctagcctcctcgagtcatctcggtccactccctagcaaattctccccgtttgaccagcgaaaccacctcctcgaacttaggagtacttgatgaggatagtttagagagctggaagatagttcggagggcactccgttggatctcagccttggaaacagaaatataacgaaacaaaaagtcaaattcatcaacgttctgttctatcaaccaaaatcaaatgaggacatacctttcggtcgaaatcctccttgactgtatctttggtaccagtgaactgtagaataaaagatatacacaaatcagtacgcagagaaacagatgacgaattgtgggcgaaaaaggcccaagacaaacctgcttcatggtttcctggaagctttcgctgatattatccaagacctggataacagacgcaggggccacatgtgcaagtctcgtcaacgacaagaaacagatgacttgaaacaaacatgaaaacaaaaaaaatgtaagtcccagtgatttcacctctccccaagcaaacaaagaccgacctttgatctcatcggcatccgtcaacccattgacgaccttaagtaaaaatgtagagatgtctatctgagacaagcaggtgtccaactacaaagatataaagtaagcgtcctgatgagtcatccgaaaacgaaaaaattaggcagtgagaacttactaaagtatacatggtctatcatttgaaggacaaatgcacattgattagaaaatgtctctttagtaatgacacgacagctgagagaaagaagaggtggagacatgacaaacctcaaatgccgtttctagagatgatgagcaaaatatcttgatcagtcagaagtgcacaatacactatcaagaaagtatgagaactgacttcgagtctcgagtccgtcatcgaaggtctgcttccatggtcccatctggacaactcgtatgagttcttgcttgatctcggtttcatcgtacagtaacgggagcaacgttcccagatgtgtccgaataagttgaggcttgtgctgagcagccgcgttgagcgatccaagagaaactcttcggacagtctgtaaacccaaaagtcatattgaaaatgcagtcgaatcaacaacacgtaaattggaatctcttactaggtcggaatcatgcatcaaagataaaaattggacaataaaaggcgctaggattccatcataagaaacatcagtgtcggcaaacgtgtatcggatggccgaagcgacggtcgctcggatatttgccgaaggagattgtatctgtgcctatataccagttggtatcacatatattgaatattagaagcagacgctgttgatgataggaaacaagacgagaacgtacctcgagtaaaggaagatatttagcaggattcgaagtcgtcaactttccaatacaagacgcattgacaattctgctctcttcggcctgattctcagagtcctcaaacagaggctcccacaatgagtctgcgaggttctccagttgcagattggatgaatgaaagattgcctgtcgaggatatcacataatcagaagtacagatcatcagctcggcagtttgacatagaaagaggagggacctgtcaaatgtaagcaaacctctcgcagagcttgaagtgacaaaagtctatcagacttgtcactagacgtttcgaccttagataagataggctgcaagtactgagaagctccaacagcgaaacaccctgacaactcaaattactagatcagtattgcagacatcaaatttggctgattcagcggagagcatttatacatacccgcagcgaaagcggcagaatttctgatctcaggcgtagaagcgttaaaaagctccaagactcttttgaaaacatccgaatacgccgaaagatctgtagctcggccaatctctcccaaagatagaagggagaccacaacagcagattctgaggatgtattggactatcagcagttaaagaaatacaacacaggcactgtcaaaattgattactacaaaggacacaaacaagaagattcaagactgaccgatatattctgcgcaaattgaagcacaattccctttgggtctcggcccgaagcgctcacaactgcacctacgcattgtgctcctacctgaactgcacctgcagagctgctccccactgatattcgaaccaactctggaacaaccttttctgtcaaattttgatccacctcgataagagcggtaaagaatgagagaagagcctcaagggacgatccagatattgaaggagattgaaccaagctgataatctgagagagtaatgtctgttcgacagtcgatttagcagatgatgagatgctaaggagcacgacgagaaggtccagcacggcaggaagataggtcaaatcggtctccatgatgaatggcttcatattctcaattaggttagtgatagatgtatcgggagctgagcctcccaagctgaagacaaaagcaacagcaaacgtgaataaaagatatttcttgaacccgaacggaaaggagaaacaaaggagaactgaccgattggtgacagcttgcaaggttttgaaggattcaatcttaatcgcccgccctcccttcctaatcagaccggaaacgatctctaacacttctcctagccagctctcaaaaatattcccgctacagagcccacttctcgcgaccctaccagccgatttgatcgcttccaatctaaggctctctttctcaattgacgtcttgacgagacctagagatgcctcgtagtgagcctccaagacatctccctcgtaacacaataggtctgcgagagtattcaatgccttgactctcatctcaaaatcggccatgttactctccaagacagcttcagatgccttgtagagttgctcgatgatgaccgacaatccgacaggaagagggccatccgaaacagattgcaagctcttggcgagctcggatgatacaaccaaagcctcggcgctgaccttctgcgatttatctctggtgaggacaacgatttgtttgacaagttgaggaagactagactggtaaactttgagggtatgtgtagcaaagaactgagctaaaaaggagagagtctcaatggacaagagaggggatccagttatagccaacgtctcggatactctggtgaagatgacagcagcttgggcctccagtcctcctcgaagtacggtgacaagttcccggagaagggtgaatccagcctgcttcgtaataagagatttcgtgccaagttgcttagcgacgttcttgacaagagagttgacttgaggaacaagaatttcaacaggtctgcaaatcaaaagtttgtgagtacaattaatgccacaagtcgaagtggttctgatagggagggagacaagacttacgtatcttcggcatcgatcatgtcctcatcttctttccgtcctctatcatctctcatagccctcttcctcttcaacgttccagggctcattccgccatcctcttcaatttctttagtaatagtcgaggcaggtgctcccttacccaacacatgggtttgtcggaggagtgtcgagatgatgccaaaaatttctaatcggacagattcctctcgctcggagattcttgtgatcaacactggaaggacatcttggtacaggctcgaaaggatttcggacctctgttatagataaaggcacgcaggtgtatcacttagacactgagagaggaaacaaacattggttgattgagacacaagagcaggttgttttgcttacagtcgagataagagctcctagaaccttggctgctccccttcgagtcttccaggtgatgtcatcatcgtcatcgtaacttaatgaacacgggcgaatgcgggttggtaagaatagtacagtggtccgggacaaaatgtaaaccatactcactcatcctcgatctcgtcgtcttcatcctcgtcgtcctcttcatcatccatatcctcatcgtcgtcctcgtcgtctgctcctgcataattctgccaacaggagaataagttgcaagacaattttagtgttgaaatccaactggacaaaaacctgagagagaaaaaaactgacaggatcgtaagaaatcagtcggatggcaagatctgctattgaagaagtgaaaggaatgatttctttcgggcactggagaattaagctttccaaagtctgtagagttaagaacatagagcgcatatatgagtatgtatgcaatgccatctgaaaaagaacagccttactgtcaacccggcttcccggtcctcctcgcgtccatcttcctcttctccgttttcaagctcgcagctctgcaatatcacgcccataacatccttcaaaattccgcctgtcttctgaggtgaagatctagctagcgtaccaacaagctgaatataggctctgatgacttcttcagattcggaattactagaagcggaggaaagagtattcgtcaaagattcggtcaacgagctaaaaatggcaggagttgaggcaggaacgagggatcctgtagggcgcgaagttggcttgtgttcagaaaacgagctccatcataggttgaaatcgaaatgcacacaaaccaacctaaagtgacaatagccttcttcttgactgccggtcgaccactgagtaacagaccctgaagaactcgcaaggactctctctgcagctcgatttgggtgatgatcaacggccgaaacttgatgaacaagtccgataaggtatccaatgtctcaagagtctgttgagggggaagtagagcctgacaggtaatataggaggaaaaaaacatcgagtattaaatacacatcaaaacatatatgaacaggataacaatacatacagagtctagctgttcaagaagcttcaggggaagtttctcgatcacggtgaaagcgatgggagattcagatgtgatattgtttgtcatagttttcaaagctatgatagttaagccataaaccatgtagtcagactgatgaaggcaaagtatattcaagcaagcacgagtcgagtgcctacctaaactagccacatcccgtagatcctcgccttttccactctgagctccagaggacatggtgattaaccgatcgattactctagctagctgtgcttttctaagcttcggagagatttcagcaaatctattgggtttcgaacaaaaggatgagagaacaccatggtcaatagctgttgcaactccaggtgctgaaaggtactggcatatgccgctaattagaagaagcttgcttacgccctaacccctgcatttttgacctcgccatttgagtcttccatagacttcagaaccatctcattcagcttggtttctgtggcctcgtcaacggaaaaagaaggactagaagcttccgagatcagatcgttaagggccatgaaccttgttggacgtggagacaaattgtcagtaatcgagccatagttaagaatcatacgcttagaggatcgagaaagatgaagaaagtagcagacctgagatctggatcatcactgtttgccttctcaagaaggctctgaacatgaaaatataccatatgtgggaggagcacgcaaagagatggtcagttgggatttattcaaagatgagctgatcagtgaagagattccagagatggacgatctgtttccattgacatgctgactaagcaggtcgtcatattatgtagctggaatcttaaccttctcatcatttcctcccttagagcatatcaatctagcatgtcagaagggttaccaccgctagagttgttcatctcgacatccttagagtcttctctaggagctcctgtctcggaggataatattgaatacatcgctcgtcttgttgaagaagaggtcggtccttgtatcaatcttccaagctgtattccttgcgcttttcatcctgggagatgagtgatattgaaggaatcctagagtttttttacactgctaggcattggaagatgaggacaagatagaggccgtgagaggtatcctagaaacggagttcgaaggaagagaggtcagtcaagtcaagccatgttccttagattgacgctaatatgcttttctgacgaacccatcttgctgacatcaggaagtagttatcgaacaagctgttcttagcattttagaggaacaccgacggttgttggccgagattccctctcccactttgtctgaatctgagtcttcagaatcggaagatgacgactcatgtttgtccttctttacatgatcgttcacagtatcgtcctctaataacctaacggcctcatttctctctttcgttatctgatcaaacccaaatctctttgggccctatattagcaaataatccggcaattcaggatcctgcatttcaagaacgactgcgaaaggcacttcttatacaacaatacggtctagtagaagacgactctgcttctagctacgctgtgagagaaggtggtcctggaccaggagagggaaagaagccggcagaaggagggattgatgaggctttattgagaagcgaactcaagaggatgagtatgaagaagaagacaaggaagaagtatgatagcgtgaatgaaggtttgtttgttgttgtttttccatataaggaaggcaattgacctgaagtttgacctgcacatccttagactactttgcgtctggaaatcttaacagagagaagatgaagtatgaagatgctcaggtgagctatccagcttgcacagtcgcttgtatctcctgctgacatgaaggttttctcatctcaaaatagaaacgtgccgctgctaaagcgacagcagctgaaaagaaagttaacgacaaggcaggttatgcaaaacaaaagtgaggatatttctctgcttctaaccatgtccttgtcttgctcggtattgatatgttcatgctaaatccttctctatcatcgtccttcagagctgatcagcaagccaaactagaagctaggaggaaaaaagctgccaaaggagagcgaagaggataaatcttccttacctcatctataatctcatgtccggtcacaatcattcacctattactacatcttgctatcaattcaaaaacgatactcatacacaatgtaatcaaaccagatggaattgaaatttttagtgtatgtagtatgttattcctcttaagagcatatgataatcttcaaaatagatataaccttaaccaggccttggccagttcagagcgtctttgccgccgccgccgcccaaaaactctgaaggatccatatcctcgttccgatcaatctctacatcctcatccgaatcaccccacatcgcctccccttcttgcccaccagttattctatcctcattatcatcatcaaactcattattccacgggtcatcttctctgtatcgatccctctgaatgattccgtcggcatcatcccctggagctcgtcgagcagggcgggcggagttggaggaaagtgggttagatagattcgggttagaagcggaggtagaaggagagacggccatgtcagccatcaggcgatccaattgggactgagcgaatgcctttttcttgtcctcctgttgtaatcagagcaaaattctgcagtcagaaatatgaaaattttagatataaacaaagcgaaccaatgtccaccttctgcttggccagcttttccaactccggacggtaatcgctgcagaatcgacaaatggagcagaacatgagccaatgctttccgacgaggcagagtctatgaggaggaatatgcgacaaacatacctctcgtactccttccgagcttcctcaactgctgtgaaaaactcctccataccttctccagtcattgctgacacaccgaccgctctcaaattcttatagaactcgtccaacactaaactcatactgttcatcaaaccatgcatgtaccctggctctccctctctcccttccttttccctctctctaagcgcatcttggaacacctcaaagtcgctcatccaatcgagtgcgaagccgtgaccttggacatcaattttgttgaacacaaggatgaatgggagtttggttttataaagaatcgagcaagcatagagcatgttcgacatgaatgttgctggcgcggtcgttcgaggagtatcaatgatgtatgcaacgcatgtcggtaaggaagaagcgatggcgtcagtgataatggatcccgaggcagaccaagtgaagatttcgatctggcccggagtatcaatcaaaacatggctaggaaatttgttcgtgaatatgtcaatacttgttaaggcggttttagaaaaaggcaaggatgtatcgagagacacttactcgaccgtctctgctcgtttctcaataaactgaagaacctgatcaaacttagtagtaaatagatttaaagcagtcataattcctccattcggcccaaggttatatctgtgtcagaagcaggagttcgattttattagacaacgtccacccagataaataatattcgaggaggcttactgcttcatgacctctttgtagtcaacagtatctcggatatcaatattggcttggtagggcatgtgtgtaaccgccggatccaagttaacgacgtagggaggtttgccctgctgatggaggtacgcatttagacgctgcattaaagttgtctttccagagccagccatacctgaaagaatcaccaaggaaggtaatcaggtcaatttccatttgccgggatatatgattataacaggcaaggtatgaagctaaccaatacagagcacgacggccggtgttttcttctcagtagatggctctacatttgaagaagccggagccgggctgatttcagaagcagctccctttgagagttcagatgccataagaataattcttttgtaacaagagtggaggagcaggtcgggtaaggaggagaacgataaaagatggttgctgcagctaaagaaacaatttggtcgttgcgcctccacttcgtgatgactaagcggtcataggaatacattctttcagcccttccctctcattctcatccctgttctcgtcctctaccattctatccttttcagtcgtttaggtcaaatgacgaaattatcaaacaagaagaggaaggcctctcaacagccctctaatacgggaaagaaacaacatgctgaggcaatatcttcaacgcccgctactcatgagcaggccgagctgaaggacgcccagagtggagctgaagaagaacttattggaggattgatttttggcgaagaactcgatgtgggtgcaatcgaatagctctctatgtgtctcttttgcggaaccttatcttcgaccatcttgatatgtactgtaaccctcagtcgactgtcgaggtccttcagaccctagctcagaatcccgccatcctgaagtcaaaatccatgaagcctttcaaatctgcaatgtacgaatgctggcggtcgatgcaggaagtctctggcacaggttagtttgtaatagttgtttttgattagtattctcctgatatccatgttctgttgctgacatgatgttcatctggatttgcgcgtctcaacaggcacgagtcttacctctagaatcagcaccactcttcaatcctctttacatcttgagtctcttgtattgctctcagaactgcgccttcgaggacaaactcctaagttgggttctcttcaacgttgggtccgagagtgtgatgccgctgctattgcaactgcttcttcaaccagaaaacgttctaaagcggaggaagagcaagaggagcgtctagtttgggaggtcttggatgcactacttaggagctgtacaactctagctgacgatgttgttgcggaggtgaaggatggcgaggttgaatctgatgtgaagagaggtggaaagggagtcagaaggtggaagccctgggatgtaaggaaattactgggagaggcgcacaaacacagagccacgggtcgaaactatactcgtgccgtcgaagaggacacactggtttgtacgtccgttccttttcatttaaatcgcccatcgttaaggatgccctaacgccctcatttacctcaatgtatgaatagcttctgaactgaaggagttgtacagaaaatctgttgttcctcttgacgtcactcctggaccctctcggcggcctcctaatctctttcccgccatcgtttatcacgttgcgtcttcatctcctgacacccttaccttggcatctacacccacgcaagtcgccaagcggttcgatgttccaggagttcctggggctttaatcatcactgatttgctaagcaaagaagaatgtgaggatctgatcgggatgagtgagacaattggaatgattgaagatcaaccagtcggcggttctgctgctgagctcaattctgtaagcctccttgtgaattgcgtggctcatgcatggatgttctggtcgaatttctcatattttctgctcgacttcgcgctttcaccaggtactcgcacacaacctaattctcctagctccatcccagttctcaacccctctgtttgaaagagttcgaaatctcttaccaagccacgtttctgtacctaatggctccaagtctagtggagcgctcaaggggataaaccggaggtacagaatttataggtataaggagggaagtgtataccgtccgcatatcgatggctcttggccttcgtctgcagaacttccggcttcggaagatggattatcacctgcaaaatatgtttacgattccgatccaacagtacgcatcatcttttcatacattttacgagaactagatctgctcacatcgccttcacgctcggactgcagttgtattctagatacacgttcttgatctatctgaatgactcgttctctaacggatgcactacgttcttcgtcccggatccggacagagacggagtgcttgacgcccgacctgttcggccgttggccggttccgctttggtctttcctgtgagtgtttgtcagccttttctgtctgatttctttcttccgttaggctcgataatctcgaatcgacagctgacatcggcctttgcatatgaatacctacagcatggggctacgctaggaagtcttcttcatgagggaagcccagtgttccccaatgagttggagcatgccaagtacgtgatccgaactgaggtactctatgaggtcgaccgaattgctagtgctggtgaaggaggcgtcgtcggtggtcttgtgtaatcattgtaatcttcttccatacgatctgatcttcctgttgaacaaaatgcgcattctgctatcttaccgaagatgttgcacgtgatctttgaagctctggattgacgttagggttatgttatctgatcttttccgttacctaattagcggatctcctcaaacatcatagttttgtttttcagttgcaacatcatttccagaaaacaggagtgatgtctcccatcaacgcaaacaccgttctcataggcgagagagtattgctggtgccatacaagtgaggttgtcgatgcatcttttgtccagtcatggctttgttggcttatccgaaacgtttgtgcgggatttctttgttgttcctgcctcggacgaaagaaaaatccatgttgacgtgagtatatgttttaattgaatgagttcaatccttcaatcacacaaaattgagtttgtcctattattcctcatctcaacttcattcaatgagatgtagaaataccatgaatggatgatgagtgcggaactaagagagatgactgcctcagagcctctctccttagaggaagagtacggaatgcaaggtatggtctgtcgataacttcagtcatgtccatcttatcttgcatttggaccacttactagtccctccttctgacctgttgtctgtttgaatggaacatcatatatgcggttctcatgggaaacagagagctgggccacggacgaagacaaattgacattcatcgtgctctctcgaccctccgccaactcgtcggaggatcctctacctttgtcagaagagatcgagaaggctcggatgattggagatgttaacatgttttttcatgagccggaagaggaaggtagtgtgggagatgccgagtgcgaggtgatgattgcaggtgagtttctgttgcctcttcctgttctgtacattcagtctcggttgatcatcattctttttttctttctttttcttgtttgcgccgacagaacttgatgccaggtagatcttgaaatacttcagactagcttacctcgagattgaaactgacaccattctcatgtgttcgtcttgtacagacgtaaaggtctagcctacgaagccttgagtgtattccttcgatatgctacctcgccgcctctgtcaataccaacctcctcgaatctgatggccaaaatttcgacatcgaaccctagcagtcttggtttatttaataaacttggcttccaagttgtcaagttgtctgaagtctggcaagaatgggagttgaggtatggggtcgaggtgaacggaaaggtatccaaaggtgactggacagaaggaatcatacagatcggcgtatatcagtgaacacaagactacgaagaaggatacattcatagacaaatgaacatgaataatgaagcaaatgatgctcagttgctcctctcaatccctagatttgcagatctataaccatataatcgtgtaaccgtgtaatcatgcgcgtcatcgttcttagtcacagcgactctcataagaattcatccacttcgtcatcattccatttccacccatcatctcgttccaccattcgttcgtacaacatctacaatactatcatgagcaaagcatcattcccccaagaagatcctactatacgcaggtctcatttatctaaggatcttgttcagggaccagagttattcccggaaatcaaaacggtctacgatagtatgtttctccccactcattcttgtctcctgtcgcatgtagtcccacacattaactcatgcagaaacatgcggaacatccacgtctactctgtgtagtattccctgctttagcaaagagatatggagacaagaaagcagctgcataccgtgatgttgttactatcgtcgaggaagaaaaagaggtaacgaagatagtcgaaggaaaagaggtcaaggagaaaaaaacgtggaagtagtgagtgctgattatttcatgttgtgcttccctgattaatcacccgatcttcgttcgttcaacgtgtcagtagttgctgacaatctgatgtcatccctttctggaacgtgtcggatcgactgtctggcagcttcacgctctccgagtacaaatggctcacttacaaccaggtctatgatcggatccaagaaactgcttccggattgaagcatctcggcttgcaagagggcggccgagtcggcatctatgccgatactgggtacatatcatccatctgttcgatactttgatcctgttctattacataagctgaaatatctcttcggtgcgtaacaacatatagagtgaactggcagatcgctgcccatggttcaaccagggctctctacactatcacgagtgagcgatatataatagttgtgaggtgtaacctgtttgaatcttaccagattccttttggaaacatactatcttttaccctctatagctgcctatcccactcttggtccttccggtaagctggtcacgcaattaagtagatgacaagagatcattttatctaaccgtataagtgtatcttcacatccatcaggtttggctcggtcgttgactgagccggaagttcaagcagtcttcacgaacgcttccctgctttctacgcttgccagcgtccttgagaagggcgctaagaatgagggcaagcaggatagtgagaaagatgaagagggaggtggtgagaatgtcagatatgtgatctatgacggcaaattggaggatcaggtttgtatcatccattcctatactacactttgaagaaggcggaggttttcaattcagatcgactcacactgttagtgatttcttttctggcgtggttgtaggctcttttgcaaaaggtctcttccgtacttgaggcccgacagggtaaactgttccatctggacgagctccgagcgctgggacgagagcacccgggatcgtttgaaaagaagcccacccaggacgacacgttctgcataatgtacaccagtggatcttccggggcgcctaagggagtcattttgtctcaccataacatcatctcgtcgcgtgagcaattctttcttttgtcgagattgagaacatagttgagaaactgaacactggttccctaactctgataacaaaaaaatgaagtgggaggaaccaccctcctcttgaaggacattgtcaatcctgaggataccttccttgctttcttaccgcttgtatgtgatatcgcattcgaaatttgttcatacccttcactcggaagtaactgacccgtctactaatcgctctgacgcatagtctcacgtcttggagttgctcgttgagttgactttctatactaagggtactcctgttggatatggaagtaagaccctcattttcaacgttatgtctaatttctctgtgctgatccactcaattcattctcaggccccaagaccctgaccgacgcctcggtccggaactgccaaggtgatctcaaggctttccagcccagcatcatcgtcggtgtccgtaagtattattgtttatcaagcaaaagaaatgataggaagaaagataagctgtcatattaacaactcatcttcaacttcatatagccgcggtatttgagactatcagaaaaggaattgttggaaagatcaacgcgtacgtgtctgtttcgaaatagttaatcacttcccaggaggctcatgttttctgtcccgtttcgctctcagcgctggcgccgttaccaaaactgttttcaatgctgctcttgcgttgaaaaagaatgttcctcttttgggaggtgtagccgatagtgttgtcttttccaaggttcgtgacctatctgctccaacacgtagactgaaatctagctcacaacgcctcttgtccaatatttagatcaaggaacagactggtgggaaattgagaatcgtcatgaacggtggaagtggtctcagcaaagttcgctcgttgatcccttttcttccgaatccctgtgtttacgttactcatcaacattctcgattgcttttacatggccacatatagcctactcaagaattcttgaacaccagtttggctatcattttacagggttatggtcttaccgagacttgtggaatgggtgccattcttacgcctcagttctatcaagtaggtctatccagaatttaacgttgcatatatctggtggtatctaatcccccttggtttgctcttggacgtgtagtacgagtgtgttggtgtacctgtcccgtctgtagaaatcaagttgttggactaccctgatgcaggctacaaaaactccaacaaccctccgcagggagaggtcctgctcagaggaggtagtgtcaccaagggctatttcaagcgagaagacctgaacaaggaggtcagtttttgttctttttatcgaggtgcctacatacttagatgatttgaaacaagataggtctgatctctattttgtgtctaggcctttacgacagacggttggttccgaactggagatattgggcaatggaacaaggacggaaccttgtcattgattgatcgaatcaagaacctcgtcaaattgagctctggagagtatattgctttggagaatttagagtcaacctataagggtgccaacttcctcaacaacatctgcgtctacgctacttcagagtgcaatcgacccatagctttggctactctgcatgagccgaaccttcgagcgttccttaagggtcactcgatctctgatgtgaacgcagactcagattcgctcaacaagcttgctgaaagcaagtcggtccggtcagcaatgctgaaggagttgaacactgttggaaaaaagaacggtcttaagggaccggagacattggccgggttgattctggacgctgaagactggactgtatgttgtttcagccttcttccaagtcttggcatattggtatattggcaaaatcgttgacatcagaatctgccgactgtttgtcttgcttagccggataacggtcttttgactgctgctcagaagcttgataggaaatctgttgtaaagaagcaccaagatgagattgaagtgagtccttgcattctctcttaaatttcctggagtagaagtaatttgcatgatcaagaacgctgaattgttggtgattctatcttttttttgtgaaaacagaaattgatcaaagcgacttcgtcataaactatctcttctccataacaaacttttctacacatcgccatttcgttcccttcctttggcattccatgaaatcggacttggtttattattactcttcgaatgatatttaattttctttgttaatgatattttgtctcatcgtatctacgggtttccacgtcaagaaccggttctcgtttctcgtccgatctgttcttatatgatcctgttatcatcatgatccgacacagactatagaagaaggggaattttacttatgatacagtagatcatcagagcgcatgtacaaatccacatatgcacgagtgatacttcagttcccaggggcgaccgccaccctaccctgctcctcagctctttcagtctttgcttttgtctcgctctcgacttttttcagcctaaccatctctttctcagccaactgagcctcctccaactcttttgctttcttcgctgcctctctctccttccacgtcccctttctgtagcgcaaaccttcccaaccagggccaggaagaatgacacccagttctcgtcggagatcgtccatgtcttgctcccatcttttctcccagtagactccgatcaaaggcttacattctgccgctgctttgagggcccaagggaggtagtctctcaagagggccgatcgagtagtggatgtaagagtattgaaaggagagagaacggtgagcgaggaaaggaagggcataggaagggacgtttgggaggcttcgaagatcttgagtgcgagttcagggaccaaagtagagggaaggtcaaacagaacatggccaaaatcatgcgtttctctgagacatttgggtatttgaaatgagacggtgccggaagcaggaggaggaatcagaacagacaaaagaatcaagagtgagttcgtatgcgctcatcagaatccattggcgatcaaaaagaacgattggttgagaacacaagatgaattcgagttgaagaatatgcttaacgaaccgatatctttgaagaacgtatgccaactctggatcatctacgtgatgaaccggcaacctggtgtctggactggtcccacatcgttcgagccaatcgcaatatacccgaccaaccgtgccctccttgagttctcgaaggtaatgcaaattgatgacttccgagtggattcgaggtcgctcgtgaaggatcaaacggccctcctcggtggaaaatagggtgtctcgtaagcctggtaaaaatggtgtcgaagtcgtttctgacagagcggcgatcatgtctgaaaaggttccaagaggcgtgtgtcagataaagatagagtagatcagaacatcgattgacaatgaaaaactgcttgagagaccagatgcaagcgataaacacaacgtgtagagaaagcagataaaacaagacaaacctgcccgacgagggttcaataaggctgctgccgcacttccgatcgtgagcacgaccttctcgaccccagtaagaggaatatgcccagggtacctaggaggcatagaagacaccatcctacgagcggtgatcgccggctgtttagatagcacacttcgagcgagcttcatgattagaacaccaagcaagaaagagaagtgacgaagagtgatgaaagattggggatggctgatggctagaagatcgatgacggccgacgaaacgggataccttccttaccccaatctattcgccgccatccaaccacccaccatttctctaaccaactgtatcctttcgtacatcgacatcgaaggaaatgcacacgcatgatatagtcatcattggtggtatgtcgataacagtgacccggttatctgcttgcttgactgttcaaatcgatttcatctgatctggcctagtcgaacttgacctactgttcgttctttgcaatgctttcctggcggacaggcggacctgctggtttagttgctctcaagacactcaccgaaaacgggttcgatccaatcctatatgaggcagaggagaaaatcggtggaactttccggtatagaggatatgagaacgctgagctcgtctcgtctaagtatgaagaaagcttattttctgttcgattcataccacgatctcatcatcatagcttatccctttcttgcattaacccccttctctatccacagacaacttactgcgttctccgatttcaggtttcctccagaacagggagatcatgtctccttgccagagtatgtggcttatcttgaacgatacgtcgatcacttcaacctgcaacgcaggattcgcaccggacaccgggtggttgatgtgaggaggttggatgagggaggccatgaagtcaaaattaagcgcaagatgtctgaaggttggcctttctctcttcttaatactggagatggatccctagatgttgacgattgttatttgcttcgatttgaaccagatactcaaacgatcagggtcaagtacttgtgtatatgtaccggacttcacgttttggtgcgcaacatgttccacttctctctgctgtatttagtgtggatgtaaatgtcattgattggatcccgtattatggtagcctcaaattcctaccatcagaggtatccaggttggttttccttctctcaatatattttgcatctgcgctgcactgactcaaaccgtatctggcttggcgtcaagaagcatatctctgcccattcagataagcaagttcttcattcatcatcctataaaggccgagcacaattggcggggaaaaaggtttgcatcttgggtacaggggagacagggatggatttggcctacgagagcataaagagtggagccaaagaggtctggatgtgtaccagaggagggtgcgtatatgtctatcgagatgcaggatacatcacaccttgcaacaaatcactcatctctaacgggtgtgcacactcagatttctttcgttcccaaaagtgttgaacaatttctcgattttgggagtcacctttgacggtcatctgcccatcgatggcctgattacgaatctatttgaggtgcgttgctcatcttggtctatctcttatcgaccgacgactaatacatcttgcacaatttttgatctgccagtctacatagtgagtctcagttgccggtcatcgtattctgtcaatttcgttgactaatcgcgcttgttcttgattttctatttttcttttagcgtgcataaatgggtcgcggcgtctcatcttagatggtatgtttttcaaaagatcacatcatgttcaaatcgtctattttctaagcatcgtttcactataccttggtcgtggccaaataggtttgtatctgattttgtcatcaaacgagtactttggctgttgacgggtacatcgggaggatgcaatcaatgggtaggagagctaccggaggaacgacttggaagggtacgtttctctactcatctcaagtgacatatatcactaaccatcatgcaaatatgcttttatcttcttcccaaaggcctacgtgtttctcaacaaatcgcatgtgcgtgatatattgcttttgttggtcataccgactgttgatggagtcctttcttcttttcacagaaagcgatgatgtacttgaataggccatacaaatctcggtctcgattgctttctttcctctcatcttaccatgatccaccagatgatgtggcgacacctggaaaggttgaaattcttccatggcctattggggtggacgaccgtggcgggtttcgattcgattggggaaccgcccgggctaaaggaggcagctggaaggaagtcgagaaacgattgggagaagctaaagttgaacctgagtatgtcatatcgttcagtcatatccctctctgtaccatggtttttctttactgatatccattggtttcgtcattcagtttggtgctgatggctacaggttacactcaagaagtaaggatttatcagctaattgatcagttcgactgattctaaatctcgacataagaacttaacgcaaaaaccgcctttctgtgcattgtgttataagtttgatgggtggttgggtcacgagtaccctcgaccatgggaagcaaactcccgagacatcattcgagagggttctgaggacgtatctttcataggtttcgttcgaccgggagtaggtcagtcatctttttgtttgcacttgagcgcgtagcctcttacttgaattaacctcatcctgcttattcgctcatcactaaaaaatcttggtgttcgcaggcgcgattcctccaatcgctgaacaacaggctatgtggtggacacttctcatccagaagcggatgaagctaccaatgacccccccacattactaccttctatctaagccaacatctagaattcagtacggtgtaagtgctttttttaataaatatctttccgagacagttaagtggttgatatgaagatgttgattgttgttctcctcttcaggttgatcactcgacgtacatgtcaacattagccaaagatatgggttctgctccagggttactagatctttggtggcaacatggatggttcattaccttggtttactggtccgattgtctttcttctcatcttgaactgggtgtgtgtactaatcgagttaatcattgactccatagcttctcggccgcttttacgacgaattaccgtcttgtcggtccatttgccgatgtgtccgctccagagatcgtccgaactgttcgtttactcaccattttcctcatctttcgatataaagctgaccactctgcttcattgcgcttttcgcaatcacaggaactttgggaaacagtgacccggcggggtgcgcttggcaatctgtttatgggcgtcattccgatgctcttttactgctctatcaacctgacagcttggtttctagagattatctggattcttctcggtcacccagacgtcattgggtttgctcgccaatggggacttatcaagccagagacgttttctgactctccatcttactcctctatgagatcggatcgttcgaaaggaaatgtccagacgaatagaatgagaacaagatcggacaacaagacaggccccatctcaggttgtgaaagcagagagttgaaaagtccaccaggagggaatatggagttagagctaaaaccggaaatgtagtcctcatgctttgtctacctctattctatattcatgatcaacgagattgttcattgctatagccccagcacacttgttgtcaccgttgccattcttcgtttgcatcagggaatggacaaacaagaaccgattttttttgaaagcatcaggaacgcatgaacaagaaactacagaagataagaaaacgatccaccattggagtatcgtcagactaatatctatcattgttttccctaccaaatctgcgctcgttaccaccttcgtagcctcctcttcgaccatactcatcaccacccctgtattctcgaccaccagggaatccttccataaatccaccttgcctctcttcttcaaatccgcctggaccaccgaacctaccatccggaggtgagccccctccatacctatcaggcctcccgtgaccaccccgacgttcctcttcgtattcacccccatatctgttttgttcttccgcgccaaatctgtttcctccctgagatccatattgctgttgaccatggcccggttgaggaggtcttccattgaatcgatcttctcctcgaccgtactcatcaggtgatcgtcgcccgtgaacagtgccacctggtccaccagtgttacgatgaggttcttcgtattgtccctgtcgaccaaattcgttctgacgaccaaatctttgctgatcaccatcgccaccaccgttgttgccaaaagcctcatgaggaacttgaggcttgtgatgttgcctttgaggagaggactggtaggtagactgattttggccatggaagggtcgactttgttcataagagagctcatcagtctcgtccgacgtccgaccttgcgtgtacgacgattgggtctgactgtatgttgccgacggtttctgttggccataagaaggtctgttgtcattctcgtcatcatcatcttgacggccatgcacccgatgctcgccgtaagcaggtttggactgtccgtaagcaggcgtaggttgactgtaggaggacgtcgtctgtccgtagacgggctgatcatcataggaagtcttgctctggctataagatgtctcgttttgagtatttccataataagatgcagcctcgccttgagaaaccgtagcattctgaccataggaagattgctgaccatgggaagattgctggccataggaagattgctggccataggaagattgctggccataggaggattgctggccataagacggttgctggctgtgtgcagattgctggcttgtttggtagccagaggatgccggctgaccataggaagccgtttgaccggaagagtaactctgatacgaagtcttggtgtcgggcttggactggttgtcgttcttgtttgaactacctccgatgttgaacactttgctggcaaagtcagaaacgagagaagtcatggctgcttgagctaggaaagaagaaaatcgagtttgttatagcacaaaagaatatgtatgatagtcagccgaacaagttacaggcagacttgttagaattacgaacgagaaggcacgaacgattattcgcaaactcttgaagagttgggggcttgacactcatctataaattgttcaaatataacatttagcgctaacacatcagaaaacacgacgatgagagagatgcaccttattgtcttccccaagatcttcaaatgatctgatgtttccatgcgtccgaatactagatttgattcataagtggtgattcaatcagaaacttatcaaacggagattcaaaaaaaaagatggtaagatcactgacttttccttttgaagccttcggatcacgtcgtcgacatcagaatttcctctaagccaggtctcagtcgtctggatcatatccttctgaatctgagagttccgatcaatattctctggatggaagctaaacagaagcagaaagaagggaatgaaaacgttgttcatatatcaagtgatctcgttcatgtcgtttaaaaattgacttacaacacctcgagaattttatcggctacatcgtttggatcctgtctacggtcggtccaagcttccgtgatgagtccggcaccatacttgacaatgacttgcgccacttgtcctgctggatgattgagaacgagacctgaagtatgaaggaaggcatgatgtatctgatcggctaatcattctaaaaagactggaaatttcaggcgagcgtaacgtaccaaaatgatctttttcgaggaaaacatgaaaagcgcaggttcaacagttatttctcacggcgatgatactaagagagaacgtacctttgcttaagaacgaatgagtaggatcggaagcgttgtcattgtgaaagacttcttcctgttcaacactattgtgtggaaatggggctcggatcaggcagtttgcaaaagtaaccgaacaacatgaactgatttacctcttgatcacgtaggatccaccttctccaagaacctccgtaaagttctggaggatgggcaaaacaacactgatatgaggaaacaaaagtcaaagatagggggttaaagttggtcaacccacaaataacgaatagcaaacacaatacatacggttcgaggcaagtcaacacataagtgtacgtattatccgatatctcctccagaaaggcttccaggaatctttataaaggcagaaacaagtcacgtattttcagtacacatgaattgaatagatacaaggtcgacaaacagaagactgacggaatggactcgattatggactcaatctttttcatcaagtctgacaagttcagtaggaaccacatatgtcagttagctttgtgtatctttcaaactgagaggacgatgcaaatcatggccgcactatctctccactcaaggatgctccaaatctggtccctaatctccttgatatctcgctcgctcaagccagcgccgcctctcattcgctgacccttctgcgataaagaatctttggtaccatcgatccggtttagtttttcttcggaggtagcattgttctcctgctcgttgtcacctcctttggattccatgaatttggagatcaaagttttgatcaaagccatattgcccgagtcaggtttcttcttggccgcctccattttttcataaagattagaaaccgacatctataagatgaggtatcataattatggaacccatttgagaagtgagtaagtttcagttttgcgcaagtcaacgaaggataactaataaaccaacctgagtgatgtgatcggtagtctcgccaagtaatgaatgcctaacaagaattgatggttgcatgatttagtatataaaataataccggactgaccggggagtggaaagataaaagagaaatatttacaagaagtcgctagaggcaaacgttcctgtcaccaaggggtacacaaccttgccgttctgtaggcggactttagtgtttgctcctacatgaggaaacacctgcgcatcaccaatatgaaagacttgagaaatgagtagcgctcaaacaacatgatgcaattcgatcgcacctgagtataaccgagtttaatcagagtgagctccaagaagttggagtgggccgagaaatcttcgagagtatgcaacaatgtgccgagcaatctaaaggcctcatatttgtccttatcattattctgccttcctttggagatgcactgctgaacaagccgtcggacaaggccagcagacgaatcgtagtcttgattctcggtcgcgatataattcttcagaccggttttgagattgatgtcaagctcctcaggtttgacctcactatagaattccaccagatcaggtcggtgaaccaaataaactaatcgagagacagacgtacgctcgtagccggggatcataatcggtagccttgacggaaggattggtaggatctgttatctcagcaagtcaatgccagacagttagcattacagttgtacatgtgacataagcatcatacttaccaggatatcctctgtagcaagaacaaggagatagagtgagtggtggcattgcaaacagagaatgtgagacacttacttggggttatcgatatgctccgtggtcaaataaacaccaagcctctcttcggttacctgagcgagtgacggccgtcagatttcatatctcgaaagaaggaaaagaaatagaaggaagaaaagggcgagtggatgtagatgctttatgctctccgcttcatagctctcggagtagaaaacgaacctcaaattcttgagtagcatacccaaagctgagaaatcccaacaggccaatgacgagaaggattgtttgcttggaaactttggacaaggcacctacgtccatcgcctgggaatagtctctgttgaaggttcccagttgagaatgatcgagtcagagaccttccctcgacaaacgatcttgacacctggatcagagttcactctaccttagccagttcccaaagtagacccggtttctatcgagatctttcccaaaaagatgtttgaatgcgatagcgagcgcagcctcctctaagtggtccaaggaaaaaatcgaagatacttatcaggtcggccgtcctccgacgattacaaaaggagaaagagtgaaaagacaaagacgaaccgatgtcaccatgtcgccaggcctctccttccacgaaggacttggcaggaatgttctattatggattaagatgactctgatcagctatttgtagcctaattgactggatgaagaatagttcataatgctagtgtttactgacccctgccccgaacgcacgaaccgagggagcgaggcaaatcgccactagaacgagaacgagagatagtttgaaaggatttttgtgaagaaccataagaagacgatgggtgagtgaagtttgttggtggttggaattatggaagtggagatggaaagagaggggaaagagagatctccattttatatctcctgccaaaaaaacgaaggtgcttgcataaaatgacgtttctccctatcttcaccctctatgttcacccgctgtacttcttttgtagcttctcttctacttctgaatatggttaattacatatgtatagagtataaattgggtctcaaccataacgatagacaaaataagaaaaaagcccaaggcaaggagaagattaagtctagaggtactatcagcccgacatccgctcacaactctacttttcctaatccttcaactaccgaatcatcctttgaagcagagccaagtagtccaatccaacgggctaggttcgaaaagtcctgagtgtcgatgattgatctagactcgtctcccttgatgtagtatgccgctcgtcgactgagaaagccgacatgaaccggaagatagaataagattgcgaacgaaaggagggatagaacgacgagaagtatagaatctgtttgatcattcacatttgatcgattgatcggttgacgggaggccagacaagaataaacgatgataagcattagtgatgacgctcgttttttagttgaccttttgattatacgttccagatttacaagcagaagaaacatacaaatgatgattatctcccaggtgtccatcatggcgagtcctagggaagcctcgaaccagacacgttgcctccaaaggaacagacgaagaccaggcttgttcgtcggcggccgatgaggaaaagtcatagtagagaacaagctagagtcgacaaacggaaggcaatggaaggaaacctgaattggatggagaacgagggcgagcttgagtgtttgcgactagcaagactcgagaaaccaggtagaagattctgtaaacagaggtgaaggatcagaggaattatcaagcagacgatcaagttaacgacaacggagagagaacatcaagcggttaatcattcttccagagatccaatgaagaaatacaacaagacaagaacaatagaaacgcacccagattagagacgattgatgggatccaaacaaggaagcagggtatgttgatcgtggtggaagtcgtcttcagatgatctctcgaagtcggacaaacaaataggaaaactgtgcgcattttgtttatcgaatttcttatttgatacatataccccttctcatcagacatcgttaaaaaatgtgtacatagtattataatctctaaaagaggcacatggtgggtatgtaagattgtatagatcgcaatcacaaaggataaatgagaaagcccaaaaagaggatagaagaaactaagagaaaagcccatctgtacgaaagaggaggaagcaaaagagatcacccaagcaggcgaaggaactacaaagcttgggtacgcatgtatgtatatgactatacatgttcatcagaaagcaacgcggaaactgcgacgatctgttgatactttgctttcagaaaccttaacgattctaacactgaatcaggggtagatggatcgccttcttccaatacccttctttccaaggcatccacgtaggacaacgcgaccgcctctgagatgatcggcggtggtgcagcctgcagatcatccatcacgaactgggggaaaccccctaggccttggtcgtctactccgtcatgcgtatgatccgggtgatcgtcttgctgaagttcgtgctcctgatgatgtggatcctgctggtcatcatgagattggtgtccttgctgttgatggtcatgctgatgatgatgttcatccgactgaagttcttcatgttgatggtcctgagggtcatatacactcggtcctgcctcagtatctattgagagatctaggtggtcgtctggttgaagaccatcatgtttcccggattctgatggttcggtatttgcagtcaacatgccttcctgtttaagtctgatcttgggtcgaagaccgtgtctgatataaaataagtaggaccagtgacacaattagcgcaatgtgtagatggttgggggatgaaatgaggcgtgtctggaaggaacagcatacacatacgtcgacaaaaatgaatctaaccatccgttcgtgcccttcagcctctcttctactggcacaccgagctcaatttgaaaggccataaatcgctccttgatgcgaagacctgtcggtctgtattctccctcttcaatccatctcaatagagcggcctcaacatctggaaatttcactttacgggcccgcttgaggctgcgcccattatgagtcgtctctgcacgttcctcgatcaactggcgtttcttgaggttccgagagagcgtcgcctgattaaaaatcagagaaggacctgtattcgggaacagacatacagatgatgagcctggattatcgaagaaagatgagagtgggtgtcgatgtgatgttcaacgaaccatctggattgttcttgaaatgctcaaccgttcgaagctgattcgattttgggttcttatccatccaatcaaatacaatcaacctacgaggtgatgtagacattgaatcaatagaacagaggattttgaacattgacccaacataagattataggatgttatgcaaagacgtggtgcacaaacgaaaatgacgagacctaccaatctcctgtggtaagaccagtcctgtgcaactcttccttctccttcatttcaaggtgattgtccataagggatagcgcgccagaaatgtcacctagtgacggactaaaaacctctaattgatggcaaacatcttgctccagttgttctcggtcatgttcttgttcccgatttcgctcctgatcgtgcccttgctcgtgctcgtgatcgatggccggaacgtccacaacatgaccgatatgtccgacattaccgtcttgccttgggtcatcatgttctatacagttcaattgatcatctgccgcgaccagctcgtcggtcggctcaagagagagttgagggtcatcatggggaacgagaatatgattcgatgggattggttcgatctcaaacggttcgtccgacggagaaaccatttcccgcgaggaaggcagcactagagagggctgattaaagtcctccgtggaggatgtctccgtagacatgatgagtagactaccacggacagagagcagaggtcgatgagggtggtaagaaggaggagaggatggacgcgtcatttgccatctaatcatgtttcaccttctcaacttcatcctcatccattgattttgaccagacctttctgtgaaatcgacactcatcatcttcttgtcggtctatctagagctcacagttcttggaagcttctcatatctttgctttctctctacagatgacaccaattccagttatccttcttcgagaatcgacccggtcatgttcgtccaacacgccggatccatatgcttacctgctatcccaaccttcttccaattcatctcagccgtcttatacacctttcttcttgcctgtatttgaaactgtgttctctaatgagtcggctctcgatcaaattgttgaacaaggtggagataaatggcgaggtgtgattgtgactagccagcgctcggtcgatgcgtgggagagcagtgcaaacagggtgatcaaattatcggctgagaagtctggcaatgtcaaagggaagatgaactcggtcgaagacgagagtggtgagtgctcatgtacttcttttaactaggtcttttatcaatgactgactagattcggctcttttggtttccgacgatatcgtgtcgcttactctatagcaacccaatcaaattggttatctacacctttcttcactgtcggaccttcgaccgcccgagctctggccgatctcggaagaacaattccctcctgtctccgtccttctgcaaccaatatcgtcggaggtgattccgctgggaattcgcctgctcttgcgcagatcatcgccgaatatgtggctttaccatcgccaaacctatcatcgtcatcatctacatcatcttcccaacgttcgccaccactcttgatatccgaagacctgtcgctgcctatccaggacaaccggccactgctgtatctcacgggagacaaaaactctacagtcttggccacccatctctccatgcaaactcctccagttgatgttcaacccctggacgtgtaccaaacaataccttctccaacttaccccgcgcgctgttcgaatcttctggctcagctatttcggtccgatatgcaggtgtctttgtcgcagaaaccatggatcgtgatgttttctccttcgacaataccgttgatcgtgcaagagctcgaagcgaagggtctgacgagccagtttcgatatgcggctattggtcccactaccaaagatgcgatgaagaaagagcctgcgttgaaatcagtatgggaagacattgtggccagtacaaaacctacggcgggcgatctgatcagtgttttgcgacgtaaggatggattgaattgaatatcgatccttccagccattcaaaggatatacttggtcgtatttatcgagatatatgagtgattacgtcgtctaggctgagaccagcaatagatgctccggttggctatgaacagagtaaaggaagagacagtgaggaggacctgagatgtgacgaaccccgctcgtgtttttctttctgtgttttttatttttatttctttctttccttcttcccatcgtcaacatctctcttccattctttttcttttcttttgtaaacgagctggactagtttaggaggaagatacggcgtgaatagaatcaaaacgatcggatgcacaactctccaccgacggaaactatcagacagaggaggccaagtgccatctcatcggagggaagagtagaaacagcgcgagcgattgcagaattgtccgttcttcctgttcaaccaccatcgtcccactctaatccccctccgtcgaccttgtcgtcgtccctatcgccgtcgaatctctcttcctcggctatccctcctccccaactccaaccttccctgcagctagaccagacagtacagcaggatatgcctatcatcaatagagcccccaggattcccggatccaacaacaccaactatcggacctttttgcccaggcgacccaaccttcaattcaaacgaggtttccgttcttcttggcagcaaaagagagaagagtctgatcctcttctcggtcggaaggctggagaagagggacccaagaagaaaagacgaggcatgggttgtacgtgttcttcaacgatcattctttttttctttcttttccccctcttctccccctttcgtcctcctttttggatccgctcttcgtaagcggaggacaccgtttgtctctgcatcgtccagattcacccgataaatccacttctacacttcatcttcttgttaaatcgaacatctgttcaatgttttacgatgattgtcgatcggttcgcttatgttctcttgacttcattttcggtcacaccccgcttggcttgaatagcccgcttgcactcggcttggaagtcgacccccaccagatggtatcctatccctatcggactaggagctttgtatctaggagcccaacaggctaagaaaaagtgggacggtgacaaaggtgtcgtcggcatcgatggagacaacgacgaaatggcagtcaagctaaggggtccctggcaggtatgtgaaatcgttaaaaactccaactcatcttgtttttttctcatccacttgaagaatatcataccctcgcatgcctttaactctcgatattccaccgctaatcacacacatgcctttgtttcggtgcttttaggttcatgtcatgggtgctctgcctttgcgatccctttcaagattatggggatatttgaattccctagaggttggtgtaacgttcttgtacaattcttgaaggccgaaatagctgctgaagcatttgtctcaatccgattcgatcctctcttccaatagcttccagtgtggtctcgagaacccggtttcaaactctattcttatgtgtttggctgtaacctcgacgaacttgaccagcctgatctcaaatcttacgctagtttgggagactttttctatcgaaggctgagggacggtgtccggccaattgacgacgaacctcttgtatgtcattctatctattgtgataaaaccgtcttgtgcgtttgcttcaatatggatctaaccgagtgtcatacttcaaatttctccatcataggtttctcctgccgatggtcgactgctccactttggtgctatcaatggagcaaaggttgagcaggtcaaagggctgacctactcgctggatgccttgttaggtaagactggtggaccgggcactcctgccgcagaggatgtggaatttgataccaaccgagccttcgacggtaagccatcttgtttttgtgtcccaaaacttgttcctacagtttcaaactttcacccacggtcatggttcgataattgtactaatcacctatctccgatctagatcatgattttgccaacatcaacgacattgactactctctgggtgatctcctcgggtcttcccaacgaaaggtcgatgctaactcgtctatcaaggacgagcaaagttccgaggatgagtcgtctagcatgcggtccagctcgccctctccctcgactcctgggtctcccaacgaagacgcctctgttcctcaggaatccaccaccgacaatcttgttcgtgatgcctcggtggccttatcaatgggaaccaatgttgttcctgccgatgccagtagccctcgaagctcagtctccaagttgagagaaggcaacggcttgttcttcgcggtcatctacttggcacctggtgattatcatcggttccacagtccagccgcatgggtcgttgaacgaaggagacactttgctggtgagtgtcttgctaagatgatcagtgtaaccttctagcatgctgacggatcatcatctatctcactttctgtgtaggtgaacttttttctgtctcgccgtatattgctcgtcgactttccaacttgtttgttttgaacgagagggttgcacgtgagttcaaatcaattcgaatactctattatttctatagagcgccatgtgcttattgcatcacttcgcccattcagttcttggtcgatggcgatacggcttctttagcatggttcctgttggagctaccaatgtcggtagcatcaagatcaactttgatcaggtatgtgatttcatcagtcacgatgtcaatccaattctttccttacaaattaaaacccgatattcttatctttccatctctttcaatttttaggctctacgaacgaacgagcgacgacctcgatctcaccctgcaggaacttacatcgaagctggctactcaaaggcctcctcgttgcttcgaggacagcctttgaacgccggagaagagatgggtgggttccggttgggaagtactgtcgtgttggttttcgaggctcccaaggactttacattcaaggtccaggaaggacagaaggtcaaggtcggagaggcattaggtaagtcatcgctttatatgtttaaggctgcgagtcaaactccagattcactgatgaattgccgctctatctcaccgttggttaggttacgtgccgagtgatgccaaatctaaatgatcttctcaagatcattgaggacgatctagtctactgtttccctttcttctgttcttttccgttcgctcttgatttgtttcttctttgtctcaagcttcaactcttcggaggatacttttctcccaaacaaaaaagcatatcgacgcgtctcaacaccgtgcattttttcttttattgtctctgcgttcttcttttcacatctttttccatctgaaagattgactactttttctgatctactcacacacactgtttaaaatcatttatttgtttattttctatccgctttatccacagttgttttctattcttaccgcgacatcgttcttttttcttttctcccttattgttaacctagtcttgccatactttctctctcttctgttttggtcttttgtgttcgtgcggacggcgttctggatggtgctgagctatacgataaatccagctgagaatgcctcaaacaacgtgttgaacggctagacgacacgagtttccgaaatcatgattgatcgatcacattgatggaacgagactcttattccggaaagacatgatagacgaattttaaactctcaactgctaactttaacccaagccccatctcaattctttctcgttgatcaccaactatggaaattgttgacgtctgggtaataagaagatagaaaaccgatcctctcgcagcgcaaatttgcatctgcctgtttcagttaacataggaggaaattgaggcgaattagggaaaacccctcgaggaccagaagaaccgtctgggatatctgtaagaacctagagaacttgacccttcatctagtgagtgaatcatactccatccttttttaggacctgtggagctaccagaacacgaagatttggcaacattattagtggtgatcctcatataagtcgttgacttgacacgcgccttaatcaaggttacacctgtctgtaaccatctgacattgggcttggaaatgagaaacctcaactttttcctatcatcatcgaccttccgcactctcctccaaagataacctatccttctgaatccctcttttcgtgaatctgcataacgttcttgagcagatctcgacaaccagatggctgactcgaccaacgcattcaacatcaaccagggtttcatcgcctttgaagtttcacccgagcctgaagtcgctccaagctccgttcacgcgtcgacttccaaaccatcagacggacataatgcggtccggtcgagcgggaagggaaaggaaccagcgcgagagtcgaacaagcgatcaagagaagacggagaatttgacccgaacgatccagacgcgtatagaaatctgaaagaggagaggagagcagctgggaggtttacgccttggacggagggccttgactggaagtgagacgaacatcttccctttctttgtttctatcggggattcttatgactctctatggaggtcttcgagaggtcaaatcaactgctatcttacatagcgcttgataagggatccatcactctgtgtagtttgctaattatgcgctctttctctcaattacggtcgatcttagttcgtgtaaaaatccggcagaactgtgagtgacttgataccgtcttgactctttacgcatatgtactgaaagctcattgttcgcttctgttaccgatgatgacaaaatatagtttgaatcgagaaattacttccttcgtgtcgtatatctcaccaactgtcaaagagcatgcaactcgaacacatatcgtggagctgattcggcgggctgtcgttaatcaatggaaggacgcaaaggtggttccatttggaagttttgaaacgggtctctatttaccaaatgggttagtactgatcctatagataactctcattcatatggtcgttgtcggttctgaatccctcagctgctttgtttccgttgcgcatgctcagagatatcgatttggttatttcttcaaacacaatggaccgtcaaaataaggtcaccgtgctgcataccctcgcttcagtcttaagaagggccaatttggcagagaatattcaggtcattgccagagcaaaagtgccaattgtcaagtttatatcatcttatggtccgtcgggtctgttatcgctctttgacgcgtatttcgaggataacgatctgattcatggtctaaatgcccccttgttcgacaggtcgtctcccaatcgatatatcgcttaatcagttgaacggtatatctgctgggaagattgtaaacagttatctggcagcgcttcctgctgttagacctttggttttggtcatcaagtcgttccttaatcaaagagggatgaacgaggtctactcgggtgggttaggaagttatagcgtgatttgtttagtgataagtttccttcaggtatgtggttcttcttttgtgacaggttgaaacaggactcatcgtcaaatcacgtgtatacctacctaggttcatgcaaaagttcgaagagcagagatcgaccctctggagaacttgggtgtccttttgatcgagttctttgagctatatgggaaaaacttcgggtatgatgatactggtatatgccttcgaaatggtggttcttatttctccaaatcagaaagaaactggatcaacgagaagcagcggtatctactttcgattgaggatcctcaagatcagagttagtcaatgacctctcaatagcacttcgctcgtcctgtctgaacatgtgttcttctctttccccttcatcaacaaagcaaacgatgtagctcgttcatctcatggtattcttagagttcgatctacatttggaggagcgtatgaggttctcacttcgaggctttacatccgagccgacgaaatggccagaagtcgtcatggtcaaaggcacttgagattcactaatagtgatgaggcaagcatcctgatgggaatcatgggagtgacgcctgaggtgagagtgtatcctacaagtttacctggtttttcaaccgtgcataaattaatgcgcctgcgcgttgttctatacatcctctaggtggccaagcaacgacgattcctcgaagatttacacaatagtggggttcttcaaaactcacttaacattccaaagaatgcaccccttccagacctgcctgcttttcttcaaaacgccacaactcagtcgtcgaaagcaacaaagccaaggtctcagacatcgtcgtcctccttctcggttcgttcgcctccgaccgtgaaggcgccaaaacaaagcatggctgcgatcatgattgaggatgacaccgagtctgaagctggacacatccgaaagtctatccaagcgggttacgtttcgtcagactcagagatttcattcatcgacaaaccattcaaacctgcctcagccgtcgtttcgcataccgttgtagaacaaccgagatcgagatcatcaagcgccaatccttactctagatcgtccctccttcaacgcctgaacagtaattctgacgtcaaggaggattcaagatacgctgccacgcagtctcctgcctcgaaacgtcgtcggatgaagcaagatgctttctcgcctgcgcctccgtcgccaataacgaagaagagccagaagaagatgactagaaagatatccttgggctcttctgattcctctggagaggaaggagagatcaaggagattgaggctttcaatgagaacggcgatgacgacgatgatgattcatcgagtcatatcgagggtcaagaagaacttatatcaacatcagacgaggaaataaggaaggcaacggccaaatctgcgagaaggaaagcaaggcagatgaggagagatttttgggcagccaaagggggagactcgagaatggatttagcgtatggatcgttggatcgggactgatctcttggtccctttgatcaatatggaggtctgctttgttattgcatgcagttctcctttggcctgatttgcgttccctattcttgcagtttaactcgcttgtaggtctgggagggggcgtcgtttggtatatggttaggctgagacaagtgcgcatatagtcatccgtcctgtcagccgttcctgagacggcagtaacatgtcaaggacatcaccccttctttttttatctactcgcaatctttcacaaatgaaccaccaccaccgtccttgttcctcatcatgcctcctaggaaagtacttcagtcaagtaagaaatctcatacaccttcggaaattaaggaacaaacgataagtaatagtcaggtgtgtccatttgtcttatcatcctaggccccttcttcgtgagtttctcaagttggttcagctctgtgaatcatcttgactcgacagactagtgaggtctctgatggggggtaagttcaaaaatccaagaaaagcctctgtagatgttttctcagttgaccaatttgatcactacaaagggatctggccactctgctgtctcaactacaaggtgatcgcacttgaaattcatcaatctgaattggggaccaaatcttgttctctctactggatataaactgaccgagacgtttcttaacatctctcaggcgcggtcgccaagaaacagaaagcgagtaagaaggcactgatgatacagtcaacggacgaagccgctctctgggtacattttccctgttatattccttatcggagaaagaatacctgcccgacagttttctatattgacacagagcttctccgtcccttttcttcttatgttcctttttctctctttgatcgagtagatctcacgattggaagaaacatatgctgaacgaaagaaagctcagtaagtatatggagctctcgacacactcattttttcaaagctcatctgcccaatcaccttctcccttctctctctgaaatctcacaaacagccaagtcttatgcgacgaatcattcgctctgttggagaaggatcaagaagaagtgattgactcgatcgagaaacttatgcagctagaaaaccagttcaaggtctccaccattcatctctttctctatttctgatatcagaaggccatagcaataccgtagaacttactcttgttaccccctggcgcggtaacatcgcggcattcgtttaggaattctgtgaccatctcaagatcgaacaagtcgactcagcccggttcagggaatcagccgtgcatgggtatatggtcgatcttgaggaaacacttctaggtacgaataccacttgacgttctgcgcctcacatctgttggtttgtgtttggtatttcatactcgctcactatttgctttgagttggttcacgttctgccacgttaatcatcgtgcatcgtttcgatgccatgacacaacatatacacagccgagaaacatttaggatcataattagagtcatgcgggtacccatcccccttttgacctgcttgcttaaattcctctcgttcctgatagatgtcttgtattgtgtctgctgtcaagagcgaacagactgggcgatagtcgacaaggccatgagcggatatgatatcaaaaaaaagggaaaaagcgaagagaaagtaaaagacgaaagttcaacgatgtaagaaaaaagatggaaatgaaatcctagataaacgaaagggcaagaagtaataagggaagaggatacagagaaaaagaggaggttacaggaaaaagaggaggcttatgatgtttctccagcacctcgaatacaatcagacttggttaagtaacaaacacagacaccactgaagcatcctcaggctttgacatcttccatttcgacgtcggcatcggtattggtcttgttaccatcggccttctcggctatcgcctcgctctcggagatcttgtccccatctactactggcgagatcttttctttgctcggtgaaggcgacgaggccgaagcattagcagctccaagtgtctttgggggggacggctttcggtcatccgtcgacttgacttccccgccgttcatggtcgaatccaaatttacagtcatgcttggcaaaggcgaacgttgtggagaaacagctgttcggtccggcatcgctttcgaagagccgtctagagctgatgcaggtgtcgacggaggtgctgttgtcgcagagacgggtgtaggattgggtgacaagagacgactgagatgattgctactactgctcgacggcttagatgatggcgtcgaagtggaggcaggaacagcaggacatttctcgtgatcgctcgtcattgagacatcttttacaatcgataaagtaggctcagccgggatggtcccggaaatagagtcgggggcagatgtgattcttgtgggagaagaactagtagacgttgatctcatcggttcgtcaacctcctttgaacgagccggggtagaaatggagggcgagctaggcgttgctccgtttgcaccgaccttgtcttgtccggaacctccattgaaggcattagtagagggcagacctttgtcttcagtagattcgattttaggagatgtttcggttggcgaggtcgcaatagtctcatcgataggtgcgttcgtggccgaagcagcaacgactggagtttgagagttcaccagcgacgatgacctctttgacggggtcgaagttgtagacccagtacccagcttaaggtcttttgatccaggaacgacatccatcggtgttgtcggcctggacgatcgaagattcttcaaggcttcttcagaaaatccaggtttggtcgttggtacgtggatcgtcgtcaccgttgtcatctttgtcgtcgtcggttgagtctgagaagacaaggttttaggcgtcagagtagaaggcgcggttgtagacggaacagggatagagctgggactcgggctcgtcaaattgtggatcgacgtcacggatgggacgggaaacagaggaggcgcagggacagaagggaccgttggtttcgacactccattcacctgcggctgggtctgtggcgaagaaagagatggaagagggagcggagcgggttgagatggaggcggtggaggttgagattggtttgaagaaaacgaaaagccaccagcaagacccatcaagagatcggcagcgccgacagcgtccgaattagacccttcgtcctcatcatcatagttgtcatcgacgtatcgtagggcggcagcagcaggggctggtccggatgccgatcgcccagtggatgcttgtttgtgattttcacataagatgagatgttagtcagagaaccatttacccttcaagtaaagaccaagaaaaattgacctacactgggaatttttgccagacttgttgttgcccgagtttgcatttaacgtcaccttgagcgaagggccgtcccctcccttctttccattcttttctgctttacttgacccgttcttctctaccttgtccaccttttcggtccggtcgtgtcggcctcccttttctggtttctctgccttttcgcctccctcatcatccccgccacccgtcctgtcggccttttcgcctcgttctctctctgccttttccgctcggtcggccttgctgtttccaccggaagtcgtcgagtttctcgaccgtctggccttcttctcttcacccttcaatcctacctgggtaccattttttctctttcttgagcctcccccgccacctgattccttgacagcggcagcggcagaagatgaagatggtccgcctgcaggactagtgctcaacaattcctcttcggcagccattcgggaagagcctttaccgaccgaggaccttcgatgtttcggcacgctgttcggagaattcgatactgtgtttgaagatgggttcatcgtgggatcatacctccttccggcggaggcgccgacaacgctaccggcagcagcggcggcagactgtgagtcgtgcgaactaagaggtatgatgggtgatcgagggcgttcctgaccggccgggtgactatggaatgggtgttgagggggctgttgctgttgtggaggatggtggtatccagccgtgggaggataagcagatgggaacggagatctggcgcctgaacctcttcggtctcccctgtcttctgaagcagccgtactttcatccgatcgtcgacggtgatcaaagggagatcttcttccaccgtgagagcctgtgccagagtagtagcccggtccccctccggttgttgtacctgaggcacctccatgcattgccgaggcttctcgagatcgttcccattccatctcaacggtggaggaagggagagctcgctcggatggaccggcatcagcggcaccggctgtgggataaccatgtcggacgcccatcgggccagccgtcatcggttgaatgtagggcggatacgggttggtgtaggccgcctgggaggcagggtaggtgtctgaatgtctagcatgaggcgaaggggcggccgaatttcgagcggcatcgaatggggctcgtccgttcggtagatttcgaccaccaccaccaccggaagagggtggtgggggtcgatcgacatccattgcggatccaaccgatcgagacgatcgagaatcttctgctagcccggcagggcctctatagtgagcgctcggtccttgtggaggtgggggtgagggaggtcctctatagtgatgaccgggaggaccggtcgggtaatatgggttgaaagctgatgcggacgaagaaggaggagctccggaagcagttgggtgtccctgagaatcatttattgactctgcgcgaccaggaccggactgaagagtggaaggaggaggagggccaagatcaattggacctgacctggatcccccaggcgcactggttccgttcccactaccaccgatgacgcccattccagctcgaagttcttccgagctattctggttaattgcgttattgtacgcggtcgggtgaacgtcttgaggcggaggtggcactggggacgggccaccattgatttgcaagtttttcaagagggaaagtctagatttgatggtctcgttcgttgggtcgaggtcaagtgcccttccgtacgcgtcgatggcgtccgcgatctggttgttgcagctctcgtagagtgagcccagatcgaaccagacctccgagatatacgggttcagtctaatggctcgagagtaggcatcaagggcgtctctgaactggttgatttgatagtaaaggacaccgatcgagcaccagaacgtcgggcttcgaccatctcggtaaacagcctgctggtagtactcgtaggccttgttgtaacgttgttcagacatgaatactcttcccagaagataccaagtctgagaatcgcctcggtctaatcacgtgccagaggaatcaaacatcgggttgttagccatactactcatgattttgatccagttggatgaggaaaagatgatggacttaccggcattaagacttctttcaagatacgagattgctaattcttggttagcaaaactggcctctctctggtggtaaagccaaccgagttgttgaagaaccttcgagtggtcgggattctctgcaagcacacgttcgtacgcttctttcgccaatccatactacaaaaagggaaggggagggagccgaaggagatcagttcacaggaacacccatatcaggtgatgatgaaggatgggaagagaaacaagaacgaggttttacctctttttgctgctcatgaacgtgaccaagctgaaaccagatgtctatctctgtgagcggtttcggaggcgatttaagaatgtatcgaaaacactgtgtgtggatgtggagagccgacgcgttccttttagtttcaatcactttgtagacatcttaatgaacgcgtaaacagatatactcacgtcgagagaagcactgaatttattttgctgtttgtagatgatgcccaacctaaaatatatttcattggctttctcgaagtctagacgaaaggtgatagcgttagccggacgaatgatggtgggagccacgaaaggaaaagaaaaaaagactgactctgttccattctcaatacactactgaaagcctcctctgcatgctccagacttccgtatcgatcatacagaataccaatcccgtaccaaagtttgggttcctacacgttgttaaggaaaaaactcgacatcagaagagagtttggtgatgtcggccgttgccgtcaatgtgattctgtaaaaaaaaaactcaccttgggattcggaagatgatacaacgcctgttggtaagcggtgtacgctttttgaaggtcatccatcatcagatagcaatggcctagatgattgtgagtccgttagcacaggatgttagtttggtatgatgagacgctactttggatggaagaaaaggaaacgcgacggacctagggctccccagatttcaccattatcttgcgagatgttcagcactctctggaagaactcgatagcctgtaagagattggtgaagaacgatgaagaaattgacatgtcagcatgagcttcagggggaaaagaagacgaatggaggacaatgatgacgatgacgatgacggaccttgacaaaatcgtccttggctcgagcgatcccagcgacttgagtaagagcactgatgctcatcggattatgtctgagggcatgttcgtaggctgcgagggcgcgatccaggtcggagagttgctcggcgaccgctcctgcgaagaacaaggacatatgaacacagcatgacaaaaagagcggatcagacatgactaaatgaaggagagatgacgattaaatgggaagctgcattgcaagagggacgtttgcgtgttctcctctcagaagcaacatccgtccattggataacctctcatgcaatctgtctgaagaacgggaaggaaggcaaagtatattaggacgtacccatgaggagccaggtggattcgttggccaacgcaagagcggggataggtgtaagcacgataggctgtgatgattgatggccaggaataggtggctgttgtgaaggctgctgttgctgctgggaatgagaaggaaggatccaaccgggtgcgccaccgttcatgttggtgctcactacactgtttccaatcgccatgagattggaattgggagacgaaaggagaaagggtggattaaggttcgctcgagcacgagaggtttcctagttgaacgccgaccaggagaatggctttttttttctttgtgacaaagacagatggaacggaggatgggagggttggatgggtgatctgacctgatcgattatgactgtgactgagaacggatgatgggaagaggacgatagatggtggcgtcagtggatccagacgacgagacagatgtatcagccaaagacataggccaggatggggattgcaggaacagaatcgacagtgtgcacggagacaattagagttggccgaccggctggtagatgaaggaaccaggtacgtaaaaaggagagaaagaaggaggacgaaaaagaggaaaggaaggaaccaaaagaaatagaccggccaagaagaaaaataagagaacggatggacgaacgggtatgtgtgtgagattgaacgagcagaaacgatctgatgtctgatcgaacgaacggacagataaacagatggatggatggatggatgggaatgtgaacagacggagaaggcaaaagagagagaaagaaaagtaggaacaaggggaacaagaatggatggagagagaaaagagagagagaagaagaggaaaaagatctggccgggagaagaattaataataaaaatccgccagcaaagaggaaaaggagagaagcggaagggaaagggcaaagagaaagagaaagaaaggcgagaagggaagtataattacctgggcaagaaaaaagagtaaagaagagagaacccaaagatcagcgccggagaggaagaagaccgcatgaagagcacagggcacccagtcagaggccggtggcagagagatcgggacagaatccgcccagggcagagacggatgatcgggatttccccggctttttttccattcttcaacgcacctgcatcagatggcgaatgaacaagaggacgaacgaggcgtgcgttcgtgggctcgctcacaacgcggcaagcaacaaacattcgcccccacgcgtggttccaaaaacgtagcagatggcggcgggccgaccagcgggagagtttcctctaaaagatctgatcgatgatcatctctacggacacaggcacaggcataaacatagatacagatacgcaaacacagggcacgccgatggtcgagtacgaaaacaaggcaaggtctgacgtaatttcggctcacgcgatccgccgttcgtctctctctctcaccaccccagaaaatatcacatgaaccccgcctcccccgggaagggcgtggaaggtaaaaacgcggatgattgcgctcgcagaaataaaacaaaagaataaattataaacgatcgcaaagtccgagaaaggaaaaagaaaaggagagaaaaaatatgctagccggcgattccgctcaaaatcaaaagagctttcttctttgttaaactttttttttctttctcggtttttcgcccttctctcatcccgtggttgtctcgcttgctttgttttcgtatcttctctagcttctttccttcgttgcactctctccttcttttcctccttgttacacccggataccaagtccgaaactatgtgtgtttttctctcttgcttttggcttgatttgttgacatctttcgccgcctacttcgttcatcgctcgctttgatttttttatctttctatcggtgtacgtaacgcatttaccatttatcttgtttttgtaaccaccggcattcgtccatttgcaaccgtgtccatggatgtaaccgagtatgaacacgtgctccaccaacagggttgttccagccggtcggtctcctgatttttagtcttcaactgatctcaagctgtgtgtattccgggtttcagtaaccacccccagtttgttcacacacgaaactcaagaatcaacaaagcaaagcaaatcgagacgacagaaaataactcacaaagctaaaagcgcacagcttggggtcctgaacgtgtaatccttgtgggttccacgttgactcgttcgctctcctcaatacgacttctagcccttcaagtttctgttttggtaaaagaaattgaagaaattttgagttttcgagattagagatagattgagacacacaaactaatcaaagcgcacgcatgtaccttttcgaaatgactctttttgaataagagcgagagatgcattgtcgctaccatcaacatattatcccacaccgcgtgacggaacgagttggcctctaatagtactgtattgacggaatttattaaatccagaaattcgttctgggtgatctgaagggtttggaaaggaggagaaaacaagacaagaacacaagaggctctagtcagataagaacaagggcgatagcaaaaagatcgaccaactcttccttcgagttctgagggatagtccggtaaaaaccttggccgccgaacaaaaagacggaataaacaatatgtcaggtaccactcaacgaaagagtattcagaaatacagtgggagtaatccaatatgtactgggcaatgtctcctgtggtccaatctctctgtattctgatgacagcctgtggatgttcgactctttcctcgcgaccctggagaggtccggctcgaactggtgggctgtgatgacccattttcaaatgacaatctgtccttgcatcagtctcttttctctttctcaattttggaagaaggaagaaggggaatagagaggaaaagatcagaagtaaatgaaaacaaacacaaaagatcgaaataccgaatgatcatcgcgagatccagtcggtccaaccgtcccatccggtacatccatctccaacccatccgccattaccagatcttcatcttcctcttcctcttcctcctcctctccaccatcatgactactcggacgtccagtcgaaggaagcggccgttgggcgagaaattcttggatattcataatccggtgttcggctcgtgaatcccgttccgcatgagtcttcactggaagattgtcttgaggagagaagacgatgtccgagcgaaacaaatgaaagggaatttgggcgggcaggggaccggggtgactaactgtctcatcatctttcagatcttctccttttgactctcatcgtcaaacccattcgctaccttcttgcgtcggtgtttttctttcgtttttccttttatcaacatagctcttcgccatgccccatctgtcttgttttgttctcaggaaaatctttcataacgtcttccgacactccgttcatcttaccatgttcgccaatacaaaaattggtgtaaaacatctttctctctcctccctgttaaaggcgcgaaagaacgcatatatacatacaaacatacatacaaatattgagacaaaacaccaacggtgatcaacggtgaccaacggaacataaaaacagggcacgatgatagcatagaggggaaaaaatagaattaaagctcggaatgatagttcttgccgatctgatcaacggttgacaatgtaaacatgaggtcgaatcagatacgatcgtccacatttgtaagcggatagacgagatgaacgaaactgaccgtctctctgatatcctcaacgtacgcaccaggattgtcgacagcggcaaaatgacctcctcgagcatgtactttgtagttgacaagtttgcacgaagacgccacccacgatcgagggtattgactacgacgatcaatcagaatgatgaaccccaaagaaaagactctctcccgtcagtatccgaaagttctggtcgtcatcgatattctctcggtcaaggtactaacgtgatttcagctgggaagatagaaaggcctataggccttttcttgccgactgcaacagccattggagatagagtgtactctttataaggtctaaatcgagatacaaaattagaagtccatgggttaagtcttcaactggtttccttaacgaatattatgcaaaaacatgagataaggcttacaagaaagaggtgtggatcgaaccggtcagaaagtagagggcagtaacggtgacgatatggtttggagtgacttgagagggggcacttggagctctaggctagattcgcatgttttgattgatgtaagttgttctccaagatacaatcccaccatgcagaattgaaagagaattgatgataacaaaactgcgctgacgtacatccgaccagccatgatatttctcgccaatccaagaaaggattccgaccggactatcgaatagcgcagcccccagtgtcatcggctttgagccttgaattttttgatatcccaatccttctttccagaatttatcggtccgctctagtccgttgatttctgcctcagtataaaccaaagactgaagccatcgggcgactcccttgggaacgaacggtatctttcctagaaggattgggagagaatagattggattcaagatagggaccgaagccttgatcattgtaaagtgcgcaacgacagcgaactcagagtagtcgtgcagaatttgagctgtaatccagctcccctttagaaaccagcacagaagtacaagcctgttgaatattccgagcagaggatacggatataaagaaccagacagaatcacatacccaatccccagctccgcaggtatatgtttctattaagattggacccgactgattagctcctatgcatttcacaagcacgattttcacttactgtagccaagaacgttgaccatcaacgaattatacactcgcgcggtgtcgaccacggtccatcctttccgttgcggaccagaggagaatgtgtaacccggcatggaaggaatgaccacgtggaacctgatgaaaaggtgattgggatttgtacgcagcaccaagaagatcagccgcgacagatctatcgtagctcttcagagcatgagctaagattaaaaagagaaaacttcgtacgcaggctgtccagcctttgtagggtcaacgagctcatcaataacctcccaaaactccaaaaacgatgaaggccatccatgagacaggattaatgggattgcatccggttgtttggatttgatgtgcacaaaatgaagcgaaatttcttcgatatcgacccgaaagtgaggatatcttataccggtcgttattgggagttgataagtagaattgttgttatcatcatcatcgtcttcgtctgaccagttgtggtgtaaaagaacgtattccagacccacttgttaattcttttttcggtctcttcccagctccactcgttggcccagtacttatgtagctcagtgagccagtcgagatcaataccatagtcccaggacgcgcctggcacgatcggtgctgttggcagcctggtgtccctgattttagccatcattcggtcaacatcctgctgagcaaaagatacctgaaagggggtaggaatgttcgcagacgtcatgtcgggtcgtagctatgaaggtagatgttgatcgtcagcgcaagaaagctatgatcagtcatcaacgtctttgtgcttttaaacgcgttgatggacatcacatggggcgaaggacatcgacgtcactgctcggtgtggttacgggagcttaccttagcaactgtaaccctagtcacaagttgagttattggcaaggtctccctctttagtttgatctctctttcaatctcgtctaagacctctactccctctctaactctctctcacgaccctcatctagtcttcttacacttcgctcctgtccttattttccttccatcatggacgtggatccaccacttcctgatcaaacgcaaatcgctcaagagcctgctcttcaatcaacaatagaagagccttccgagttggaaatcctgaaggcggaacaactacggaaagaagtcgaacaagaacaagccgtcagtgatgctctagccgaggtcgccgaattaaaagcaaagcttgaggctgagaagaagaagggaggagaggtcctagctgataaacaaggactcggttagtatcagcgtttctttcttgccatatgacacaaagagaacgtgcgatgcttcttcctttagttgaatgatcaaagcagaaaagtgttgatatgaaggttgagaggacatcgtggcaactattgttgaaggcgatactttctagtactgccctgtggccacaagctgattgtttctttcattgaacgacgctggtttcatggtttgtagaacaatctcttcaacatctccagcaatctcactcttcccttcaacaaagcctatcgtctgaaacgtctaaagctacgcaaattcaaaccgaactttctaatgctcaaaatcaaaataaatctcttctatccacgatcgaatcgctgcaagtcgagagagataccatcaagactgaggttctcgccgctcggcaaaaggtgacagggtgggaacgacgtgttggagaagtagagggtgaattggaggtcagaaggattgaaggacggaaccataaggttagtctcatcttttctctctgtgtccttgtacatcctacccttatatatgttaaacatcaacggaacttcaaaaaaaataaaatcatgcgcaatatagttcaaaatcgaggctctagagctcaacgtcgagttggccaacaaggacaatatgtcattgtctgattcgttgactcgcctaacatcagaatttgccaagtatcgatcaacatctgtacgtatactttttctcctagttatgcgtagctcatcagaaactgaagtctcctccatgaatctcagcacgctcaaaatcaaaaccaggctctggagatccaatctctccagcaatcactatctaccgctcaaatctcactcaagcaaattgagaactcctctgctgctctccaaacccgattaaccacttctctatccatcaactctcaactccgaactactgtggccgagatcaagtcaaactttaaacaggagatcaccgctcaaaccagaatgttggaaagtgctgagcgccgatcagatgaaggtcgtcgtagattggaagaagtcgagcgagaatgggaagaagatcttgagagaaggtcagaaacggagaaaagggtcgagaaggagaaagaactgtgggctgctcagcggctggagttagaaagcaaagtgtccgaacttcgtgatacaatcgagcgacttgtcgaggcatccggaggcaaggatgatggagacaggaccggagggttatcaggagcatctcttgatggagatggagccatgggaatgatgtcacccacagcctcgctagctaattctttgatgagaaagaagggacagagtgtgaccgacttgtatgtggaaaatgttcgggttaaaaataacctggtcaagcaggaggccgaaacaagaagactggaggattgcttgcaggaggtcttgagagacattcaagaacgagtgagtgaccctaattcaacgttttgtctagtcaagctatattgaagagtccagccaagatcgcctaatacctctccacctgtcacttcgacaaattcaggcccctcttctgaaagagcaacgccaagaataccatcgactagtcaagaccgcaaacgaactcgccagccagttatccgttgtgacttccgagagggattctcaaacacaagttattcttgacctgacttccaaagccaagcagatgtcgtctagcatcaccgatctcgaatcgcacatttcagatctctcccgtcaaatcatcgcactctctcgagaaatcgccgtccgagacgatcctgctatggtcaactggcaggatttcccggtcgaaactgagagtggcgaggaaggagacgacatggagagtatcatctcccgtaacttgattatcttccgttccatccccgaacttcaagcgcaaaaccaaaaacttatcaagatcgttcgcgagttgggtaaaaagatggaggccgccgaggctgctgctgcgtcgtcatcggcatctttcgtcgaggatggactagcagagggttcaaagatagacgtcgatactcttcaagcgattgaagaagccaacttgttgatccaatcgctccaacaaaaacttctcgaaaaggacgtccagatggaaaagttcatccgagagagagatcttttctcgaggatgctttcccaagctggtgtcagcttaccttctggatcagcgctcgatgaagctgttgccggtggagctggaggggcaggaggtctgttggatgtcgtcaaggccaatttggagagctacagaaaggagctcggtttggatgctgatcggctgagggaggaactggcaacagccagaaaagaacttggaactattagtggaagtctggccaggttggaggccgaacgagactttttgagtggtgagcgtatcttcatataggtattaaaatcagttacttcctcgagatgttcaaccatatcatgcatgttataatgccttgtttatcctatgacagagcgaatcgtaggtctggacgagtccaatcgccttcagagggtacagtttgagggtatgtcatctcagaaccaaaccctcaagacagaactcgctcgggtcaacatggaactccgatcggtatgcaattttttccccctctatttgatgatggtgcttgcctctatatggagattcttgttcttcactaactcaaggggaaacatctgtcttggcttctcttctaaatcgtaataataggctgaggataagaggatacaagccgagggagttgccgaacgaggtaggacggatgctgctaaccttcgagctgagaaggaactatggaaggttcgtgtctttgtctgaatgaaaatcaatcctttgttgatctcgttctaatctgcttcgtgaacgtaccttgttctctctttctcgccacggagtagacgattgagagtcgactccaagcggatcttgccaatttggctagagagagagcatcccttcagtcacttactcaaaaccttcagtcagtggaagccgagtcggctaaggtgctttctgaggccaaggctcggtctgcagctgctatcactgctctagagacagaaaggttcgtatattcttgtgtttttccttcgtttcttcagaaccgtcgtttttggcctaatttattgtcgttgaaatgttctcaaccaggtcgaaactacgaacggagatctcaaaactcaaagaggagaaagtgacagagttgtcgtccctcacttcagagagggactcactcaagactgctatcgagacgttaacagccgagctcgaggccgccaaagtgagacatcgttctctcctttgtagatatcggtaaattcgcactaacacgtataatggacttttttttcctcgatcaaattgaagaatgcgacagcttccgagaacgagagtcgtgagaccactctccgaaaagcatttgatgaagagaaggaaaaatacgtagtgttcgaacgaaaacgaagcgaaaggatcttccgtgataatgtaagtctctttcaattgtattctaacttcatcagtattcctcatgagactgactagtgtattgcaacaaaaattatagaaagcattgttaaaagatcggaaagaatttgaccaaagcaaggcgacgtacgaagctgagattgcccagctcaagacgcagttatctgaggttgaacaaaagctttccaccgctacatctgctgctcctcagccggcttcggaagaattgattgctgccgccgtagcggctaaggaggctgagcttcagacagcccattcagaagctctggaggcaaaagagaaagagattcaatcagctaaagaagctgctgccgctgctagtgcttctcaaccctcggctgtgttgtctgaagccgacgagaagtttgtgagtatcccttctttcgtttgtctcacaaaatgaccgcctgattgactcaaagaatggacattggtcatcacagacggctctcacctcggagcgagacgctttggtggctcagctggcatctgaaaagaaagcttacgaagaagaaaaggcgcaaatcattcaagccgaaagaaaacgagttcagaacgtgcataccgataacgtttgtcctattctcttcttttggataggctgtgagacgttcttcggaattatgagctgattcgctttatttctcggtctaggtcaacttccgaagacgtctggccgaaaatgcgacgaaggagaaaacgctgactgataagatcaccgagctcgaggccaaattatctgaagccgagaaagctgtggagtcagctccccaaccttccgctggcggtgagtcctccaccggtgaggtaacgacggcaatcggtcctccttcggagaaggtcatcaaatcagctgtagacactgctgtgtcggttaaggaggccgaacttcaagctgctcacgctgaggcacttgctgctcgagaaagggaacttaaggccgagtcagaaagaaaggtggctgaggctgtcaaggccgctcaagaagctgccgctgccgctgccactccggcttcaacggcggctgagaccgaagcggcaatcaagacggcggtttctgctcgagaagccgagctgactgctgctcatgaggaagccttgaagactatctctgcttccacttccggccctgaatccgctgtgtcatcagcggacgtacagactaagatcgacgaggcggtcgccgccgctttggctcgagcggcagatgagcaagttatgaagaccaaccttcagaagacgactatccaacgtgaacgaaagaacaggatcaaggcagagacagagctgaatacactccgatcagaactcgaggctcttcggacttccactggaacggttgcagtcgattcttcagaagctacggctactcctagtgcagctccaacagcaacggctgctagtccggcatcgaaacctgggctgactcggccgtcgaaaccccgggtgagctcaggttcttcatcgacaactacggctgtcgagagtgggccggctggtagaacacgggcggcggctgcgacggggggtgcggctttaggctctgcaactgcgtctggagcaagtgctgccactgaggcggctgtggcatcaccggcgattaaaggcgcggccggcggaccatccatcagaggtgcagccgctgctggacgaggtggggcctcaaccaggggtgctagaggtggacgggcgccgacgacattattcgcaggtgcactgggtaaagcccaggcaagtggaacgggcacaaaacgagctcgaccggaagatgatgcggcggcaactggttctgggctggggaacaccctattcgaccggttgaatgagtcacaatcggccggcagccctgctgcaggcaccggcgcaagtggctccggaccgaagcctcgccagcagttgatcaagcgaaccaagccgaacaatcctggcgcgcctggaggagcgggagcgggaggagcagcaggtgatgcatcgggtggacagaatcagtagtgtgtgtgtatgtgtgtagtgtagttgggttgtcccatgtgcttcttcttatcatcatcatttctttaaaatctctacattgaatgtttaccggaacgggctttgatgatactacggaccacgttgtgtaaccagttcgattgagattacgattagatagccgatccgtcgatcagatctcgatctagagcgacatctggctcgatcggtccttgccgaaaatcagggcaccgatcagggcagaggaacgccgaggccgaacgagacagacacaccatcatcatcagccatgtcttttttgtgatcgtttttacatactacccgtcgattctaaccttctttcttcttctcttgccatctttgcattctctatctcgtgtaacatcgatccgattcttgccacctactttctccatatgttcatcttggtcttgctcacaggtgctttaggcctggctgctttctcatgggcatccatagcgttcttcagtctttacctcgctccgaggcgatcttcactgtataaccttcagggtaagaattgagctctggaatcatgcttgtgtaaatcctataatctcattcatcctattcctcttcttcatcctctcttcaggcccgaatcataccaactactttacaggcaattttttagacatcctctcgtgagttttcatcattggctcagtcgtccaatcttaacgatcatcgctaacgacctttcggacgcgttcttctttctatgtgaaatctgatctttggtttgttacgagagcacagagctcgtacaggtgaagagcatgcgaagtacagagaaaaatacggaagcaccctccggtttgctgggatcgctggagcacccgtcttgaactcgaccgatccgaaagtcttcaaccagtttgtccatccgaaccctcatcctcctctgctgatcaattcaactgtagttaacgcactttgaatggacagtgtgatgaaagaagcctacgactatccgaaacctggtatggccgctcgagtgctcagaattgctaccggagatggtgttgttacggcggaaggtgcttttcaagttctcttatatcacatctaatccactcggcgcgattgaactcaacatttctgacgagcctgtcaccttgttttcacttcatggtctcggtgcatcttgtctcatctcataggtgaagctcataagcgacatcgaaggatcatgatcccctctctgtccgctcaggccgttaagtcgatggtcccaattttcttagaaaaaggtatggaacttgtcgacaagatgatggaggatgcggctgagaaggatatggccgtgggagagtcggccggtgaaaagaaggcaaccagactcgagaccgaaggagtcgatgtaaaggattgggtcgtgagtacccgcctattccttcaccttgatggacgaagcatatcaaggaaaggttcattgactgacaaacactatcttaccagggtcgagctactctggacgtcatggctcttgcaggtcagtctactctctcttataaatgctccacatatgtatgcatgtactgacatgctcttcctatattcgatacgacgtcatatgtccaggatttgactataagagcgactcgctccagaacaagaccaatgagctctatgtcgcttttgtcggacttaccgatgggtttgctcctaccttggactcgttcaaggctatcatgtgggattttgtaccttacttccgaactatggtatgtctgccattctttgatatccaaagattatggataggttacttgctaaaatttcacctatcgtgaacagaaacggagacatgagatacctttgactcaaggattagcagtttcccgacgagttgggatcgtaagtgccagatcaagcctctctgaatattcttggtcatcatcttaacctcctaggctcattcatccatggtgcgcaataggagcttatggagcaaaagaagcaggccgtgcttggctcagcttccgatcaggctgttgataaaaaggatgttcaaggtcgggatatcctaagtctcctaggttagtaacgtttttaaacgtatatacagagcggcgacattctttccctgacaactgtcaacatgctcgttactagtgagagcaaacatcgccgccaacctgcctgaatctcaaaagctgtccgatgaggaggtactcgctcagatcagtaacctgttatttgctggatatgagtgtgtatcctttcccctctctatccttagctgattaaaagcactaatagaggtctttatgtttcctgtttgatcagaacttcttcgacagtcttgacatggatgtttcaccgactctcagaagacaaagccgttcaggataaacttcgagaagaaatttgtcagatcgacacggatatgcctacgctgtgaggatgtttttgatgctaaattacttcttcttgcaaatgactaaaacggccttccattcttgatccattttagagacgaacttaatgcgttgccttatctcgaagcggttggttctcgattcttggtcttgtcttccaaatacaatacggattattgctcatctgatttgcgtctacgggctgtggaatttaactagtttgttaaggagtctcttcgtctagaccctcctagtccgtatgctaaccgtgaatgcttaaaggatgaagacgtatgttggcttcatcacgcataattttcatttcatattcctttgtacatacgcatacaggctgaccgagctcaaattccggcttcctcttctgtgcttctttttctggcctttcttatcttcattcttcaaccaaaatttgtcacagttcatcccacttgccgagcctgtcattggtcgagatgggtcggtcatcaacgaggtccggatcacgaaaggaacgatggtcatgcttcgtaagttttcctttatttcatctcgtccatgaaatagtttctgatagacgcggaccaattcagcgttgttcaacatcaatcgttcaaagttcatttatggagaagatgcagaagaattcaggtacaattcgttttcttttaaaagccaatcggtttcgtatcgtaattgaccgggctctcttttaatttctcgaaagaccggagaggtggcttgaggacgtaacagactcgctcaacagtattgaagcaccctatggacaccaggcgagctgtatgttttattgattttatctttgtgaattttgcaaaacgttgaacttcgcgcttcccttgttgttgaaatcccagttatctctggacccagagcttgcttgtaagtttcttctcatctggcgccttagcagtatccgatcagccatctagttctttgtacgattgtttctgactctctcgactttcgcagtggttggcgatttgctgtcgccgagatgaaggccttcttgtttgtcactctccgtcgggtccagttcgagcccatcatctctcatccagagtacgagcacatcaccttgatcatttcccgtcctcgaatcgttggtagagagaaggaggggtaccagatgcgtttgcaggtcaagccggtcgaatgagttgattcttcatatgttaagagaagttctatatctgagaatgtgtgactaggacaatgccttctttgtatcgatttgtttctcatacccgggcaggcgctatgacttctacgtcgtctatcgtcgctctggactctcttcttaccctatatattattccatccgtctgtatatttgtctatcacgacgtctgtgtcgtcaactcaatattcagcctcttcatgcttctgtgtctccatagatgtgatcttcatgtttgtcgactgcagaggatcgagatcatcaaaaaagcaagtgatcgggcctgaccgaagtttctccacaatccggggaactccatccagacaactttatcttcctttctctctcaccatgtcgatctaatcgacctcactttcctctctaagaaagaagatattagaccttctcaaagaataaacacggatgtcggacactcctgttcggatacttgtcctccacttgttcttactccttcacctctcaatattcatcttaggtcttggtactatcacttggataggagtcgtgtggagcagagatcaggatgagagaggaggtagaccagagcacactactttgcttctatgcagcctgagtgtggggctcgtaggaatctcgttagtccttttcttgattccttcccttgtttcgtatcagaaactgtctctacggaaaatattcgtctggattgaaaagagatgcgatgccaagatgtatacttttttgaggcctactaactcaccatcatttcctgaactttcttcgctcttccttttggtgattgttacatgtcggggcgactaaactccgacagccggttgatagatatctttcgactctcagaatggttgacacttgtgaagatcagagcagaatttgtcatgaccggcttgatgacaatctcttggatcggttcgtctaattttcgatatgtgatgttttcatatcgttgtctggtatataacgagagataaggtaaccgttgcctaacaacttctttgcgactaacgatgaacagcaacaaacggagcgcttaccttgtcatcactttctcaacgacctccttcgccttacctatcctcaccaccttcatccccaccttcacctccactaacgaacaccgaccgattccctaagacgattctctttctctccatcgcttttcaaaccttgttcttcctctcttcgacatgtttgctggcttcaggtctttcggcgcttcatcaggctactcttaaagggctcgatgtcgaatgggttatgtgggactttgacgttgagcgtgcggcaagcgccagagatgttcgttcgctggatgaagagacaggactcttagataatgttgatagggttctaagaggatcgtcgatgagaggtcgcgaagagacatatggagcattaggaactggtcaggatcaatctcacgaaggactactggatggaagagtagaggatgaggtaaagaagtttgggctggaagagcaggatgagaatgggaggaggagagttcgctgggtctggggcttgaccgggttgagtggtggtgtgttgatcggaagctctggttgggccgtcttgggctgggaaggtttcggtcggtcctcaaactgttcttcttcttcttggttattcttctctttctggttttgttgctgatacctttgtcttttgtctattcgtaattaaatgcaatagataaagcagatatatctctctgggttctaagttcgatcacctttttcctctgcttatcgactttgttcctaccctcattctatatctttaaaccgagtttcctccgcccatcgactctccgtactcttctcatcttacacatcattctttatccccttcccacggcattcttcactttacctctttcttcttcctcgtcatcatcgccttcgtccgagcaaggtgatccggacggaccccaatcggaattctcgaagccgatccttccgtcacccgaacaggtccaggcagccgtgagtgctctaccgggatttacgatcgcttgcgcttgggcagttgtcggtctttgcctatggtggcttgttcaagagaccttgctgccccctccgtcggcgtcttcatcacggaacgagggatatgatgatgggggagatgaggagggagacgacacgggtggaggacggagaagacgaaaccaaacccggtatcaaaaccgtcaaacttattacaggtcgggccggtccgacacacacactcaatcacatggacgaacgctctatgacccattggtgacgaccccaccatcgacgtcgccatcaccatcgccattaccgtcaaagtcgacgtcgagtgtatcacccctgaagaagatgacgacaaagacgtctggtggagaaggttggagagcgttcgctttcgagttagaacatgatggtgacgatgatgatgatcatgatgatgataacgacgatgacggagaagagtccttgacctcgttcacgagcgtttagagggttggagtatgaggagacaggacagactacgaccttttctctcagcttgcagtggggttcttcttctttctctttttacgtctttctcagcttggtcttcgttttctttttctttttcttatcttttttttttcttttcttttcgggctattctcgcagaatgttcttgtaattcaacacccagacctcctcccaccctctcttttttccttccttattcactcattttgaatttcttcctctcttctcttatctttttttttttaaatagtattccaccgtccagtccttgatatgatgtataacgtagtacagcgcagcgcagtgtagtctctagtccataatccgtatcatatgttgtgtagtatgtagtgaagtgtgtagtataggaaaacgcagtgtagaaagatgtacacagcgtacgaccgaagaacctcgttgcgctccagaaaatctgcttatcactttgtgatcatcttatcataaccttccatcgaattgtctgttcgttttggtttgtttcgtttcgtttctgactgtgtgatgcggcggaaggtccgcatagatcggaacggtatggacaaaacaagagatcaagcaaacggacggacggacgaatggagcaggagaatgagaagaaaaaaattaagaagaacggtgggaaagagagatttgggcatgattggactttcgtgattcgagagaattaggaggcattcaaacaaaacgaagggtgaaagacaaacaaacgaatgagcgaacaaagaggaaagaagaagggtggtgaagggggggggaaggaaagcaggcaagcagaaccaagtagggcagaaaaaaaggtaggtacgttgatcgaatgtttggagaataaacgagaggttgatctacatcttgacttcgtggataaagatgtcgtcctaatatttttttttcagggggattcagagaaaaaaccgagacgaagagaaaaggcgttcagtcgatttgaaaacaagcgcgtccaaggtcaagggggtttgaccggatggaacgaaacgaaacgaaaaagaaactcacgacgttcgtccaagggacattatcccttcctgcccgacttcgctctgaccagtactcgagctcgcccaattcggtccgtttgggtgcccagaccctctcgttggtgtccgggtcggtctgtgaagagaaccaacggggctgatgagggggcagttcgccggtctctcgtttctgtctcgtcgaccgttgtttcgcttcctgctgctgcttcccgaggttcgcttcgtcatactttgggtgcagcgatgaggaaagagtgtcgagggcgaaaagagaagaaagatcgtcagcacgggcatgtttgcgagggaactcaagtacaggatcatctcgaggtgcttaccttggcaagctcgaaggcccgttgatcggggcgtagacggcaatcggtaggagcgagccatctctccaggccggaaggaatatcattctgcggttaatgaaacaaaggacgaaatagaacccaaacaaacgaaatcagccctgaagtgaactctgggtgggagacgaatcattctcaagcccgagaggataagaaccggacgaaccactgcaacacacagtcataatattcatggaacaacagaatcagcacagacgcacacctcatctacaacatagacaaaaaaaaccctctttggaaacgcccttacaagtgacagcaaaaggcgaaagattgaacggagcagccggcttaacggtgttcttccagagctaaacggtcgcgcaagaaaagaaaaataaattaacaggagacgcaacgagaacaaaaaaaaaagccagacgaaacgtacaagtaggtattctttgggcatgtttgacgagagcacgcttgcgttcgctggcagcttctcatctggcaagagagagccatgtccggctccatgctttcgggctacgagctgagagttccatcctggaaaataagaaagcaaaaggaaaag

SEQ ID NO: 443 - DNA, 4138 bp, Xanthophyllomyces dendrorhous
  misc_feature (1099)..(1108): n is a, c, g, or t
atatatcaccaagtcaatgatgaacttggagaaaaagatcggctgattcaagacaagcaaagagaaagagagaagaaaagaaaaacgaacgaccggcaatttcccagtgagtctggccgcgcgcgtccttgacgacacctttgatctcacaagaatccctggccttccaacctctaggcttgaacgtcaggacacagacctcgccggttcgcttattggtgacctccatatcaccgaaatggtcgatgatcggggagcccatgataaagtttgagacgctggtagtgactttccgccagctgtagtgctcgagcaccatgggcttcgcgtccgagctcatgaacttgtcttctggataaccgggcgctttggcccacccggcgggtatgcaaagctcggcgtgggcgattcccgtcggcctgatctcgaacgaccgaccgaggaacttgtttttcgcgtcgacctcgccgtagtatctccagtggggggagtcagagtaacaggccgagatcgggggatggtgggagacttgttcggaaatgtatctgtactttttgtccggtcggcagtactcgaacgtctcgcctagcatcgggttgaacggcttggcgattcggccctcggtggacgagtaattactcatcgcgaatgctgccacgtacgccagtcgtttcaaagagtccgcctcggcggcggcagcgtcaactgtgtgtgtgtgttcgttgggaaggagaaagtcccccgaggcatacaagtcgtgagaaggaggacaaccaagacaaacaccggacagagagcagaaatcacttacgacactctgaatactccatatcctctgccattcgctccaacatcgaagttggctcgttgctgtagcgaaagacggatcacatcagccatggctctcactattcctaccactatcaccactgctatcgagataaagatcgggaggttgtcgacttacaaaaagacgggaaacctgcgaatggacgacagattttttaaaaaaaataaaaaaagacaccccgagtcagtcagtcagtcattcgttcatacagtcagctcccggccagacacacacacacacacacacacnnnnnnnnnnacagaagatttgactgacgagatctttgtgaggtcctttccgatactcgacttgaggatcgcccagagtgagatcggcggtctctcgtcactggagatcggcagccggctcctcaaccggttgtacggctcgtactcacccccgtccaacgagatcttgtctctgaggagttctttcgtctgcgttgcttcttccaatcggtcttccaactggggctgggcctgggccgagggttgggtctgaacttgagcgatcgaagacgggatctggagggggagggttccttgttcgattgcgtcgtaaaactcatcctcatcctcgtcctcgtccccatcgtccttggtgtcgtcctgggcaccgatgccatgctgaacggtgaccaggccggttccaaagtctgatacagatacctccggaaggtcgatcttgacgtctggggagctcgggagcgcgaccggagctccagcggtggtggatgtagccggaggtccggaggttggcccttgggcagaagagctcggtgtggtcaggtagttgtctccttggggtcccagtgggatcccgggtgacattaatctagcagctcgtagctctttttgtcttttggtgtgtttgttaaggattaattagagggagaatgggtgcgagaacagaaggggctttgagatgagcaaaggaacaacgaaagaaaaaaaagaaagaaaaaaagaaaaaagacaaaacgtactgcttccggttatgcctaccggcttcggccaactccctctccatctctgcctgctgtcgggcgacgtcctgcatgctttcctcccagagcctctttgcgtctacctctgcctggtatctggccatgagccatcgttctctgacggcgctcatggactggtactcgaccaccaggtcctggagcagcctgagggattgcctgatggaatccttgacggtctgctgcctcgagttgacggagggtgtacggttcaagtgggcgggaccgttgccggggatggcgaccggggcggtgggcgagccggggaagctatagacagacgaactggaggaagagttgacgatgagggaatccaacagttggtcggtgacctcgatgtgcgctctggtggaactggcgaggagctcgaacttgtcctggtacgggattccggggcagtgcagatgggtggacagcttggtggggtctcgcctgaagctgaccgagtctgaaggatcggcctcgtaatcgtcgtcgatcgtgtttgcgtcgtcgtcgtaggagggcgcgatcgagggcgctctgggggtggtcgatcgctggaaggacgtccgggaaggggcaggcatttggaggctgccggacgtgagtgggacgggcgagggttccccagtagtgagcgcgtgtagagaggactgggtgttttgccgacggatggtggtagaaggccgtttagtggatgtggccgactgattgtctagggtgcctccgggtttatagaaatcaatgtgctgtctgaaggcctggggttgagatgaagagaaaggcagagggggttgatggtgaggtcagctctagggttttatatatattttattttattttcctttttctttccccactgtgagagaaagaaagagcgcatagaaaaaggacgaacctgagaccagttggccgcttcctggggatgactcgcacggagggaaaactttgggaacctggcatcatgtccggcactttgaatgtcaaacccggtggaggacgttggctttagctgggcgaacttgagcgagaccgagcctcggcaggccctgttttcttcctcttggttccggtagtctgtgaggcgggagaggggttgatgttagtgtcttggagtttgtatcggagagtgagggagtgggggtaagagaggggatacttgcaagagaggattccgtgctcgatgacgaaccatcgggatttgtaccctctggccacgtttgtccatttcatctggggcggtgtgagaagtggaaacaagttaggctgatcaggacagagaggagagagagagagagaggaaagaaaagaaggagaaggagaagaaggaagaaaaagaaaccaaccaggtaacctctttgggtgatcggtttcccatccggtcggctctggagcaatgctttctggttattggaggctgaacggggagggcaagaaaacaccagaggtggtgagacggaaagcgagtgggagtatggggggtggcgagtgagacggtgagagagcgatggacgtaccttgcttgagaagattgttaatgtcgtcgttgccggcgcttccgtcgtaggcgctcttgcctttgcggtctttgacaaacacgtcggcgccccggtcgagggcgagaaacttgacgagggcggtgtcctttcggcggacggcctcgtgaaggagggacacgcctttgtctctgtcgagcgcgttgaggtcgaggatggcggctctgggggatttgaggagttcgagtaacgaaccggacgggccgggcccgtgttggggggcgttgatgtattgggacagaagggcgaggtactggttctggagggctgtccgggagtctgtgtgtgtgtgtgtgtgagagagagcagcggtgcaagtatagtgagtgagggagggaggagcaatcttggaggcgagatggagggaaagaaagagagagagagagagtaatcttaccgagaatgacctggacgacctcttcggtcgaggcgacgtccatgcaggttctgtcttggtcgtctttgatggtgtcatctatgatgggctgttcgagaaggagttgcactgggggcaaggcatgatttgtcgttgcattgcatggcattgcaaacaagaaagacatcgtatgttagccaagggggggggaacaaacgatgactgaatgaaagaccgactgcgaacggaccgacgtctgcccgaccgagctctgcggccagatggagggcgggtgtgccgatgtggggtttgtttgggttgattgatttgttgtcgagcacgatctctac

SEQ ID NO: 444 - DNA, 450 bp, Xanthophyllomyces dendrorhous
aagaagaagaggaagaagaacgaatgaatggattcagtagaacgcccccgggggtgtaaagaacaaagcacaagagaaccaaagcaaagaacacgactcacaagatgcacacttgatcgccttgctcaacattgccgctccttcatctggggacgagcctggcttggagagatctctgaggaaaggatggatccgttggatctcacccgatctaagtgcctcgagcagttggaattgatagaaagcctctccatctgccactggtttgcctttttttgggggggggaagacagtaagaacacgatggacgacgtttgtcagacactttcaaccacacagccaacgaaaccgagccaagagatggggaggaagcgagggaaaagagggaagccaagggaagccaaggaaactaaacggaccgtctgatgatagcgtgttgaactgtctgac

SEQ ID NO: 445 - DNA, 651 bp, Xanthophyllomyces dendrorhous
gttggagagatgatggtgatgatgagagcagaccaacgggggcgagcggagggaaagaaaacggaatctttccatctcggcttaatctttagcagcgcgggtgatgatgggatgatggccgtcgctgttgtcatcgttgctgccatcgtcggtaaggcaacaccatcagatggggtatcaccagatacccctcctgctggtctacatagcccacctccctttggatagagagcgtcgagggcaagaaggacaaacaacagagcgcgctcaccgtgtggccgttcccgagatgattgtgtgtgtggatgctctcgatggcttttcttgtgttcttgtgttcttgtgttcttgtgggtgatgctgtacttgccatcgctgctgtcactgctgctgctgctgccgccatgctctgttgatctatgttataaaacgcgcttgcatcccatcccccacagatgatgtgcagcacacgctctctctctctctgctctatcttgtgcgcactctctgttctctcgtgcttgactatcttgcccttgccatcgccttcgccagcatgctatccacgctctacctacccttcgtgtcatctgtcgcccctcccgatggtctctacatgctagccccccctccttgccacccccccccggg

SEQ ID NO: 446 - DNA, 1212 bp, Xanthophyllomyces dendrorhous
ctctaggcctcaatctggcagcgagactggtgagagcatcacccatgttccctacagagctcacgggagcaaacgatacgttcatcgtgagcagccatcatcgggatccgctcacaaaggaagagtacatccttagatgtgcgatctctgtgaccttggtgctcaccggcggtgtgtttggtgagtgtttctctgttgttgtcgttgcctttgtcgttgcttccccccccctcgctcttccatccaacgttcgtgctcttcccccggggggaagaaacatcttaggatcattttttcttccttctcttcatttttttctctctctctttccttctctgtttgctctcagtctcgtccccgttcctccccttcgtgttctcatggtcgattgtgagcaatgacgatagctaacgcgcttgcgcttgggatccactctccgatggactccaaccaccatgctgccctccagccggactcacccttggtctcatgggactcgatccccttcatctccgagtgctggagaacagctcgagtgatccccaggagaggaagaacgcggccaaagtactcaagctgctcaacaaaggaagacactgggtgttgaccatgctcttgctcggtaacgtcgtacgtatccttctgctctctttgaccttgcccttagccttgtgctcactctttcgttctgtttctctctctcacacactcacacactcacacactcactcagatcgtcaacgagtcgttgcccatcttcttggactctatccttggcggaggaatcgccgccgtcatcgcctccaccgctctcatcgtcatctttggagaaatcatcccccagtccctcggcgtcagatacggtctctccatcggcgcattctccgctcccttcgtccttgcttgcatgtatctcttttcccccatcgcctgggtaggtccctttgccttgtgcttgtgcttgtgcttgtgcttgtgcttgctcttgctcttgtccttggactctgccgtatctgcaaccaaagcgtatccctctgtgtaccctcgctcactctctttctttcctttccttcacctctcttctctttctttccctttcccctagcccatcgcgaagctcttggacttttgcctgggagagaacgaagagcacgttagtacatcttcaactttatcaatccctccgctccgcacacagctcatccaatccct

SEQ ID NO: 447 - DNA, 4299 bp, Xanthophyllomyces dendrorhous
ccttccccctctgcagacctacaaaaaggcagagctcaaatcattcctccagttccacaagaccggagaagagcctctccgggatgacgaaatcaccattctcaacggagtctgttagtctccagtccttgtttcgaaccaaacgtctcttcttctcacccaatcgcttcctctcctctttccagtgagcttgaactcgacccaggtccaagacagtcagtcatccatcctatcttttgttcattctccttgtctcgatcactaacacatctctcagaacagtcatgacaccaatcaaagacgtcatgaccttgtcgtccgatgtccttctcgaccatgcaaagatcgacgagatcatgcaagttccttttcttcattcgcccctcgccctttctcttgctcctccctttcccatgctgaccgtcatcttactcacccaacagcctgagtgggttctctcgaatccccatccacgagcctggaagacccagggcgttcatcggtatgcttctcgtcaaaaaggtcagtccagatgtgtctctaggtcgaccttctccttgtccacggctgcttactcaccctcctgcccgtcccaactcacccctcttccacagctcctgcactacaacccggaaaacccgcaaaagattgccgccctcccgttgtcgaccctgccagaagcaacgcccaccatcaactgtttccaggccctcgactacttccagaccggaagagcccacctgttgctcatcagttctaccccaggcaaggaaggtggcgccatgggtctcatctcgtatgtctccctatgtcctgcctctcctcttcctttgtctcactttcctcattcccttctcctttcttctctttttcctcctctctctctcgccccgttctagattggaagatctgatcgaggaaatcatcggtgaagaaatcgtcgacgaaacgtaagccttaacgtttccattctctttcttctagttcttccctttccgtcaaacaccatattcacgcacccgacctattcgttccctcccttgcccagtgaccgttaccaggacaaccgatgcaaaaaagcggctcggcgaacgtccagcgccgagatcatgcaagggtatcgtccttgtcgtcttttcttttttcattctctcgtaactccaacggacttctcctccatctctgacccctcttttcgtctttccgaatcatccagaatcatcgagcgtgaacgaaaaaagttcaatttgaaccctaacggcgttaacgttcgtgtccatctctttcttcacattctcccctctctctctcttctttctggatggcaatgctgaccggcccgatcggctgatatcttactcatagggtctgagccgggcaaactcgatcgccatcattgaggagggcgaccctaacgaacagaccagtctgttggccaccgtgtctggtcctcaatgtaagcgtcctcttctttgtcaaacaccggtcgtcttggaatgctaaccggccgtcgttcgatcgggtagatggttcctcagtactcagctcgtcaccgaagtgataaggtaagggaaaccaggctctccaaagtgatatattttcatttaatataaaaaggaaggaaaagaactcgttctcacaccgacagctcaaacctgtccccttctctcagcccatatatcgataccattacccatcatccacaatcttcctccttctttttctattattatttaaaattattattcatccatatctgccccttgcatctcttccatcgtttcttttcgtcgctttagtcctctacgctcttgcttctcttcttgaattctgctatcggtcttctcccttcctcctccttctctctttcttgcgatccagcctcccttttcatttcattccatctttacttcatcccaatgtagcctacggccctcccgctctttgtcgtctttcggtatgtctgtgtgcgcgtgttcgttcgtgattgagagccgtctgatatcatgtcatccatgtttcgatcgagagagagagagagagatttctttctctcgcgggattttatcatccaccgttctacccatcatctataaacgaatcctgaggcacacagtgcatatctcctgaaagacgaaccctatcgatctgatcctgcgccctgcgctgtttcccctttctccaaccgacggactgtttcctgtgtgtaccgagcggggcgaagaagaagaagagaaggagcgtaagcgagaaaagaaaggggaaatggacggaaacggaaagaaaagaaaagaaaagaaaagacgaacctctagctcaaacagatatgcatcctgacaatcccccaccagacctctcaccgctcctgccagcctgtacagatactctctgtttggtccagaaggaccttgacagctcaagatcctcttggctagaaagtccagtggttcggatccaacttttgagaccaaactaatcgggtcagaagaacagcaagggatggggttcggattcgaggtagagcgagaaagaaaagggctacataccgaatgcctcgttgtcaacctttccgacatatatagttgcctgtgtttccatcaagaccattagaaaggaggcccagttcaaatccttaccgtctttcctccctcccttgtcaagaaaaaacaaacgaggacggactgacatcgggtacaatcacggtctccactccatccacaaggtcatagatggcgacctgctcgacggtgtatccgttctgttcgcgcgcacacatacaaatacattcagcgttttcatagtgtaaagcgctccgataaaaacacaccgtccgtttggtccttaccttttctctgtgatctagatcagctttgactttggattccatcgagccgtcgatctcccatccgactgtcgtcgaccgtaggacgaggccatctcgtgtttgattcagcttttgttttcctccaagaaacagaagaaagagaaagagaaagcaaaagaaagagagaaaaaaaaggcaaagaaaaagaagaaccacttcacgtacctccccagaccttggcatcttcttcagacgtccgttcaccagtgatcccctcccaatcctgcgcgctcaccagcgtgacgactctgcctggcctatccggcacccctcgatggtcgtttgacgactggccgattcaaacatcgacatacacacccacaacgacatgaaagagtgaattcggtttcagtctctcgaagcgtttcggttttgcctcgtctgctttcctttgcaccgcgcgtcggactgacctgggcgaaccggcggatgaaccctttgacgtagccttgtttcttcccgaccgtatgcggcgggggtctgttttgtaggtcgaaacggacgaacatcaccgccatgatgatcaatcgaaatatcggagggacagaacgctcgtggtcagcttgattccgcccggttcatattagcccccaagtcaaaggcggcatggctcgatcaacccttggggtcgtcgtcatcagtagtagtagcagcagtggctttggctcttggagtttctctttcaacacacaaagtcatctctccacgtacttccatacaagcgatccgtatccaaagaagaccagtgtcatgagtagggaagagtgaggaatgtcggatggacgtttgatgagatcgacaaaatcgtgtttctagcgcgtgtttttttttctttttttttttcttctttttcttaattattcctccctccgcccccatcatcgtcatcaccatcatcatcatcatcggcaacagcagcactatgtctgctaggtttctttcctctaggatacctatccatctatctcgccgtgccgcctcgttgcctagactaggagcgccaaccaagagactatgcggctatgggtactcctcgatggtcaactcaaatacaaccgttcgcccatatccggaagaatcgcccgaaccttcaagtccttataaacctcttcgtattcactacggttcgtgctccctccaaagatccgcatcctgtcagcagcatcagaaagaagatacgctcccgtatgacttttgactgacggctttgcgttcgatcggatgactgggaaacacctgaacactcttaggtcccctgccgaaacgaagccatgagattcacgagatcacctccggactcgtcggccagacggtcactcttgaaggctggctgacgacctctcggtaagagacggactcaaagaactcgttcctgtcatcctccgatcccacggacgacccttttgctgatcacc

SEQ ID NO: 448 - DNA, 67526 bp, Xanthophyllomyces dendrorhous
aactctactttcacaccctctcagacccccagacgtcctcatccgttcagctggtccatttcggaaaggtcgctggggcggagctgatggaggtccctgtggagagcgtgctctggatccagggcgaggtcaaagagaagaacggaggtggggtcgaggtggatatcaagagctggaagctgttgaacagtgcggagagagagctacctttcaggccgaacggcagttacaacctggtacgtcttctttccttcctcttatctgtatccgcctttgcctttgctttgtttagtcgagatggtgaaaccgagtcggatgtaatctgattcataccactggaacgatagccctcggaggactttcgatccgagtacagatatcttgatctgagaaggcaggcgcttgctgaaaacatccgaaagcgaagtcggatagcccatgtcgttcgaacatacttccatgaacagagtgtgtcctttgtgtcctttctcttcatctttatttccctctttcatttctttttcaaaaatcacaagaagcgccattttcctgaagactttgtcgttcatcagaattcatggaggtcgaaactccgatcctactccaatcatctccagaaggcgctcgtgaattcctcgttcccacccgtctttcctcttctcgcatctcgtccgacacaatccccgagccgctcttctacgcgctccctcaatcaccccaacaaccgaaacaactgttgatctcgtccggtctgacctcccggtactttcagatcgccaaatgtttccgagacgaagacggccggaaggaccgacagcccgagttcacccagatcgatctcgagatgggcttcgtctctggtgcgccccggccggacgtcggccaggccgactggaagatcggcggaaacgaggtccgcagggtggtcgaaggcctgatcggtcggatctggcacgacatcgagggggtcgacgtgctgggtccgaaaggagagttcagcgtgatgacctaccgggaggcgatgactcggttcgggacggacaagccggacatccggttcgcagtcgaagtcgtttccggattagatttccttccagacccggcgcgggagaaactcgtcgagaacgaggagacggtcgatttgttggtccgtcctaacgattgggccggggtcggtgaggacaccctcggtatagaccgacaggtggaaaagttcacgatcggacagggttcagcacagggtatactagagggtgtagacttgagtacagaaggcaagctggctacacaattagggatcgagcagggtggcgtcctttgggccgctagaagaaaggcagagcctgaggtaatgttctttcctcattttgaatcagaaatccgatcaccgtccttttctgacgatttgtcggcttctctctctttcactcagggtggatggacggcacttggcagactccggttggctttgatgaatgaggccgttcaaaaaggtttgttctggctccttccttgtctgtatcgtttcgtccactgcagctcacactcatttaatctatcttgtaacctttcctcatcaattagaattgtttacccttcctactgctcctcacttcctctgggtcgtcgagttccctctgttcacgctagccgatcctgacaaagacttccaagcgcacggccggtggagcgcaacacatcatcccttcactgctcctgtgtgggaggacgtcgaagcgctcaaacaaggtcaggtagaaaaagtcagaggtcaacattacgatctcgttcttaacggtcaggaaatcggcggtggctcggtcagaattcacgaggctagattacaagagtgggtgatgagagaggttctcaaggtaatgtcttctcacctctttgctcttgtgcttgatccagaagcaacggaaataggtatgagaatgaaaaaaaagaaaaaaagaaagcagcagactgaaaaaggattgacttaaatcacaatcagcttaccgacgacgaggtcggccggttctctcatctgttgaaagcactttcgttcggagcgccccctcacggaggactcgcgctcggtaagaaaccatccgtttcctcttccttttcctgctcctcctctttcgccttctgtctctgctctgcacacatgaaaattctaaccttcagattgctcttatcgttggaaaaaaactttaacttcaggattcgaccgattggtgtcgatattgtgcgacgcatcgacgatccgggatgtgattgccttccccaaatctcccgctggagcggatccggtcttcagagctccaaacgcagtgccaagtgaatctcttagggagtatgggttgggagctaccaaggccgggtgatcggatgagcatgtgtggacgtgatgatacaacatatatagatgaatacagagctgtatgtctctttttcggttctaaggatctgaagtgatttaaaagaaacatgcgaaagaaatgagcggagaaggactttgtcgattgctcgcttgtatatgagttggaacgtctttgactaccacagaatgaatcgtcaaaacatgcttgttagtagagggcttttttgtgctatataacgaaaacaacagtatcgaaagttcatttacttttataagtatctctggcgttcaacgttcctctacgttcactccacgttctcgtccaaaaattggcgtatcatattctcgacatcgctcttgacgtctttcggtactgatgctgaaaggaacacataggaatgaaacaaaagtgagcccatatagaccaagacaagcgtagccggggaaagatggatgaatgacatacacgaagcggtgggtgtgattgactggagaagagcttctaggttgagggtctccatcgacctagcttgctctgtatatccgaaagaggtcagtgttggcgatggagttcggtactgatgtgagcagagattcaacttaaacgacgatacgagggatccatgctgccttacctcgggcatctgctctgactctggatgcaacaattgttcgaaagttaatgtctggttggtcatatatatagcatgttaacaatcacgaatgcttacttgtcctcccagcctgaatcttctaatctaatctttagtgtgcgtagaattcttgaatagatatcaccataaggagttcgtgtagaagtcagctggggtttgttaagataatgagggagtaccaacgattgacacgttagattcacctattccattctccagattcgatcattcgcttcttgatggcctgtgcgatgtcatcctgatcgtcattggcagacattctattctatctgatactgaaaagagacctttgaacagatgttgtaaggtgatgatgacgatgctgcagatgatgatgatgatgatggtaagtgagcaagagtccaaaagactaggaatatattagcttttctgtagttttttttgtaacctttcatcctactcaaactcactcaacatccaaatccactatcatatcatcaaccaccagtttgaaacacgaacataacattctcagccatcatgacctccgatctcacacctagaccgaacatcatcgtaaccggaacgcccggtacaggcaagacgactttctgtcaaatgctcactgagatcttacctccaggtttcaagcacgtcaatatcggagacgtcgtcaagaaggagggcgctcatactggatatgatgaggagtgggatacctatgatatcgatgaggataaggtgagctttcttggtctcaagttttctcatacatagaggtatatattaaattgtgcggttcgttttggccggtttgctgtgtctgattatccggatggacaaagctactggacgctctagatccaatgttccctgcatacgaagacgaggaggactcggaagcttacctttcgaaaggaggcatcatcctcgatcatcacacttgcgatatgtttcctgaacggtgggccgacttagtacttgtgctccgatgtgacaacaaaatcttatgggagagactcgagtcccggttcgtctcgtcgtttataatccattttgttcgttctcagagaaggaattgcttggtctgatcaactcgcgcactgggctcttctcttttcctcgtatttaacagtggctactcattgatgaagattcaggagaacaacgaagcaggtgggtgtccttcttacggctttctatcttgtcgtaagccttgcgttctgagaactgtcactgaccctctctatcatcatatacttcactctttttgtcttgtagagatcatgcagaccgtattggacgaagctagggaggcttacccggcagagattatcgttgaattgccaagtaacgaacaagcggatatggagagaggtctcgaccgggtaaaggaatgggtcgagttgtggaccaaacagcgactggaaagcttagaaaattaatgtcgatttagactctatagcccaagttctgttcttattcttttcacgagttcttcgaacaatacacacgaccgatcgtcttgcctatacaaacttgccatgctgacgagcgatgagaacaacgaatggcctatagatgggcaaacgacatgcatcggtatcaaacgactgcgtgtaaaccggctacctcccttttgactgtataaaatatatctcccgccccaccttcgacctctatctttcccttcgccaactttttgacagtgaccacttcgtccgactcttcgctctgatccacatccaccgtcccacagactaacattccttctcctacaaactcggtagcaatccccaatgtctgcagtcgaagcttcagcgccgtgagcttcatgtctccgatatagagtgatgcagggacaggtggaagagtgagcgcgagcgcggaggaagtcgcggtggatactttcgacgacggaacagccagtacaggttcgagcaccggaatattagagtttgatgggaaggtgtatcgtccaaagatctgggcgacttcgaaatcctcgaactaaaagaaaaacggacgtattcaaaacgcgcattcacgacagaacaagatatttgagaacggtgtattgagcagttggtagtacactcacttttgagaattttagactggccatcaaatggtctcccagactaagcgggtaggtatgcatgttctctccgatttggagtgcctgtccgtctgctggaccatcgatctcgcttgtcatagaaggcacagccttgcaagaagagatcaactcttcggacgcagagtcggtaccatgtactagtatctagattgagaggaatgtgaaaaaacaggaatagaggatcaacggccggttaaagagcagggctccaatacttgaaaaagaaagaaagaaatgtaacttactagacgccgggggttgatttgagggatgatcgtcttgatggctcggccgtcattcaatccttccatgtcgatgtagaacaaaccgcaacgcaattggattgtttgaacctccgagatgtatttcgatggtggttcttgcggttcctcctaccaaaggtatgcgagctaaggttagttcgtcttatctgggtacagagctcctcgagggaacgattagagaagagagacaggctttacctgtttttgttcctcttctagtttccgttttttggcatccctcaccacctgatctaccccgacctcctcgatctccttccctttcctcaaccaaacccccacatcaaccatctctccatactcgtctacttttctcaccttcctttcaacaaacggaaacatcctaaatcttggagcctggccctgtgcagtcttgtagaaagacgttgctctcgtagcttgacctttgacgtaaatatcgaacgagaattgacgggtctcatcctcccaagagatgtcggttgcccctcgacctctggctgagacatccccagctctaggctctccgtcctcgtcgagcccttcgccatcggcatcgctatcctcgtcatcatcatcactttcaacttcatcggcctctagaagttgctgggcacgggcttgggcagccttttgagcggcttctttggcagcggtcgcttgctttgcttcttggaaatcgataagctcttggcccgacaatgggactttggtgttgacctatcggaaggaaagaataacgtcgaaacaggcgatgagcacaaagtctcagcagcacgagttttgattgaataacaggaacaaatcaacaacggaacggacgcacggtgatctccaaggtttcgtccaatcctagtggaactcctgcctcgccttcacctgctttacgaccaggcgcctgtctctcgttccatttctcgaacagatcgtagctcagcgtaccaggctccgaacgagacgtcaagacgaccaatgtgttcaggttggaagccagttgggtgaataatgctcgggaaggaccgtgagacatggatggagggatggcaaggatgagttttggacgggaggcaggataagtggctgtcaatgcggcaacagagtcatagaaccgtagatgtctgaacgaaggcaagtcacatgtataaaagtatagtcgtgtccgcgcgagtttttttgtcagtcacacggcctttccccacgatcaagcagcaaatatgaagagatatattgacctgaattctaaaggatgacctctcatctcgtttccaccccctcctctaccaaagcccatggtagcctctcctctggcgacatcacctcccatccactccatcaaacttctggtaaagtccaccatttgcttccctgtactactcaccaggcaaagcggataggtccaagttgttccagtcgaatgagcctgagctatggagtaagaccaatgctgatcgagtaatatgagaagctcaatgagacgtgtagatggatcgacagggaagagaatggatgattgggacacaaaagtttttgtgatgagatctgagaggaaaagttggtttacggccgatggggagatgccggatggaacagacgtgaacatcgatatgatatgattagagaaagtccgaaagagcgcgcgcgacaagaataagaaaaaagaggcactcacccaacaaggttccatccctttctctacgcttcacgttcttccactgcaccctatcggcatcggtgatgagtaaatctggtcgaccaagcccttcatgaacgccttctcccttctcttttagtagcgctgttccgtcaagatgtctttctctaagatggttcatcccgaccgcgtagaggatggttccggacgaaggtgaacgaatcttccagatcgtaccaccgagagagtgaccggacgagaaagctgtgagagtgagggaggatagagtacctaaattggaaatacacaaggccaagtgaacatgtgtcacttctgaacattcaactcgagtgcgtgttgctttgtagcgagatctcttgtcatgcttccctaggcgctcgatctatgactgaaatccacatgatagggagcagaagagaaatggagaaagaaagagaaagaaagagaaagaaagaagaaactcacccatcagacgggttggactctcgtatttgactcttgttatcgactcaaatgcatcaggtacctcttccgtagtagcgacccatttgactcgcttcgtcaactttgtaccgtctatcttcccatcgacattacctgtttgtccgttggtatattcgaccccggtcatctcggtctcatcttccttcgctgattcctcagccggtttgtctctgacatcccacttggatccgtccatctcggctctccagccttcgacctcggacgtacaggtcactcggcccatggatgcaattgggacagtcgcgtataccggacacgtgagcccgaggtgaaaccgagcgaagggaaagtaaccaagatgaggtaaagacgaatgggtgagaaggagcaagtctatcgatggggcgtgtctgattgatttaagaaacgaaagtgaagcatagcgaaaaagattcggtagggttgatagcaaaaggtgagagattgtcacgatatgtaggctgacaagaaagggaagaaaagacaagactatttgtgttcgacctggacgtacaatcttaatgctttctcatagtctccctccatctctcctccttccaaagctttccgaagatctggacttccacagtcgacaagtattttgagatcatccagttgaatcaagtaggccaaaggcggaagagcagcggctgccgatgtcgacgctacacgagatgaagacgagagaggagtgaatgtgatcattggagtttaactgcaccgggttctaagcgatgattcggagaaggaggggtgataagctgagaagagaggcgtaggtaaatgtatgcgtggatgtccgagaagttcattaagaattgaacctatagaacgacctttgtgaacagttggactcctcttttgtaaagaatgaggcccagatttacggcagaatagaaaaggcgtctggatttgagcaagggactgagcgatgggtaaattgaggataagacaagaggatgaagttgattgatgggagcttattctatcaagatgatcgtaggccggagcggaagatacaaagcggtgatggttgaaggtgactgaaatcgaaacaaatctagtctgtttgtgtagcacactacttgccttcatcttcatcttcatcctcttgctttttctctttctcttgattccctctcctcgaattgttcagggaaggcatatgccacacatagatctttcataaaacagtatcatatagacggcaatgtttctgattgatatcagctctatccgcttcatccggagacgcatacagggataaaccacgtccgttgagaactcattgtattgtctcatattgttgtcaacaggatgcatcgtattaaggtatggaggaaaaaggaagattgaggggaatatcacactacacggagagaaaatagaggcagagataaagtttagacgagaagaggcgaagcggtctcgatgatggacaacgctttcgaatactcctccgattgtacaagttcaggttccgattcagacacagcctgagacatgtacaagccatagaagagaggcataatcagacaactggacccctgcgcaactggtcggagaacactcaaagagggtacccacgatgacatcttttaattgttgaagagcttctaatgccctcttctttgagggctcgatcatttgttcgcaatcgcccaggaccttgcgctgatgatatttgggtcccgacaggataaaagaggccaggatatgaatcggaaagaacaagaagagggtctgatgagtttgacagtcccatgaacgttgtaaaaaccggctgtatgctgaccgagttttgaacgtcccactcatccgccccctctttggcggccagtctctcgacaacagccctctgatcttcagtttccttctggtaagacttgaattcgtttgccaacctgaattaatttgattatgggaagatgaacgaaaactcaagtcagttctattctataatctcaagagcagccaatggataggtatagatagagagcgaaagataaaaaaagaagcctaggtaaagacagtgaaaaagatgaagttagagaagaacaacagctcaccttttaagaacaccacctttgatggcgagctgtcgtttggctgctttgatctcctctgcagacattgtggactcaacgacaaggcacggacaaagtgagatggtagtaggcctaagtaggactcttcaaaggggaagaagacctgtctagtgggaggaaacgtgtaaccaggatggatggtaaatcccaaatgaagcaagtcacgtgacccactatgccgtaaccactttcaaagtagtcccctctgacttgacccacgggatgaatcaaatcattcagacaagctgctgtacatatctatgtacttgcgcgtccacgcccaagttcacatccatactcacctctgcacacgttgtggttcgttggacgatgctaacgatagatagatcaactccttagataagattgattaattgagggggctgactggatggacggtactcatcatatatataaaacgatataaccctcagtatatgaacgagcataattaaccgtttgcgccttttttgccaagctatctgccctagccttcctcatggtgagaggtttcaggggtttaaccatgggtggccttcagaatatgctctgcttcttccctggaggtcaacgccgataggtcagtcccaagatataccttggtctgggaggcacttttggatcggccgtcatcgtctccttctgtttatataaagacctcatcgtctgaacaagctcttggattcaccattcgatcatacacctgagacactctataaatccattacgataattctttgatctcgcccttgttgcaacacggaaacaacaaacaatgacttctctcaatcatgttggtatggatatggatatggatatgggatctagcacaatgacgtcgatgaagatgtatgtgccaaggcatcccctatctctaaatatgttctttcgaaactggaacaattgctttatcttcccctcttgactacaggtatttccacggtagtagaactgatcttctttggttcaaatcatgggcaccactttcccccggagcgtttgctggtgcctgtattggtctatttatcatcgggttacttgatcggttcatctgtgccgtccggggggtggcagaagttcgatggagaagagcgtgagaacagatttcttattatgatagaattctgtccgtcattcgagatcgaatttgcatatcttatctttcttgttctttctgttcggctccgtcttctgcttagcacacaagatgtgtacgatcagcaatctgttacgagtccatcactctcgcttccaggacctaaatgtgacggcgtccaatccaccacatctagtaccaatcccaacggttctgttcttttctctccactcgctactttgcgctctgccagtacaggaaaccggctagttccccctttcatctggagaatcgatgtgatgcgtgggttgctgaaagcattccagttcgcgattcattatgttcttatgtgagtctagcttccgtatatatatcgctttatatttgctccaattctgcaatgttttggcctgacgacgaaacggatgttcttttaaatttcttgattctttcaggttggcagtcatgtaagtctcggtgttgatcccctcctcgtggactgaaaataggatcgattacactaacaaacgatcttctccaggacattcaacgcgtatttcttcctttgtatcatcctcggcgagggtttaggcgaagtcatgtttggccgattcgcttcggaccatcactgaagtaatctagaaacagataaacaaagatcaagataagatgaatatcgataaggacaatatcttccgttatatacacttgttcccataatatgcttcacgagactcgatgctatgtacattataccatacattaaagagctcactttccctagcgcaagttctatgcggaatagaagaaaaggataataacccagtccagagaaaccaagttaccaagatagtattacccctttttacatggacatagataccctgggaaagattgtcgataacatctatgggattttggtatgaactgatcatatgctcttcaaaatgatagtcaatatatacataaagcatcgttctgaaggagaagcttgcctctgagagggatttttcctcttcggcatcggcagatcctcacaccctcgtagaggagttgagatattttgttcccttcctgaaagatgctcataatatcgcgcaaatgcttcgtcgactgatacaattcgggtggcaaggaacaattccctcttgtttcatcaacaaacccgattgcgtcgctcgcttcaaacaacacacaccctatctatctcatcttctcttctgttccctgcgtgaaccggtctagctttcttacaatcacaagcttgagcttccgagaaataactcatgacgtccgagtccttccgttctgtttggctagacactcacggaatccgttgaactctccgtttgactggaccccgtggtccctcaaagttgatttatttggactcgtttcgtgatcctttataagaatggctcgaagaaaagtggctttttccctcttctatattactgattcgttaatcaaacctctcttctgcttcatttctcctggatttattagttatcagtcgtcatgctctttcctgtgatttccctagctcttagcatgcttacgctcacgcaggtggcttctgctcattttacgttggactacccgcctacccgagggttcgatgaggacctcgagcccaaggtacatctccagcttcccgtgccatgtctgtttattatccgttgtgcccgcttcctgattactgctgtgactgatcaaggcggattcgggaatatctttttgatagttctgtggagggtttgacaccccttccgaaaccaggacgccattttcgctaggtaacacaacgatgacgatcaacaatcatcatgattcggccactggtaaattaatctcaagaatgcgttgctgattgatcccagttatgatactgatctgatatttcactgccactcttatcatctctgtgcagtgagcgtgttgatcgctctggattcagaccctacaagcttcttccagttctcgaatggaacgactgtacgttcctgcatctgtccatcaatccatctccccttcgcgacttgtcatatgcttatcatctctctactcttctaacttgcgcgcagcttccgtttgccaagacatacttcactgtccccaaagggatcaactgcttttacgtcgacctgtctaccgcgctcaaaaaccaaaacattgcgaatgggactttggcaactctgcaagtccggtttgacggcggtgatggtgatctcttccaggtccgtcctcttccccttcttcttgcccctacccagacgacttttttcccttcgttcttatggattgctcattggatgtatgttttttgttctgtttggatggacagtgttcggatgtcatcctcctctctgaagacactaccggtgttttcaaccaaaccacttgccctgctacaatcagcacctctgccacttcttctgccgctgctcaaacccaggctcattcctcatccgccatgtctgcctctgccgctgctaccgctgctgctagtgctagtgcgagcgcaagctcaagatccgctggtttcaagactatgtcttcttctgtgctctcagggctcatcgtgggtggactcggacttggccttatgatcatctcgtagacaaagaaaggaaacaaaaaaatgtactcagtttgcttccatctacatgtttgaggggtctatatgattatgtttcccatcttacttgccctctttccttttgttgttgatgttcgtttctctgtgtttatcttttcctttttcaattgtcttcgttccacttcttcagactcaaggtaagagtgacatgatttataacaaaagggaagcgcgctaggccaagaagaaggctcgagtgaaagagaacagaacagattgatgaatacgggatataagagcttctacggtatggcgttatcgacgtagggaacttcgtggaagaggtatctgttcagttttagagtttgttttcaaagaccgaaaggaaatgtttggtgttcggttagcttctctcactcttatgctatcagacgagtggtctttcttgtgtctgggaataaagaggaaaatggacgcacgaaacactctctccaaagtgacttctcctgatagtctctgccaagatcggtgagatatccagaacctccaacttgtccgtcacttccctcctctcctcttgcgggatcgtgttcgtcacaatcatcttcgataagcccgagttttcgatcacttcgagtgctttgccggacagaattccatgagtgacaatggcgagtacttttgtcgctccctgctcgaccaagttcttggcagcaagaccgatcgtaccgcacgtgtcggccatatcgtctaccaagatagcgatcttcccggtaactgtaccgacaagaaccattcgagactagttttaaaattcaagaaaatgttagaaagacgaacaaataagtcctagcgcaggatgatatatactagatgagaaaagatgaaatagcgatgagatcaaaactcaccacttcgttagccttctttcgctccttgtggaacaatgcaaaatcgatgttcaaccgatcagcgatcgacgttgctctgttatagagagataaagtcagctcttgccgggttgcttcgtccttcttacagaaaaatgaagaggaaatatttaacgaaccgcttagcacctccggcatcgggtgagacgatgatacagttctggacgtcgtagttacttcggatgtaattgatcatcgagggctcggcgtaaagctgacagcgcaaagtttgaagaaaagaagagaaagaaacacaggctcaatagctgcacacaagcatctatttatgacaaatgtttcttcaagagcttagcttacactgtgatcagagaagaaaaagttgcctggacatcagctcggctctgaaagaatttagaagagaacagtttgaaagaaagataccatacgtacttgtctacaggaacgtcaaagaatccttgaatctgagaagcatggaggtccattgactggattgaagagacaaagtataagctcatgcttggaagaagtaaacaaaaactgaccgatgaatgatactcacaattacatggtcacaaccagccttctggatcatactagcgacgagcttggcggtaatgggcgctctggatttatccttcttgtcctgtcgggcgtaagggaagtgaggaatcacggccgtgatccgtcgggccgaagcaatcttgcaagaatggatcaagattaagagttccatcaagctatcaagggtgataaagtaagggaagttgtaagatgccgttaatgtctatcatcccagatcataattttcataaaagcaggtggtccaacaaagaatgaagagaaacatacgaagtatttatctctccgcagccggtgttcaggatgtacacgtcgtactctcggacagactccaacatcttgacctgagattcaccagccgcattcttggtgattgtgcatttggcaaggggcacattgagtctatgtaataaagtatggtccagcataggatcgacatgggagaatgcggatgagcctcgggtctgcgagctcaaaccagacggagggctggaacggaccttttggaaaccaaggcagccaacgccgggtgtgacgttcctttggtttattacaggaagcggcagcagttgcacgtgccaaacacattccaaccaaaaccaaacacaagcgagagtgtcagaaggcggaagcctttgttgaggagaattgagggagagcgacagtacaggacgaggcgaagagaaatagagagagaaaaaaaaaactgaaagaagccaatatcgggcaggtccggaatggagagatgtttgtatgaggaagggaaggagtacaagcaaacagagttttaccaacctgcaaagagcttgatgttggcaaccgaacctccggacattgttctaggaaagaagagatgagggaagaggaatgatagcttgccgagttgatgagtctttcttgctaggtgatgagcaaccgaacgaatgaaaaatgcaagaatgcgatatttagggggatgtaacctttgtaaccatcgagttgttgtgacgatgaagcaagcatcagagaacagcacaaggaataagtcgtcaacacgaggcatgtcattgagaccaagactgagctagatgcatcaggatcttagagaactacggacgattttcataatcagacggcagtctcgaggaagcaagaggcttagggaaacaaaacgtaaatagcaaacgttatacacaaaggggaagagtattttccgacatttctaaatcaaactattcaagattactacgacgacaaaaatcatgtcagggagaatcaattagagatggatatcaagaaaagagaaacgtcgtctgcttcagcctttgtgcgcccaacagatagagctgatagtccaagaccatataacaagctcatcattatattcaaaagtacgcgcaatgaagcgttttgggtccaaagcttatcgggggtcagactagtaggacgtcccccattgatctatgctgattcgatcgtctgtgatcttctgcttgttcatgtatctaaattcctccgacagaacaaatctacgcgatgtgtgggatttgagtgcgctcttggtgtatctcgaaccgatcacatttgtcatcgatttttatcgactgatcggcagagcgactaacagtcatgaatcggagaaagactgcaagatgacatgcagacaaatgaggccaccatcagtaaaaaataagaggagtcagtcccttcataccgtcttttaatcttaactggcaaaacaacatcccatctttgaagcgtgttattccgctcgggatgtcatccttttttaaaaataaaaaaacttgtctgtgtttgtctaattcagttcatctgagaacctcatattcatgtctcgctctcttttctatctgcttgcatccatgttttatatgatatagcatggtataatttcgagaaaagtaaggaacataaggaatctgtaggcaccacagaagtcttcaacagtttagtttgtaacgcctgggtgctgactaagctcactctcgctagtgctctttttcgctcgtaccgttgcatcacttcgactcttttctcctatttcttttttctcctcttactctctatctcttctctctttcagcattcactttcatcatgctccctagaaggatctcctctgcccttcgatccggctcggcatcgttttttagccagcctttgccctcggtccgggcgattagttgctcttctcccactcatgcagacggtctcttcccttcctatacgaaacaacaggttgcgtcgttcgtgaccccagcgtcgtaccacttgtctgagctatctaagcttactcctgctcaagcagctcagcttccttccccgaccgattcctcccgacaaggagttccccagattgggtccggctcttctgactccccagccattcttccaccttcctcctcctcctcatctagtgcgttcatcaagaccgctatggacgctacctcgacctcggttaggaatctccacaccaggttccatttggccgacctgggaagcaacctaagccagctcgaagctgatcttggtttgaccactccctcctttccttcgaccgatacaatccggtcgatcccagtcctccgagtggccgtcaaggtaactagaaacaatatcatttccaatttgtcctggctcgaacacccgaagcttgcgggagtctcgatccccagaggaaacatctctgctggttcgcttggcttcaagaacgcggctcaaggagggtttgaggctggtcatcaggtctcgatcgctaccttcaagcgaatcgatgaggaaaacgcacgggtgcttgaggagagccgtcagctctcggccgacgcgtggagggcctgtttggaagccagacgaaatgagctcggagcggtttacaacgatctctcaagcaggcagcagtccattagtgagaggcaccaggccgttgctgatctggagattgaactcagaagagccagagaggccgaggagagagaatacgaggcagaaaaactcgaccgattgttgaagcaaagacaggctaaaggcgcaaagtcgtcgtcttcaagtgacgtcttcaagcaaagcttgaaagagggcacgtcttcctccattcctactcccacctcctcctcgacgcccaccggaaccatggcgtcttctcaagaagtggccatccttgaatccagactaaaggccgctcgaactgaggttgaaaacatgtcggccgtgctgaacaaaaacctccagagttacgatagcttggcacgaactcttcagcagaatgaggcaacgctggcaaagggcgatattcctaccggccaatacacccgaaagtctattctcacacctgggacgttctccaagccgatgggtatcaacttccaggtcttctgcaaaggtttcggtcagggtagagaggcattcttcaaggcgcttagctccccggagggagaaagcgtgaggttgttgttgactggggttgctgatactagtcctgtaccgtgagtctttttttctttgtatttctttcatactcatctcacgctttgtgattatcgtgacctggctcatgtttttgttgtgttctccttctgctttctatccgcatcagccgtggtacccgacgaggacgaacagcccgtcgtatttagatggatatcagaacgaatgagaaaaccacgcaatctatacactcacatatacacaaaacatacttatcacattcaatcacatttgttcacacgcctacatccgcctcaaacacagagaaaacgttcgtgaaaccagaggggagcatgatttctcaatgtcaacctcctctggtttgcaatccttttgaactgaatgggcgttgagaaaacactgagaagatcaaataggcgtgtgcttcgtgactgatgaaaggctcgagtcatacaatgtcgttcaaatagggctctgacgcacttggctggttgtattgccatttaagtctacagacaactaagtagaatagaaggcaaagcctctgtgaaggttgaaagaagaatagaaaacatatattcaactgagtcaaaaactgaacactcgatgcgcattaagatttatggcccgaataacgtggtaaagaatacgggtcgaaccatttgccgaatagccgggccattctttattatattccacccaaattgagtcgatcacgaggagaatctcatcttatcctctatctcttccatcttgtattgttacttccactcttccaccctaacttcaactcttcacttcatcagtagcagattgaccaatttcaagataataaacggaaacgatggcctctttgactagatttatcaataccacttcgatctcggacgccaatcttgcgcaggctactcgattcttctcgacgtttggagggaccgagtacgtattctttcttttctttgttagttgccttcagaaatagagtggctcagtttagtttccttctttgtctctttgtgatgcctttgttgtttagtaaggcgttgatgatccttcagtactttcctctcgtaatccttccacttcttcctcaggcctcagctacaggtttggccatcaaacctagaggaacggataggcttcggatcagcttgcaggctttgagctccactgtaggagactctcgagtgttaattagacttttcggtaagaggttttgcttgacttgaacgtttgtatgaaggatgcatacgagaagccgcgagaaaagcaagttattaacgtatcttatctctttatatctgcgcaggcctgattccgatccttcagtggattcggtccattcaaaaaagatacgcagctcgaaaagcctcaaattccgagatcaatgaaaagaaggaggatgttggaccaaagagatggttgtcggatgagaatctggaagctattcaggcactttcaatcctggcatattatcccatggagcacacctgttcgtttctgtttttcttctttgcaaactatgaagagatcattcattgacagctttggaacgtatcattgcttctgtcctatctatcttgatcagattatctggcaatgaagggtgtggttcctttggcagtacctaggattgtacagatcgctagatggagttgtcgatgctgggcgtgggtccccttcttctttattttactctttactccaagaaagcagaagagcttaaaatcttagactgcacattcaaaacaatcctatcagaatctatgtcgtactctcattggtgtcccttcgacgaagatacaaccttctcaaagcgagtgatgattcccctggtaagctacctggaaacacacggagaatcctttccagctctcgcgttgatgatatgtgttcttttccttaaaacagagattaaagcgaaacagtatagctcgcagaagcttcaggcactcgtagatctgtcgtaccttcctttgactgttcattggtctcttccagatggcgcttggacttcttctgtaagtggatctctatcttcttcatcttcatggtgtcatctttcaatatgagctttcatcaactgataaagacctcgaatcacaacggtgaacagttccctacaggggtgtttggtaccctcgctgctatcggtcagattgccacgagctggaaagcggttgctgcgccctagactgcctccttttctcttcgctttctttatttccttacgtcgtggcttggtcttttccattgaacatacttctgtctactcgcagaaatgtctcttctattgaatgcttgtttctcctcttcttgcaatcgtttgttttgaaagacaagaccaattcgtaccatcgtcttttctgcccattcagcaggcttcagaactggagggttgttcgttaactcaaaggaaagacatatatcgataacaattatccaaacgactatctgttatccgagaagaaagaatcttgaacttttttaagtctttcgtcctttgttcttagaagaaacagtacccgctcgggctcgttttgtaggtcgggactgggcttgttccgtctgttcttcttcctcttcagcctcatcgatttcttccttctttcctttcgatcctttcttggccttctttgctttgtcggcagaccctccaggagcgtactttgcttcgagagaagctatcagatcattggctctgttcgcgttcttttttaggatcaaagctcgaagagcgtcaaggtcagacgattcttcttcgttattcccagaggtggttgatgcctgttgatcaacaaaagagatgcgatttagagatgttggcagaatcgatttcgatatcaaatgaaccttcagagtcgtgttgaaagaagagaaattagacgaactttacgctttgcttttcctttgttatccttttccttcctttctccgcttccatagaattcatcccaaacaccgatatcctttgcatgttgttcggcctcactcgcttctttttcagcttccttctttctctgtctacttgcttttttatcgcctgaagatgatacccagagatccgttcgctcaatgtcgcccttcttgatggcttgattgatgagagagatgaatcgagcttcgtctacaaaggttgaatgaggtatatggtccatgatagtagggagcgagccggagctggatcgataggcttctaagaggtctgtgcgttcttcggatgattctgatagacaggacggaagaagtgtattcaaagaattagtcattgatttctcgcaataagggaacggaaccatatcctttaatcgagaggtgatcaataccttggtaggacttcttcatttcgtctaatgaagctctatccacaacgtcaaacacctcagcaaagtaggcttcccaacccatctcttcaccctgtgtcaagaagtctccttcattcgttcgaccagtggtatcgtacctgttgggaaacacaacatcaataatggtaaatcgcgcgcaatttgaaagaaattccttatcaacaggaagcaacgatttgagtaagagtagcgaattataacaggataaaatctgaccttttacgtcttgtctcatctttcaaaacggcgtaggcgtatccaacctgctggaatttcaatgcttcggcctgtttcttctcgtcagacgccgagctatgtttatctggatgatggaccaacgcaagccttcggtatgctttctgttaatacagcaatcactcgaaacaagatcagatcacatggtcatttagtggaaagaaggtcagaacgacagtggtatgtacgtacagtaatatcggcactcgacgcggtgggttctaaattaagcgtggtatatagcaagttctcgacgtcttccccatcagggaagaattggttgataggatccgagtccattttgatctggttttgtgtattcttggaagggttgtataagagagagaacaacaaagatctagttgatggaatgatggggttgtatgtcgttgagggaaatctcctgagttggttatgacgcgtgaagaaatgagacgcgtcgcgtcgagttcaaatgattttctcctctccttcaggtcccatctacaatgtttgataagactctatgaccagctagttgctctaacattgatcaggtattgatggtgatagtcaaaactagactatagccattatcatatatgcggctatgagtctttcaaacagagatactcatagtttccttccatctttgaagaatctctcccagagacgtcaggggttgaaactagcatcgtgttgagtaacctcatctcgacgaaagcacaatacgcaaatactgcttccgggctatatgtcacgtgatacactggcgcgttctgttgtttaccctcttcatgtcgaaatcatccatttcatccaatatctcctccctcttcgatatacactcctatacataactcttccttccaaatacaagtatctccatcttggactccacataccttctcttccatatctctttaacttccctggcagataggttgaaatggcggccatcgcttccgccacgacggcactgatgaccaccacaataggtttgtttcctgccacccttctgaaatttgtgtagttcgagtccgagtggttttgacaatcgttggaccttttcgtataatcatcttagcaaccccggctggaacggtgtccacatctacgtctggtgtcgttccggtcattaccaactcgtctacggtcgggtcaacaacatccttgacggccgatagtttaactaccagctcgctttcgtcttctactacacaaagcactatcagtacaaccagcagctctagcacgcttctagcttcctccagcacgagctatactgtgactagctcctcttctgtatcctcgtcatccctgacttcgtcatcctcaatcttctcttctgcgtcgccgacgaccacttcttcatatacttcttcgtcatccactccttcttcttcttcttcttcttcttcttcatcttcatcttcagccgtgtattctctctcttctatcacgaattcagcttcatctgccgcctctgcctcggcttcttcatcatcctcaggcgaaatcacaccgctcgttcgatccctcatcattgctgctgcggttgtcggctccttcatcgctcttgtccttgccttgggcttcgtacttcgacgacagcgccatcgccgaaagacctctggaacgcacgagatggacaatcattatggcagtaaatccagggatacatatgaagcggaggatgagagggaaaagtatggaatggctcgtggcggtaacggatatgcagccgaaggagttttcactcaggctatgggcaggcaccatagaccttcaagtcgacttggaggaagaagcgtagaggagaatcaaggaatcggttatccttcacaaggagatcatgttcatggaccattctacggaggaagtgaagtatcacttttccagcctccattaggagttgaccaaggccaagcatgggagaacagagtgagtatctcaggcgtcaaaagatcaaggatttttctgcgcgcatatcctgatcttcattttttcattgttgtccttgattgctttactggatcagccgttcaatccaatgtcgactcacgaataccaacctggagaatttcacccttcttcgcccgatctgcatcgtacttgttcgccccagcctcaggcatttaatcaacgccagcctgagaacccgtaccactcgtttcatccctctgcacctcaattctataccgcctatcaggctccaacagatgcgaccaccaccccatcagtcattgtcaccgcaccttacaagaacttcaacgatgctcaggcttctaacgtggcgctgatgtatcctcaagggtctgaggcgccagcctatcaagaatcagttgatcctatgagcaagccggcagagaaaacaaaattccctatgcggtcaatgcagggggagagcgaagaagaaacattggctcttcaacctggtgggccgtattcttctaaaggaatcaagatgagagtggttagagggttcgcagcctcgcttgaagatgagcttcatgttgtacccttcacagatctgaatcttcatcagacctatgatgatggatggtgcttagcttctacggcgaccggagaacaaggcatggtcccccgggactgcctctccctccctgacgtcctccacggatcgaccaatcgccgaacggtctcacccacactcccaactgccacttcttcattcccctctccatctatgaaattcgctactttggcacatgacgagccgtccgccccacgagcgcttcctcatattccgattggcagatcaatggcgtggactccaaccgcaaagacagcaacttcatcgcctgaagcacctcagctggctgatcttgagttttctggtaggctgatgatggatgacataggaagtagcgggaatactttctctgaagacaaggcgactcccttgcctctatctttttctgcgcgagccgctcgacggagttctctggtagactcagcttcgatgcgcgctagacacgagtgagggagagatgtactatattatatgatgcgttgagaaaagagacgcgtcgcgttgggtttgaataattccttcttgttttttatagagctcgtcgtccatattcgagtcgtagtttgatgttataacaagggggaaagctggacggaccacaggaattaggacacaaggaaaaaggaaagtgggaaatgagaacaggatcaatagattgcaggcggctaggacaaattcacaaaacgaggagatatacaaggagggtggacagtggcaaacttgttctatgagccgttaggatcttggtggtttgtagttggaggacacccaagaccaaaaggtcatgtatcgactaccatcggttagggttactcttacccggcttaacggtagcgattgacgtaatgcagcaactgaggtgtgttcgtgcgtggtgcacatctactttatctcttccaccaagagagctctgatctttctctgttcttgtatcaaactttagacaaagccatggtagagataaacatatcctctcaatcagatcccacaacatgcacggacggtccttcaaagttactctattcgaaatcgaaagtctatgtccatccgtcatcatactcaaaagataacgttcccggttttgttgccatcgttcagcaggatgtgaggttctccatcgactttgcttttgcccatactttctcacacattcttcatctttctatgattcgcattctttgctgtatatcagaatcctcaaaagacgctattaagttggattccagagagtctggctagatctaggagggactacgatgcgtttgttagggcggaacaccaggatggatgtcagccgagcattgccgaggaaaatggtatgatgtccgtactgcctcctttccaatattaaagttctggtgatattgatgcttctgtgtatgcttgaatagattgggttttattacagcctgtacccgagcgaggagagtcttatgcgttctcagtcccgctttctaccatctattcgatcattgtgtatccaccatctttgacaaagtggtatggatccctgaccattaagtaagtaatttcttgccatctgactaaagatttgtgtgtccttgtgtctgtgaacgaccattctgattcaatacgattcatttgtaatggaaaaatacaaagtgtaatcggcggacagacactacctacccttcactttcacgacgacgagtctccatcgacaatccatcagctatcctccagaggtcaaaacctacccgcagcaaagtggggcggtgaagatctattaaatagagttcggacgtatgctcatctattacgatccgttcttgaaccggatctgttcttggtgaatccaaatcgacaagatattgagattcactccactccaacgttttctgattcagccgtagacgacatcctttcaccacttccacctcaagcgtccggatccggatctgggcataacttgaacgaccgagtgacgtacccgccttcgagttcggtccattccccgcgaacgactctcctctccacattctcccaattgactcggtcaattacctccatctcgaaccaggtgctaactcaccccaacgttcatcctcacttgcctaaaccggtcaagtcactcatcacagctgaccaaccgcagttcacaagatggtctgatctgacgggcgtgggcgagtacgattctgcaaggatctacctggccaaatgggcgagattggtcgctgaggagggtgaacggagtagaaaggttgaggtggtttcgaagcatgaggctctgccaaacaagtcttcctcgtctgcctcgctctcaaccacggcttccgcatcagagcccggatcaagcgcagagacggagagtggatcgggcgagttgggtgtgtgggaagtcttgagggtaacaaaacgactgggattggagaacattgcgagtacaagaaaaccgggaaaacccataagaaagtctgagtgggacggttggtttgatggatgggagggaaaaccggtggtcgaggagagttggatgagagaggaagttttcaaacgggttcgtctcttattcttggtatatgtgtcccggaagacgacagtcgaactcttctgagagacgttttcacattcaaaagggaatcgaccctggctttagatcggtggtttggccgttcctattgggagtcatcccttggcagagcacagctgctgaacgtcaacagatctggaatcgaaaagcgtgtgtccttctctctgctttctcgtcttgttatggccttctctggatacatacattcacatgtacgcgagtactagttgatcaataatttgggttgaactatgacagggatatgtatcatgcacttcgaaagagtcaaacgctcgatcctgaagtccttgcccaaccggaggtgattgaagagattcaccgcattgaagtcgattgtagacggacggacagaaacgtagatatgttccttgcagagaagggtgaagttgactctgatggagaggatgcgggggagcaggggaagaacggttcgtcctttcttcaatatttagtggtgctcttatgtcatttctcgttcttgtttaggattctagtgttcaatggaaattctttttcttcacaattagataatgttcaaaagatggcagagatcctgctgacctacggattcttcgagaaagagctcggatacgttcaagggatgtctgatctttgtgcgccagtatatgtggttatgaaaggggatgaggtcggcacgttttggtgtttcgttgaatggatggaacgaatggtgtgtaccatcgctgtctcagttcgatcattcaactttcccctgataagactgatcatatctctgttctggttgaagaaacaaaactttctgagagaccaatcaggaatgaaacaacagctcttgacactccagcagttgatctctgttatggattccgagctatatggacatcttggtgagtctttcttggcagtcttataaggctaaagaaaaaaaaaccatccggaaaatagaaggactaagctgactgagttgggaaggtggctggtggaaaatgatgaaccatgtgacggacgtcaactgtaatatagagaagatggagtcgctgaatctgttcttttgtttccggtacgtatcttacttctcattttggcatcactcttgagtaccggtgaatgactatggtgacgctgacctcgatgtgatttgactggctaatagatggattctgatagcattcaagcgagagtttgcatttgatgacgtgattaggttatgggaagtcttgttcacgaaccactacagctcccaatttgttctgttcattgcgctcgccgtactccactctcatcgagacgtcattctccgatatctctccgaggtaaatccctcgtttacttttgtatcataaaccgataaggattttagagctgatgttgcgcgttacctcagtttgatgagattttaaagtactgtaacgaccttgggggttgcattgacgtagattcgactatagcccaggctgaggttctattcgtgagttctcttccgttttcttgaacatcctaatgatcaattattattgacctcagctaatgaaatgttgtatccggtcgaacggcaggtctcattcaaatctctcgtcgaagatgtggaccgaagacaggccctacgagaacctagatcaacggatcggcaaggaggtatacataggaggaagaaggtgaaccagtcggctcagccaatggaacaaaatccgcacgaggaagaccaatacggggatgatgattttgacatcccgacgttgcctgtgatctctgatgagctccgtgcgttattaagttaagatctgatgatgtagaatatccagatctcactagctatacgactctttttatatttccctcctaacacacgtcacggttttttttcttttacatgtttcctcttgtatctcgttccttactcttgatgattctcatgtaacattgcttatgatagcgatggtgaagactgtgtttgatcatccgtcggacgacacaggcgatgatgaacgaagcttatttggggtgccatcggggtcgacatgggtagatctggggaaatctgggcagactaccatctttgacggccccaaactgcgtgcttagttttcggccgacgagagaaaacataagaacgtgtcctaatgagtcagactaggaaagtgttgcgaatttctaatagaatgctccatcgagtcagactcttcaaaaattcatcggggaaaaagaattaaagaaccagtcaaacgtttttttttcattctttttttcgcttcttccttcatcccattgcctcgtcttcttctgttcgtttcatcctcgagcttattcgcttatcaaaaagaagagaccactctcttggccttcgtcgtgctctctttccatctgtttcttttgattcagaaccacactctctaccaacatacactcgcctagctttctatcatgcttcgaacatctacccggctcctcaactcgagttctaggtcggccctccccgccaccgccaccgctctcgcctcttcttcatcttcttctctggcattctctaaacgagccaactcgtctctcccgccgtcaaaatccttgtacgcaatttcgccagagtcgaaatctaggattgctgcccagtctcgattaatcagctcaacgacctccaccggcgccgctgccgctatgtaagtagtgactttgtgatctttcctcttcgctccattctttgtgcctctgtatcagtatgtcgtagagaacggatctatactacgcggcatctagtggcgtagagcttcttttcctttttcaaaagggcagctctgcccactgattctatctctcgaactgagcaggtccgtatatagcggctaagaggaacttataatttccggcggtcggacggcgactgttccaataccttttttctttcaccgcttctcgttgcctcttactttcccctttgttctcgcttaaatccacctccaatgactcgtttacagaattgagcattggacacaaagactgaccgtcttgttttgtgtcatccgatagtcgaccggcgccgtcgccaaatttccaacagtcaaaggttgagacccccgctaactcaagacatagtaatgccgagtgggactacaggtgagtcatatttgtttggatctatctcgattccagactcagtcaactcggattctccaactaagcttcaacttgaatcttgaattttctagctttgttggaaagtctggaggagagattttccacgagatgatggtccgacatgatgtcactagcatctttggataccctggtgtgagtcattggtctataattttatctttttactcctgacacgtgcaaagtgcctgaaactaaatattccgaccacctattcccttgacatccaacccttctagggagctattcttccagtctttgatgccatctacgactctgatcagttcaactttatccttccccggcacgagcagggtgccggacacatggccgagggttatgcccgggcttccggtaagcctggtatctgcttggtcacctctggacctggagccaccaacgttatcactcctatgcaggacgccatgagcgatggtattcctatggttgtcttttgcggacaggtcgccacctccgctattgggtccgacgccttccaggaggctgatattgttggaatctcccgatcgtgcacaaagtggaatgtcatggttaaggacatttcagagcttccccgacgaatcaacgaggccttcaagattgctacttctggtcgacccggtcccgttttagtggatcttcccaaggatgttaccgccggtatccttcagaaccctatcttgatcagctccatcacccccgggtcgtctccttacttgcccactacaccagccatcccgaacgcttccgacgaggctctcatcgcccaggctgccgagctcatcaaccaggccaaaaagcctgttgtatactgtggaaacggtgtgctctcctctcccgagggaccccgattgctcgagttgttgagcaagaacggaaacatcccggtctgcaccactctccagggtcttggagcattcgatgagaagatcgaggaccgggccttgcacatgttgggcatgcacggaagtgcttacgccaacttggctatgcaggaggccgacgtgatcattgctttgggtgcccggttcgatgatcgagtcaccggaaaggtcgacacttttgcacccgccgcccgagcggcctccctgacgggcaagggtggaatcattcactttgagatccagccaaagaacgtcaacaaggttgttcaggcaactattcccgtcctgggagacgttgtcaccaacatggcttcccttgttcccaagatcaagtacagcccgcgaaagcagtggttccagcagattaaggagtggaagaacaagtacccgttcgtatacgagcccagcaaggacggagccaagatgaagccccaggaggtcatcgaggagctcgaccgagtggctgaggagatgggtaaggagaacgtcatcgtttccactggtgtcggtcagcatcagatgtgggcctgccagcactaccgatggaggcacccccgaacttggatctcttccggaggtctcggaaccatgggttacggtgtgcccgccgccatcggagccaaggtggcctctcccgaaaagatcgtggtcgacatcgatggagattcatccgtttgcatgaccgccatggaactccagacggcttcggcatacaacatcggtatcaagctcttgttgatcaacaacgagttccaaggaatggttcagcagtggcaggatctgttctacaagcagcgatactcccacactaagatgcacaaccctgatttccagatgcttgccgcctcgatgggttgcaagaccttgaagtgctccaggaaggaagatctgccccgactgatgaaggagttcatggagtacgacaatagtcgacccatccttttggagtgtgaggtcgccgacaacgagcacgttttccctatggtcgccgccggaaaggctctccacgagcagatcgtccaccctctgctccgagaggccacagagactcctgctccttcatctgcctaaagaaagacggttcaggcctcttggatcatcttgacttctctgcttcccctcgttcatgatctttcaatcttcgttcttccgttcctctgccatttctttattcccacttctcgttttggttcttgctcgttgttgtcttaacatcccatattttttcatcacgcttttaaaaaaggagaaaaaaattatcgtttgcttctgtcatttgtatcatcgctatcctttcttttgaatacttttttctctctcgactgtccatactgaaaaaccaataatcgtgcatgattgattcgctcaacgcacaggcagctttctgaatgacttactcatgtttctagtaagaaaaagtcattgttccagtggtaacagctaacctgttatagaggcagagaacgatagagatacacggccttccttgtgatcctcccggaaaacaaaagaggaagcgagtttcacacttgatcaatcaaccaacaaagaagcaaaagaacaatgaaatcaagaatctaatcaaagaaaattgatgagcgattcaagatctctatgtggattctgagaagatggttgctcttctctccgtactgacatctgtaaccacgctctgccattaccatcagctcggagtaaaagacaaaaggaatctatagatcatctattgataaacacgcattctcacacaagcactaccatctatccgttgacccttctctcttcgatttcctatactcgacctaggttagagaccaaggaaaagggagagagtagttcgggagggaaagaagaagacgaagacgataatgcccgttactcgatcgacatcgtacgttcctataaggtcgggttcgaacttgacgtcacctacgacaatgaacaatagcatcgtcgggaatcatagtcaacctcaacctcagcaccatcagtatcaacagcaatatcaaaaccaaaatcagaaacagcagcagtcgagtaccacgcccacctcaccagatttcttgacccctacttcttcagtatcatcttcatcctccccttcagcttcttcccctttcagacggacatacgccaaccagccaccgctgcccacaacatcgacggccgctcgatcaactgccgtcgttccgatctcctcgactgtctctgtgcttcagtggaaagaaccagagatagctgatttcctccattcgatcaaatgtggccatctcatcagaacgttcgaggcacacgatatcactggatctgtaatcctcgagttggtcgatgtcgctctacttaaagaaatgggcatagacagagtaggtgatagagtcagattgattaatggtctcaaggctttgaaagcttcatcagtagcagcagcagcagcgacagcaggaggtacggcaaggtcgagcaggcaaggaagtgctgatggtggttcgtcagcaggcgcaggccaagaaacgtatagagcagggccgagagtgattgtcactcgcggagagggactttcggtttatggtcgaagtgagttttgttctcttatggtcattgatgtgaacagtgtggaacgttgagcgctgacattgaggatcgtgaatcgaaaagcctctcctgcgttttctcctactcctcttattcctccccctccccctccttttcattctcccagttacgtccaccatcaatcaggcgcggcacagacttacgctctacttggaagacgaccggctccattagatattgctcctctgggacagcacgtaacggatcctcgaaatgctcaggctcatcaatattcacctgatgtgcgtgatagcatatatcatttgcttttttgtcgatcaagctaacttcatcggttgacatatcatatatgtactggagcaggcttctcatgtttcgtcagcatctcaacaagtctcgagaatatattcgaaagaatctttcctacattctccggcttcgcagatgaattcaagtcgattaccccaatcactggtggcacctcccgatgccctgccaatagcatcatcacaacaacagctgttaccggcgccgcctctttgtccacagccttcggcgttctctgttttgacatctgaaccatcgtcgacgtcgatagtcggccaccttgatggaaactcccgggcgatcgcttcaagtctttccggaggctcgttcaccgaacgaagagctcatctcgctcgagagcgccaaacagacttggtggccacgtctgcatcaccatcttctccatattcttcctcagcatcgtcatccaaccgaccaaacttccccagccatccgaatgagaagcaaccgacagggaacagaggtctcaacggtcgatccgtccccttcggtggtggatcatcgcatccgttcgctaccacgccagctacgccttcctcaccgacgtacccgcctttgtcttcttctaatcctcctcaccctcatactgcaatgtcgacgtcaggttcagtagctggttcaatcagccagacaggccgtgctacctctcctctgcttcattcttcaggctcagcttcaggcaccggctcaacgttgttggtccctggaaagtcattttccggatcagccccggtggcgctagaagacctacgacagaagtgtttcaagtttactaatgcagaggatggagggaccagggtcgtcaatcttggaggtctgactgatgggatggaagtcatggagaaggcgctgagaaagttcggaaagtggagagatggaggcgcaaagggtgtgaaaggtgtggagtatctggagattagcgatgaaggcgagacggagagagagatggacgagtggagggcagttgggcccggaggcggaaaggaagagaacgggttggtggtcgatggttgggggatcttcttgaaagactatggaggggaggtcgacacctgtacgcttctttcaatcttcgtcatcttttcttcaacttctgatttcaagttttatagacagaaaattgacatgtttttgtggcccatttggcagctaaaccgcttacagcaaaggaacttgttcaagtctgtcaggttccatttgattcgccgacccgtcaaagtgggttgattcttaagaggattcggaagcttcataaccggaaagcgatggaggccttctttggcgagacaccaccagtgccagagtctcctacattacaaatccatcaaaccaacaaacacgcccgccatccagtcgaccataaggacggctctgccttctattctggaagttctggttccggattaaccagatcaagttctaagaagatgaacagggctagcactatcagcgtgatgagtgggctaggagttccgttaggtcctcaaaccagatcctctgtagtagttcctcatagagaacctccacagaggacagcggtctcgccagcaacagctgactcgacaacgacatcgaccgagcagagtacttcaactgcgccagcggtgaaatcgccttctaccacttcgttcttgggaaatagaggccggaagatgtacaactttttcggacaccgaccgccttccgaattgatctcaaatcacctcgcggattatttccccaaggttcagaaaaaagtgctggaacgaacagctagaaattcgatgatgagaattgcatccggtccacctggttcatcggcatctggaactccattctctgagggaggagcaggaggtcctccaagattgagctgggaggaagcaaggtcgaaggacccaagagcttctggtctaggctatggaagcttacctcgagagagacgagtcagtcattcagggaaatcagtcaggtcgttcattacgacatcctccaaaggcggtatgataccttcggaggatgttcctgaagaacttcctactacttccacccccgaatcttatataaccagagacgagagctttgatgtgccgagactgtcgatctcgacagacggttcggtttctgaacgagcctcgatgatctccatgccaccttacctccctgattttataccctctggcgaatctttttcggactccttagcagtatactcgccttcgttcggtagtttctccttcgactctagccctgttggcgtcggcgctaagggtagaaagtcctctttcgattcgtcaagtcgaatgagtctcttatcccaattcagaaagaaaagagacatgtcggataccgcttcgatgaggacagtagacgagatcacggcccatgtggagagtaaaagagcaagcacaatatctgactcctggattgtttccggtgacggaaggagttcttcaggagatgagcaagaggatgaggatgaggaagagcatgtggtggatgagcaggaggatgagagaggtgatttgatgagaggatttaggaggacgagggactcagattctgtcaaattttccagaagctttgcaaaaagatcatcgtcgtacagagggaaagaacacgagttttctgcgggtgtggacaacggggatgagagtgagctgggagaagaagagaatgaacgagaagttagcgacgaggagtataccgagggtgaatcggatggtgaggagtatgatgacgaggaagatgaagaagaggaggaaaaggaaaacattgcttcagtagaagatgagcatggaaaggcatttatgtctgaaggaagtaagtcatacttcatttgttttgactcagtcttgaccgtttagcatttgctattgatcctaatctgctcccctttcttatcttacttccttctagataaacggtcattcaaatggatcaaaggcgcgcttattggatctggatccttcggctcagtgtttctcggcatggccgcctcaaccggtctactgatggctgtcaaacaagtagatattccgactggtcaatcggcgaatgaggaaaagaaaaagttgatgttgagcgctctagagacggagattgagttgcttaaagaactacagcatgacaatatcgttcagtatctaggtacgatttctgattatcatctcgagggtctgtgccattctggaagaaaaacgcttatcaaaatgcgacatgttttcgtctttctgatagattcctcgatggacgccgcccacttgaatattttcctcgaatatgtgcccggtggatccgttaccgctctcctcggaaattatggtgcttttgaggaagctcttgtgaggatcttcgttcgacagactctgcagggacttgtgtacttgcatgagaaaggaatcattcatagggatatcaaaggagcgaacatcctggtggacaacaaaggaggcatcaagatttctgattttggaatttcgaagcgtgtagagacaggtgagtgtctcctattcaattcaattcatattcaaaacattaccttgttcaacttctctcatataacttactctcgttcggttgtttgcgtaccgtagatctcttgactggagtcaatcaacgcagatcccttcagggaacagtgttttgttagtcctttccatctttgaattaccggttttcaaattctttttgctcattatcattcctcgattcaacgccaaccaaacaaagggatggcaccagaagtagttaggcagaccgcccatacaccgaaagccgacatctggtctgtaggttgtcttgtcgtagagatgctcacaggccaaagaccgtggggtcatctggatcagatgcaggtcatgttcaaggcaagtctgcctctcttctcttctcctttctgcctttcctatgttcttcaatatactcaacatacatatctatcttcgcatctttgactgtattcggttgggtccacagattggaggttcggctcgaccagaatatccgccggatataacgtctgaggctgaggatttcctcaacaagacattcatctttgattacaacgatcgactatctgcctctgactgccttgtccatcctttcatcgttgagtctttggaataagtgattgggttgtgtctggaaaaggtttgatctcactagtctgatatataaatatgtggttgaactatatggcaaggtatggtaagagcagtgtgcagggtaattgagatcatgaacaaagtgtggaaatcaaatttatgaaaagggtagccacgagaagatacgacttgaatgcacaatgaaagtccgcaaagtcaaaattattctacacagagaaaagatcatgacaacagctacaaaatgaaggtccttagttcaaggaaagaatatagataaggaatgaggcataatgaaggtgtctccgttaaagttgaatggtgcctttgatctgagaatcgtcaaacgagtctttggcgactataacgctgacgagcgcgccttgtggttgagtccatcgctatcaacccacaatatgcatcaagtcagaaactaaccccacgcctgttcaaaagaatatatagaagaggaacttgcctgtttagtaacgtcccagtacgatagatcgtacaaagaaagaggaatcgtaacctgatcgagtatatgatgaaaatttagatctggttcatacagccttcatcaaggtaaagaatatattcgctactcacattctgggtatgaccagccttaacccatactttctcgaagcctttcagtattttaggctgatgataaaaagtgtgcttacaaaccatcaatatcgtgtccgcaaagaaatataacgctctctactattatctttgcacgcgaagaagaaaagatactgactggctctcctacccaatcggggaatgcaagatatacttgtgggatctaacgaacacgtgatatgaaaaggatattagcagtcgaatttcatagaaaagacttctttgaaaagacctacgtcatgtccattgacctctccgctattcgtgatgtcaaactcgacgttccatcgaggtttgtgcagactgtaggggaaaaaggttatggatatcaacttatgattcgaactgtgattcttgtattgatcatagagcatgagagtaacgaacgagttccagagtgatctaccagtctttccaaccgaagtgacattcctctcaccagcagatgtagttgcacacccagctgcagtgactgtcttagtgacgtagattgtctcctgtgctccatgccgagccttgacgtgtgtggcatcctgtcggtacatgttttgctcggcgatatcctctttagtgggagaaagacttgtgatctgcaagttagagtaggagaattcggtgtaggagagtccgtacccgaagggatatctcggtgtgatgcctttagccaagaagtgccggtagtcaatctcgagggcctcgacgtaatctttggaaggcgagatcagaaaacgttgtttgtcagtgtgtgtccgtagccaaaagaatctcgcgcaaagctatataccaatttgaggagtgacgccagaagggtagaaaggaatctgaacaaaccacaatctcaactgggatcaataaaggtgagagttgctattgtcgatgaggagagacttactaatgttgggtagtcggcttccttcttagcaatagtaaaaggtaaccttccactgggattcactctgtgcgtaaaatgaagatgtcagcagttggagttaaccactataagaaagactgtgcgcttactttccgtagatgatgtcaaccagagagtttccagcttgttctccaggaagaccagcatatacaacagccgtgatgttctcatgctgtatatatcaaaatatcatcagacaccgatgcgtgaccgatatcttagattatatgacaactcacatcaatccagggttctaacatgattggcccaaccgagtgaatgatgacgattgtgttctaaagttgaaagatggtagcatatgtaaatgaaatcgcaaggggcctgaaacacctaagaagtatgtacgtacgttgttttgagcagcaactgccaaaacaagctcgtctccgttcatccacgcggttaggttgttcctgtatacaataacggtgagtggcgaacatacaacaagctgactcaatgatagaagatgactactcaccgatctccctcatttccatcgacaacaatataaccttcaccagaatccgaattgataaactgatattgaaaaaatagatcaatgcaaccaacatgtcttagccaaacaaggaaaccatagaatatcagaatagactgctggaacttacaaccagggccacatcattgtaggccgcagttgctgcagctgcttcggtgttaaagttatcgagataccagttgatgatttggttttcttcaacagctttagcttgaatggcctcaagtggcttgaagatgaagcagtacatcatcagaaaacttagataactcatccaatgaaatgtgatcgacttactgagataaggtatgggaaattagccgttccggatccccagccgatagctagaataccatctaggcaagaatgatagaaatgaaaagccgttaattcacatcacttatgccagatagttcaactctaaatacgtaccatcgccacctcgatcagcgtacccatttgcacctatgcttgagggtccagcatcgtttccaatcacagcgatggtctttgtgcggttggtcaacggaagcgcaccatttacattcttcaacagtatagttgaagccgcgccaatttctcggatcagtctggagtagagaggggtggataagttcagcctaaatacagcacaagaacgggaaaaaccttataatttcttctttgatataaagcttgatacgaactctgcgtgttttccattctttcggacatccacatgctcattagttctaggatcattgatattgttagtatctgagcgagacaaaataaatgaatgacataagttggtagacaaaatttagtatcttggagcacaatcatacgctaaaaagcaggaaggtctcactgaagtttactgcagggtaatctgggtcatcttgctccaccaaatagtacccggcaagaattctgacagccatgtcctaccaagataaaagaaatcatatgagtacgaatgagtatcgaaatacagtcggtagaacatgcttacattcaccctagctcgtggaatcgttccgttattgactgcgtcagtaagattctgaccgaagtatgacactccgctgttgaagacggtatctcctggcactgtgtcgaggattacggcatttgtatcagcaagccagtctctcatgattgttcggatgtggctatgatggacttactagtcatatctagcccactttcaatggcggcaactccctagttgatatagtgtaaagaaattcaaaagatgaccctagtcggattgtcaacagaatagacttacgctttcagtggcctgccaatcactaaggacgtagccttggaatcccaattcatgcttcagaagatcgttcataaccttagagttctgacacgcccaagattgattgacttggttgtaggagcacatgactgaagccacatccgcctggacactctttaggaaggggtgctatataacaccaaattaatcatagaacaactggtacatgagcgcgactcggcacaaaaaacaatgtctcttcgattttgattgatggatacctacaagataaatctcgtgcatagtacgatcatcgatattactggaagaagtcgtccggttgtgttcttgctcgctatatcaatgaataccaggacgagaatgaacaacaggaggatgcgatatttaagaggtcaacagagccttactttccaataagatgtttcgcacaagcttgaacacctttgcctttggtctgtagccctttgattgtctcgtaagcagcttctccagccaagaaagggtctcctccgaacgctatgttgcagatatattcaacagaaaattagcttgactaaattagctatttgcctaatccgaagagatgagcaactagtcttaccttcccagtttcgtcctccctgattcgtgcgatcgcaacgcgagaaagagcgcgtatgtcaaacttgaattcgtttcgttacttttcgaagactaccaaggagaatcacatacctgagcgtttcgagccatgttcataccagggcccagagcaatgttgactccctttcctctgaattcttcgccaagggcaagacccctctgccgcatcaattttcgatcaaacgtggatgcagaattgattccagcagggaacacagagactcgatcggcaaaacgaacaccggtaggctagttggacatagacatgaaaatgaacagttaagcatgtcaatgtctctcagaattcggactaggtttttcagtcaataacacctactgagtcttggaggcataggccatcaaagcctacatcgggttgagcgccaatgttaccgacgcactgtccaacctgccaacctgagacatcagattctactaatcagtcccgacaggtgattttgaaaagtatggcagcagggagctcacctagtcctgtagtgatattgacaacttgctcgagcgtccatgtgctgattcttgcccgagcttttgcaaccgcatctgcccaggccccctccccccgagtctcttcagttgcatactgaggagagaatgagtagggtccagagagtgtcagcgtggtgtattccgaagaggcggtaggcaaaaccagaagaggatcggcagagctagtaggggttgacgaagagctagcagaactcgagggggaagcggcgtatgagctggcatcataagagctcggggcggctgatccggttggaagcgaggtgccggtttgtgaagcggtcgcggactcgttaccgtaaggtttgacagcagacgaagccgttgaggtcgtgttgtcgaccggtactgcttctgagggaatcagagatgtgagaaaaatgagagctggggccaaagttcggatcagcattttgggtcaacctgaatgagggtgtattatccacagaagtatctgagaataatgagagtctagcaagctatagctgaaaaggtttcacaggctcgaagacagaagacaagatataaagaagaagtgaagacacgaaggaatgtcgattgtgagcaggtcgaagaaagaagaataacaagcttcggagagtatctatatatgcgtttcctgaaatcttcttggcgaggattcctatattcaataacaggttagtatgtatgtacatatgtgcatgcttgtcagttcctttgttgttaggttaatccgaacagatgtgatgggaagaggggagaaggtccattgacaacaagtcgtcattcagaatgagcacaagatcaccaaccaatgatccccattcttcccaatctctgaacatctctcttccatcgtcgtctcgcttcgattagtgtttaggcaatatgacaaccaagccgaaccgaaccttcgttagcacgattttgagttcggctgactagaatggagcttttgctgaaacttggatttgcgcaaacaaaaagccacccgggccgagtatggtgtatcgggcattacccatgcaattcactttgcccatgttcatttgtgtatgtatacatacatctggcctacatacatctggtccacatccacctacattcgaactggtcactatcctcgtcttcaaggaagctataagagagttgtatatagatgttgatcaatcgcgtagcaccacacgaaccgaccaccgcaagtgatcgacatcgtacgcccttcgtttcgctcgtgacccctgccggcgggatttcctcggatacactgaattcttttctccggtctatagcaaaccccatctctctaacggtgactaaactgaaccaagtcgatcacacgggtctacaggaacattgtcttgaagttaatcgtaaaaaaattcttttgttttcactcaacgcagacgacatttagaaagaacatttatataacggttgactttgaacgccactcttaggcatcagtcggatgtgtatgaatagagaacgaagaggcgagggtggtcagtatggaaaaagtaaagacgtcaacaatcattcttttcgaacggccaccaacacgcagtgcagtctatgatccagacggaaaaaaaagtccaatgcaggtcatcagttaagagtaagagagctactgtttttttttggtagacagtcagatatgaatgcgtaccctcctgccgtagcatcaatgactttgaagtcgttcaagacctggttgttacaacaaggcgtgtcctctcaagggcgatcagtatacaaatcaagattttcaggcgggaagcgtatgaaaacaaggatctacacgtaccttgcttcgaactcgagctggcacaggggcggtttctacatcaggtccaagtccaagttggcactggtctaaaagtttttttttgttgatagagggaaggaagggcgattcagtgaatcagttttgttgatacatgcagttactgtagcgagaaacagagaaaacttacttccgtatccccacgcatagacatttccgtctctggagacggctaggttgtgttgagtaccagcggagatggcaatcatagggtgcgcagaatactcttcggccgagctcgggtagggagagaaagcaggggcaggatctgactcagtcggaggaggagggaagaacagctatcgaggaagaagtacccaagtcaaattcattgatgaaaataaatcgataagcgcgttagacaatctacttcggagacacgcatttcagtaaacttacctggacaggctccgggatgtattcgtcgacagcaggaggagcagccagcaacgcatattcgtctccctcatcgacagccgctgcagccttggcctttctctcctccatgatctgctccagctgttccttcttcctctcctccaattctttcgcagccggatgttccggtcccaaacctaattgtgaaccatcagttcttccacagccccagacctcaccgttgtcgaacaagaagattgtgtgatgctctcctccactgatgctcacgactttgcttccaccatgcagttcgggatcgagcgcatccaccagtgtaggagtctggatgatctcttcggctccgcccctgttctccgaaaccccggtctgtctcaacgagttcaaaccccaagcatagacctgaccgtgcttgttgacggcaaacgaatggtaagaaccagcgccaatatgaacaatgtctctcagagcgagtctctcgggagagagtccgttgatctttcgcctttcgatgatccgtcgacccagctggttctgttgaccgttaccccagacgtagacgagaccgtcgatagttagggccaatacatgatccgttccgcaagctacggaggaaaatcggaggttcgaaattgccgggagtgggatcgggtcaaactgaatcttggatgagccaggcacaccgtcaaacccaagcaaaccctcgcctgactataaaccacaatcccaaaagacgaccgatatgtgtaagcaaaccagctattttccagatctttcttacaagtaagacgtactcggaaagatccccacgctcggacatctccctcctgaccgactacaacggaaacactgtctccagcagcagccttgacagctcggaattttgcctcaacaagcttggtaaccgtcattggttctgtctcgaggacctcggtgtcgatgatctctcccgggttttcagggtcctcaacaccagcagtgactcgaccgagagaggcgttatcattgacaccccaggaccagacctagcgaaagaatgaggaagaagcgtgtcgttgagctttcatcatgatttcggccagcaatatggaacacaaaaagtgttgatactgaccttgccctcggcgtcgatgacgagcgtgtgcataccgcccgcaacagcctcctcgattccttttccaactcctccaaacttcccttcctttattccagcctcgaaccctttttgtaacaaacgtgatataaaaggaacaaacgtaataatcagcaaaaaaaagtttagttgttgccacaggaagaacaagggaagatacaggcttacacgtatgcaaccggggtcgagtgatctctcccaactcttcggtacccaaacccagcgcgcccatatcgccagtaccaaagataaacacagtccgggccgggccgttagacactatcccatgatgagagtaaatcgagcaaatcgagcaaatgtcgcgtgttgatttagcttggcgtagacgaagaaatcctggatgaaaggatccgccacattatcctcccgagaggcagagacgagattcggttccgtaggaaggagaaaaaagacgcgactgacggggaggttgaggaatctcattcacgaccacctttactttctttgcagctccaccaacggacggtcggccaacagatcgtcggggagcaggagctttgctcacagatgatgctctctttctcttcaggccagccgttccattactagtagtgacagtagcggttccgttcgtctccgtctttttaggtgattcactcatgtcagcatcggatggggcttctttaccaaccttagaggcaggcttggtcttgatggtctttttgacgggagtagcaggcttgggagcgacagagagtcgtttggaaatacgagacgaaggaggcttgctgtcttctaaggaacgcgttttaaataccaagtcaaaggaaaaggaatgacactcgatgaacaccatctaagtggatttcaaagaagaaaggaaggaggactgacttttaggaggcatgttgaagatggatggattgtcaaagtgaaagataaaggaagaggatgagtaaatggaggtaagacctatggctcatcagactctatcacctgtacataaattcctctgcttccccatatgtaacggtcaatttttcctctgaatcttagtttttattgtaaacaactattctatcatctcacatgtctgaccagccaaaaacgtttttacagccgtcaaaagatgaacgagttcgttcggcaacataatattatcccaaccatatcgtgaaacaaggttttaaaaattgatgaaaatttgtggtgatgcaacaatcaaaagggtatcaattactaagacaactaagaagcaccacgggtgtcataaaagtaattatatagaaaaggagaagtcaaatggttgaacgaaacattcaacgaaaagttcaatgaagaaaaggcacaaagtcttgatgaaggtatcaatattgccgtcgtggttgacataaaaaggagagctcattccgtgcctcagaattctatcatcatggaaggtgaagtgtatgcgcctgtgacatagtttgtagcgaattgacggtagacaataaacggacaattaacgatcaggaaggtagaagacttgagtattagagatctaaggtgtccagatctagaaccaaaccaaagaggatcagcacttatgtctctaagccgtcagcccgaataagcgctgaaagaggatcactttaccttgaccgtctgatcaactgaaccagtcgctatcacgttcaccaaccgatcgctcccagctgcttcggatgcacctttgccatctcccccagcagcagccccagatacgaccgttcttccccaagccatacatgtcacaaaatggccatgcgcatctaatgactttgtacaacgtccggtttgaagatcccatatccgaatggtcttgtcgtccgacgcagagaagaggaatttgccgttagggtgaaaggcgagcgcgcggacccagttctcatggcccacctacccatgtatcatcacagttggaatcaagaatcagtaggcttatttcgaatgatatacggggatgcatatcttaccaatgttcgtaagcattgccccgttgtggtgtcccagattttgatggttttgtcccttgagccagtagcgacaaatcctccagaagcttttgctcggtcgtcttttgaattattctgtttctaataagatgaaatacaccgttgagccgaggttcactgctcaatgtcatcttttagtaagaaaaaatctgacttttattccacccagctcctgaatggcggcatatgatctaacaggagcaaacacagctacctctaccacatgttcatgtccacgaagctccatcttagtatcccctgacaatgaatcccatatccttgcagtctgagaggatagaagaaaatgacatactcaatatgacacgtttatgaaaattataaaaaatatcaactgagatgaaacatagttggacatacctgatcgttcgaacagctgacgagcagatttccttgatctgctggaacgacgtaacgaacccattcagaatgcccattgagagtctttacgcaaaatctgagaaatatgacggatcgcaagccattagcacactgtccatgtcatattcgagatagtctacagagagaattattagcctaccctgttgcaacctcccaaactttgatcgtacgatcacgactcgcgctgacgatgaaatctcccgaaggtagaaatcgagagcttgagacagaatgatcgtgaccatagagggtcttgacgtttttgtattcattttgagtatcccaaagttttatagtaagatccgaagagcatgtcactatatgcatgaggatgaaactaaattagctacttgtcaagaccaaaaatttcgggaacggaggctgaagatttacccaaatagtttcctttcgggtcgaagtctacatcttgaatagcttttgtatgacccttaagggttcgttcaaaatcacctgtctcccaatcccagatcttgatgcttgaatcttcactagctgtcgctagtacactgtatatcggatggaatgcaacccgggtgattggcaaccgatgtccggccaaaacgtgcctggctggtgttcgtgggatccagtctacttgtgatgctgatcgacgagatgaaggggccgaagagagctcttctaacaaggaagcatttcgattctcaagatccatgatttttttctgcaatcggatcacagacgtccatttcttctcgagtaacccagcgtgttttgacttagaatccgggacaaagtcctgctgactggtttctgctcggaaagcatcgtacgaagacgttaggccagaattatagagatagtcaagaatggacttgtggctttttttgaattccaggttgtccgaacatgtcgtccgaagtggagagataaacaacgatgatagggtagccaaaagaagatctaggcgtttgtttaattcaagagaccggaacatagacaagtgaatagacgtacagctcatccttctgcctctcgcttaatatgcttgtcatgaggcgattagacttatcaagcgccgctcaattgatccaaacaaacgatttcaagttgttgtagtagagtgacaccttcagagatgggtgaagaactctcaacatcggctgtcagaggcagtctcatcactagctgtcccttccggagatataacataataactatatggcattggttactggaaggtaaccgtaattattggtggtcgatgcatggctcttctgcactaggatgccttccggctgcaaaccaccaagatcttatggctcatgggttcagtctttccccatcgatggggcagcgacggcgtcagcttcagcttcggcagccggagcagcagcagcagctgcttcagacaccaacatcactgatggtgcagaagattatcctcgtcaccccgacttctttgtatcttatcagctgtagagatcgatgcctggttttttgcattcaaacctatttgatcggtttgagtaatcgtcggtcacgatgaacaacgtcgtggaggctctacattccacagacagagatcattaggtagagatcatcagatagagaggcaaatctatagagagataaatggacggtgtggcagagtcggcatactcataaaggagatgatatgttcgatcaagccatgtgcagatgataaagcaatagcattgtgtcaggaacttgatctgagtgttacaccccggtaaccttcttcttctgtcgcttgtcctgctgttattccttatgctctcttgatacatcgacatacagaattatgatcttccagcgcaagcgcttctagcaccttctgtgatcatcttcttatgcttaaccgttggagttcgagaaggatgcacaagacaagcctcctttgacacccgtagcatagtctccagaacatggatcctttgttgctccctagtactatcgtcccctgtgtgatatcgatcttggcctttcaatctccccaccttgcgcccttgtgactcttaaaaattagggagctctttgggatattctaatgatggagtcacacagacaacagttgattatatccagttcttctgaatgtagaccttcgcaactgattcttccaagctaattctctgatcctgaatctctggatcagaattagaactagagaatcagattcagagattcaggatcagagaattagcttggaagaatcagttgcgaaggtctacattcagaagaactggatataatcaactgttgtctgtgtgactccatcattagaatatcccaaagagctccctaatttttaagagtcacaaccactcaagcaagagagtctgaactccctccttgccagccacatttccctcctgattgcgaacttcgtatcctttccatttccctttgaacctggatcctaacacattgggtgcgtgagctgtgttagtaacggagaaggataagagacatgtgacccgcagtgggttacagaagtggctgcatgaagttcgagctctttggttgacatggtcgagaacagtggcacaaggaaacatgatgtatcgtaagacgatgattgagtcaccaagcttgatatagaagaacatacaacacactgtagcacacagaaactgaaagaggtttgagaatagattaccagaagagagagattggaaggaaatactgtgcttaacgaaaacgattgaaggtatggtaaggggacagaagttgtatgaaaatgatgataataatggataagtaaaaaaaaaaggatgcagcaccatgaaagacgacagatagaaaagactagatgtctaaaagacggagtttggagaggagatcatctacagacagtatttgccaaggaagcggtatgtcagatcttagtacacatataaaggatttgtagagaaaagatggcagaacgagagaacgaaccgatccgatatggcttgatgatcacttcatccattcccatttggagtgcctgttcaatctggccttgtctgttgagaatttacgtttgaaagcgagtgatcaactttagatatggtctttactagaataccagcagacaaacgaacagacctggcgtttccagtgagcgcatagacagtgtttcgctgggcaagctcgccagaggcttccatttctcgtatctttcggatagcagtcaactaaagatcaaaaacaggaatagaaatcagattccgatcgcaatcctgatagcgacagcgtgacgaggcactctacttacaccgtccatcacagctataagaggtcaaaatatcgatgtttagccatcttcgttaaaaagacagtagaagaagagtcttattggatgacacatacgcatctctaaatccatcaggataactgaatattggaagcccaaagctgcggcagccatgatgagatcaatccctatctgcccgttatcagccacatcggccatcaactgcgcctttacaagctgtcttcttaacactgctcaccaagtcgatcaagatagtcagaatcaaaaaactatgaagaatcatactgatcgagacatgaagacgtacccttttggttaatcaggttgtctacaagccaaaatcagattcaatcatcaatatatggtcagctgattacatctcttgcatgatacagccaggagtacacaaatataccttccacgatcaggacagtgctcattttgactgcaaaagggtcagacaagacgattgcaggactctcgatcggaggagttgttattgacgtcgacacgacggatagaatttccaaatctcgatctgttggagcagacattgggaccagcgcagctctgacataaaaccggaaagctaagaaatttcgaatgaggaaatagctaaagacgatatagttgtttacaggcgagaaagactcggttcggtacatactgctgccttgctcaggttcagacacgacctcgatctttccatccataagttcacatatgcgccggcagacatactgttcaattgagacccccaaaagaattatatgtgaagttttgtcaatcgaaggaaaaaaaagttgatagagaaaagacaacatatttcaacacaagtggaagacacataccaatcctagcccggacccgccaaagactgtaaaatgtttttatagaaatgaacatcttatgattatgtatcatctgtcagctccaggtcacagtttacagaagaaacttaccagcatgagtctgaggtgaggcttgtttgactgttgtttttgaaaacgaaggggtgcgacataagcaaagtttgccaaaggtctgttgatcagaatcatataaattcacatacatcgttgaaagagctgcgaaagctgttgcgctgtcaaaccaggtcctgtgtctgagactgaaaagtgatgtgcagaaaacaggagggtcagactgagaaattgaatgaagtgcaaggatcactacagacctgctccgtagatgtagatatctttatccaaggaactttgaaactcaaccgggcggatttcggccgtagggggtaagcatcggtcatcttgcggagcatcttttcgaacctcgatagacacagtaatttctttccgagtagacgtagcagtaaatctagcaaagagccaacatgagccactcgtagcaccgcggatattgaaagtacaaaaatcttctaatatacatacctgatagcattcgaaagcaaattcacaacaacctgactgagccgtcccggatctgcaaatatcctgttgttgtggagatacagccatcgacgatgagattgacaatatttcgagggagaggacatcacatttggcagaaaagtgatactttgtgaatccgagcttctgaagaccaagaagactttgcccaaattcgattgttagattgattcgcttcagacgacattcacttgcaaacgtggagacaatccgttttacttccttcatgagatccatctgaattgggaagatactgtaatggaaacaaaaagaagtcagactttctcgctgtcgttcccaatgattcgcatgggactgatttactcgaaggtcgacaattgtatacgagcaagctgtggatatatgtttgaaatcagcggttgaaaaatggttgtgttttacgttgaaatcacaaagattacttacacttaggacatcattagcaatcctttcttgggagagggccatagtatagatcgcatccagggcatctgatcacagaagccaagtttaaaaccagttcatatgacaacgcgcaaacgatgcataatgacagatactcacctatatcttcttcaagcatacagagcaaactcgacgtggggcgaagcccttcgcgggaattaaaagccttctgtaactcgccatgtaagactaggtgtacgaaagctaattagtcaaggtatgtacgctcaccacagtttgaccaagacttacaattcaggttttctctacatagcccagcgttctgaagaatggcagacacaggattacggatctcatgactggtcgaagatgtgtatgtcgaaggccaagattagcacgtcttccacaacaatctaatcatcgggaaaagatgtatacctggtgacatcgaccaaaagttcttgttgtcgtttttctacgtcgaaacagatctcggaggttaatatctaaataataagtaacacgtgtttttatgcgtagtaccaaacttcgatttgcttacgttcgattgcttcatttctactttgctcggcttcattcattctaacgtgcaattctagcgtgcgtctacaaaaaaaaaaaaaggagaagaacatcaacacaagatcaatttcttttgacagcgagaaaagctcactcggcaaattttctttcgagctcaatacgtcctataaggagaagaaaggacctgaattagtaacgtgcggctatgagcctggttacactcgaaccatgtacaaacgtttgcccatttgcatctgagacgaaaaattacgaaaaattgtcagcatcaaataatatttgtgagtcggagatataattgaacagacctgaaggtgagatcgagcgactgtaatgtgaaagcggagagttgaaagatcagaataacatcaagagggtttagaagaaaggaaaagcctgcatactgagaaccttagaactaaaaggtttagaaagatgatctaggaattgaacaagcaaatgaatacggatccaataggtcatctatcatttgtaggatatgcttaccctcagcgcccatcagtaacccgttcacgacatcttctgggcctgccttggcagtgactataaacatggatatcgatcagtattagaccgaacctggtataaaccggagacaggacaaagaaaatgagaactgactcaaaattactgggatcaaagcgacttcagagttcgtacctttaagtagttgaatcaggtcatatccatccgcatgaggcatcatgactgagcaaacgccaaaaagtatacgagatgagtccgatagacaggcactcgatttgggaatgtgaagtgatgaaacatactatcggagatgataagatcaggctgatggagacaagcgagattatacgcatcttgaccatccactgcctgtatgactctacagtattgggaaagaatagagaccaagtatgatctcatatcttggttgtcctgcaaattcgtaagtaaatatagattttcaatatggacaaaacatatctttgtaaacattatgtcaaggtaatcgagaggaggaagagactggaacaaccgaagaaggtcactcacatctacaatcaagatcaaatctttcttgctccaaaacaaagtggacggatccatcctactgaacgttgacgaactcgccgtaggcactgaggaacttggatcactttccgggatcgaggatgatccttgaccatgtaacgtgtccgagtctttaacagtcgaattaatagacgacgtgttctcgctcgaccatagagcagcttcttcaataattccatgagcgtggctattaccagttcgagtgctatccgtgacaacaacgccgtcttcaacaacgcgaccagcgggtagatgagagtttcctagagggattttgacaatgaatttcgaaccatgatcccctgtaggagactcatcgatagctgtagtagtgtcaagacatacgtaatatgaatctttatagtttccacgggttttgtgtcacgataacaaacgacgtgcaggatacgtactattcgagatgatatccagaacaccactgagagaacaaagatcagggataagtgagagtcagtctcgcctctgatgatcgtgcaacgggcgatgctagataactgacccatgcagtttgacaagttctgaagtcaatgataaacctatcccagttctattaaaagaatacaaagaaaatccttgatttcttcagacttgttcatttaagaaggatggcaatgtcagatgacaaacccctcaatagatcttccaattgacgcaaccctgtggaatcgctcgacgacatgaggtatattctcctctgtagcgacggaatcattcagaaagcaataaattggattattattcgacatatcagatcagacatagaatacaaattcttccttacggggaatcccaactcctgtatcctctactccaaattcgattgagttggtgtgatattgaagatacacccggatttgtcctttgagacagtatttgaaagcgttggaaatcaagttaaaacaaatctagagaaaggagataaagattaggtattaatgaccgccttgatgacagtagatagatggttcaagcatgccttctcccaaaattcaggatcgactacgtaagcgtagtgagcagatatggtcagctcacgagaccaagcagtgatattggatataagatttcttaccgtaaactggtcttgtatcagtcacatcgcattccacaatgtattcgattcctgatttctcgatcgcagatctacatagatgccgtgaagcatgtcacagtagattagacgagtatgattacatatagaatcgacgagtacaaacctaaatagtaacgctaggtcggcagaaacgatgcccagctgcttgggaacatattcaccctgaaccatgtcgcgaaacagatggatacacacgtcatgaagagtaaagtaaagcctctattgggaatagcgatgacagatataacatacctccaatcttcctgcgtctagtcggcttacgtccatgagcatatcaaccagacgactcagtcgacgaacattcctggacacaagtgagagtaatgacttcgatatttcgctttgaacgggatcatgcaaaagatcatggaccggtccagcaatcaacgtcaacggagttcggagctcatggctcacgttactaaagaaggctgtgtgaaaagttgtcaggaacatgagtggaacgatgattagtctgtttacatagatgtagagagggggttgattgaagttagcttaccagtctttgccttgtcaagcagggacaattcctcagctcgatggatctgagcctcgtagcttgtcactccaacgagccctgttgacaattgtaaccgcaagagttggatccaggactatgagtcaaaagaagagtggcatcagtcgtctatgtacgcgttgaatgaacaggcaagacgctgacgcttactctatagtcatcttcaaaaggtcttcgattcgatggaaaaacgatcccaagattaattgaccagctacagtgttctcatcaagatagaattgaaagtagaaatatgactcgacataaggaaggatcagtcaagaataatattcaccttctgctattaagccctatgattaagaccacatgtctagccgtttttggatcttccgaatcagctactgcaatgaccactgccttcttcggcaactcgccccaacttcggctttcgaatccttcaaccaactttgagcagtcatcaactatgaccttttcctttgataagagcgcaatatcaattggccagggacaaggcgtgatcccgttcattgtggtaactgtgatcaatgagccacgggaggagtttgtggacgatatcgagtctcgatgagacaaccgtccaggatttggaattgattctgagtccaccggcccatgctctatatcgggtacgacggttgtaccggatgaccccagtaattggtctgaagatgattgattggcagagttggaggaagtataggacgagaaaggactcgatggactcggtcgagtcagaggaggattcttgtgatagtcgaatgaaatcgaataagatggaggagcagaagggtggtctggaggaacccctatagactctaccaaatcgatttttatgtatcgccgatcgtcctgtctatacttgaagttgttcgtggtcgaatacgccatgaggaaaggaacatcgtggggacattttcggagacaatcgactgcagtctttacgaaagccgcaacggacttggtggtcgaggtcgattgaacgacatcttgtagtgttttcaaacgtcgctcggccaggacagtttcggtggtttcgaccgaacgactcaacaggccttgtatgattcctcgatcgccaacgactgggacccacgaccacgtgaagtctttgggtgtcaggagagaaagagaagagaaagaaaaaacttggatgagcagttactcaagcggggatgcagaaggaaaactagactgacaggtctcctcgagatagtcttcagagtttcttggtagaaacaacaggtctataatttccgaatagcaaccgttagtccaattgacttcacagaggtattgaggctgagcgcttacgaaccattggtgcgatgaacggtgcctcctttatacatctgggatttaaaatatgaacagccagttcgtatttgtcaatcttcacatcatagtcgtgatgaccaaaaatttgagggaggcgcaaacttctagtcggactcaccacgttctcagcatctggctttagggtcgtccagagctctttcccccaagcgtcatctccccctttgcccagaagacctggatgtcgttcgccggacatctcggcgtgactatcgttgtagatcataagaaactcgggtccccacctgagtttttccagatgtacaaaggaaacgatcgcattcagtaatctctttctccttagaaacgaacgctatagagttttggtagattctcttttcgctcattgaaggtatggtagcaacaggaaccactcaccataagcaagattgtgtgtctgttcccaaaacaattgatagcgccgttaataaactttgcggccattctgattttggtcccaagctggtggtctcccacgggtattcttcgataagctgtttcatcttgaatgtagatcttctcacatccgcttcggctaatgcgttatcagaatcagatttatttgaaggtctttcctgtgtgagagcaggatccaatctcttcagctcggtgacaggcggcagaccatgaacgaccgtatctaccggctggggataaagctgaaggatgacaagaccaggcgttttatccgaagatgacgaaggtaagagggtgacctgaggacggaacgctttcgaagaatgctcaggtgtcggccgaaaatatacaagatcgtagaaagtgttggcggcatctgcaattgtcgagtttgaagtgttttcaccaaggaagactctgttgagaaggctctcgagaagagataccgagttgtcatcgaagagggagatcacggtgtttgtttgaccttcagtaacgaatggctcgtgtgtagatgttgcagaaggatcagagctgggaagactgctgattatagctgcagggttggcccatatcaatcgcaacggctggtccaactgtgtgaaaggatgaaggatgatggaaggaaaagcatttgcccggagaaactgaatcaacggaatcgtctcgatgtcgacagtggacggcatcttgtaagaggtagagtaggagaataaactgggaatctatctgtctgtccgatggacagtgctcaatacgtccgaacggtatggtgaaaatcaggcaaaaagggtgtatcaatttgcaactcgatccgtcccgttttgaccatcatcattaattatcgaatgtagaagccgatgcgcgactgatggactcgggccattttaaggcgcgcatgtgtaagaggcgaaggctgggttggtaacaggaaggttacgacatggtaaccacataagactcttaggttctagttctcagaccctgtggccaagtagtatgatgcgctgatagtagagtgcgctgacagtatggtgcgctggtagtttgatacgtcggacatagagctttctataggtagagttttctagagaatagggaaggaagaagttgtggaagtggagagtttacggatcacagcttacgaaccaggtgtaactcaaattacatccccgacagcatgtgaacaaaagcagtaatataaatagtagtaaccgtatcggattagataaactgtgtggctttcaatatgtggattcagtcacttggcgggatgtgaccaatgcagctatgtctgtagatgttatccacctctccatccacgaagtgtcagcgtatatcttgtcattattacaagactcctaaatccgaagactgacctctaccttcggggatgtggaagtatcgagccatacaatctcatggagccgggtggaggactgatacttggcgtagacatctggagtgacaacccctttgttggatcattaggagagtttggtcgctacgatagacttatgtatagatttgtccgactggagagatgaatttatataaaatgattccaacagaagttcgggagggtcaagagtcaagtatatagcatagtcaatatcagtggtgatccctattaatccaggcgcaacatatgtttctatctcgagaccaacaatcaagccagctaaaatgaactttcgactccgtcttgatgtctttctgtttctttgtgtctatgtctcgctattccttcgtctctttgcctctcgttctatttttcttcttgtatgttcaagtcttcgtatgtggaatgtatatccttcacaagtaagtcgaagggatgagaatcctcttccacatcagatcgctcttcctcaatagaacactcatcggttcctttgaggagtttcgttcttcttgtgttcggaatgaagcaccagagggcggataaggcctcgacacagcctactgccacgaccgcaactacattcactatttcgagatgcccaacttgtaaacaagtcggacactcaaggcaatccagccacctctgcccgttctatcatgcacgccagagggcgatagctcgcgctacttcagtggttcatctggtcttgtgggcagtaaatattgagtttagctctatactcgcctccaaagcccttgccagtccgatcagatctgtcaacccccggctgagtcaggtaacccttgacgcacccaattgatgaattgacacgtccagaaactctgctctcgtcaagtcaccatttcggacttcttttcgatgatgcgctcacactttcaaatggtcaacacaagcagggttggacgaaatccgcgccaaggggcgacgacacgaaaccaagagatcaacgacctccgcaacgcctcgttgcctgctgggcaccagattacagactcaaagtaagtgacctctatatgactcggacacttggtggaggctgtcgtaccatatatttaaagtcgagaccgaacggcgacggttcgcccggtcgatcagtatggacgggattggagcgaccaccagagcgcctagatctacatcggctccatctgacatcgacgactacaggcggagataggaaggtgaaggcaaagcccgttattgagcagagtacgttccgtggggtgggcagccagagggcgaggtcatgggtctgaactcaggtcgtcggacgcttctctcgatagccataggagagctcgacatatctctagataacggtggtctggctgaacggggcacgcagtggtcgctctctcaagtcatggaagcaccttccgggaatggaccgagacgttcggaagcggcggctgtgaatgagaatcaatgcggaagggtcaacagctctccgtggtgagtgtctcttggcctcacgttcaagctgactttacaagttgccttcctggcacttcagaatgcctttctcatcacaggtgtcttgcttcggttttttctttccagaccgtcattcattccgacctgccaggcccgatggtctccgtgctgctactgcttcacgatgtcggtcatacttttggcattcgacgttcttcgccgtttgatgataggaacacctccactcaagcgcgcatatcattcggagacaagtgtaccacaaggtagcgctttggctggctgatggacgtctacgtgccttcctggcgttcggaaacggcgctttcccctcatcttcacctgaattcactcctggccgtgcgaagacgctgtctgacaagcttagagccttccttctgctccaagtttacaaattccaggggtttcggacgtcaagagtgttatctaagtgccatggcgagttcccgggacgaagcagagtgtgggcgatcaaagagtgtcgaagcgtctgccgagtgggtcacatatatattggatgtctgtcgaatgtctcaggacaatgtgttgagtactcacagttctcttttttttctctacttactctcagactctgtgaaatagaaatgtcaattcgtgttgcaatatactgcacttagcccctctccaagaaaagaacgagaggacaagaatgcttgtattgctcactgccgctgctgaagctgacgctgtcgttgcccccatcgatgaggaaagactgaacccatgagccataagatcttggtggtttgcagcctgagggcaccctagtctaaaagggctatacatcgaccaccatcggttgaggttactctcaccaagcctgaacatcatgatttgtagcactacactgtgtcttgaaacaaacaggattacgtccgctccaggaggtgatataaaccccgatggtcagcaaacaaatatcaatcggtgaattttcagtggtcttcatcgcctgcggccgctaatttgatgttttatacacaagcacatacgctatctagaactctgggcatgctctgattctcgctcgcgtctatctttcatctacctttaactcagcacctcttcttcaaccatacgacatcgcttcatcaaatcgctcctctctatttctgtagcaaaggtggaagagataggaagaacgaacacaacaagaggaacagtcgagaggatagcaaacgcacagcatgcccccgcaacaatgccagccgataactgaatatactggcctggacgactcttcgttgcagctgccgttgattccattccttcgaaaccatccgacaccttcaatcattatcgctcttccccatccgactcagcatgtgccgttcagaatccgcccgatctggtcgaatccggtggccagaatagggacgaatcctcttctaggctgcatagatgataattcaaacttgatccttcaagttatgatcgccaagctcgccagacagctcgcatcccagcgagttttgccagacggcatagacccatcaaaatcacaatcgactcttcacccaaacgtctcaacaggtacagattcgactcacgaacgaaaacggatagattcgtttcagtttgagagacccatcgatccgagcatggtctctgcctcggatttgatatatacttgtcctcctgaacacgatgcgccagagggcgtttactttcctactttggttcctatagactcggatgggtcgtactcttcaccgaacctctcagaacatcgacttgcggtacttcagctatgccccgttcaaggcgctatcgctcttcagttccaaaagccatacatttcagacacgctctctaaagctattcctagtgcaccctcggcaggcaaaaaggtcgtcgatgaacctacattatcagtgagcatggatagcatggggatttctccatacgacggctcaacagatacgttgagagaagacccagagaacttgaaaaggcccactcaaataccactctcacctagacaagcgaggaagactatgttcaatgtgcagcaacttttagataactttgattggcagaatacaccgctgggaccaaaagcgctatggccccaatctttgaaatcgctgatttctgtagtgtgagtcaaccaaggttcttgactacccaatgaaaatccatatggctgaacacttctgtttgtccacatatatgcccgttggaatatttatttattaaattggggaaacttctatgattgatttgttaggatgaacaccgatcatgaaagtacactttggtggggaaaagaccttactctcatctgtaagttacgtcgtttcatttaatctgaagactttataactaatcatgtgagatcatgctttgtaatgttctagataacgatgctgtgagtctcttcgtttttaactattttcgagtaatctcttctctcctccttttcgtcgttcacaaacattctttcttccgcttgtatttcggttttccgtagtacgcagaaatggttggtccagtgccccttcacttcggtttactatcaatcattcatcaattagcacctcgtttgtttgtatccgatttgatttcgggtggaacagctgttgcgaaaacatccattcaattttggaaaagtagcatcagtcgcgtggtcggaggtctggccagagctcaagtcgactgctctcaatatgatggctggtggaagagcggtcaataaaactgatggtaatttatctttcgccttcccttcttcctctttgacttgccgtttcttcgagtcattacttcgaagcataactcccattacaggctatttagaatatgaattttttgtttcatcctttctacgcagatctattgtttttccaaagagaggttaccaaagctcctgaagagacttacactacttggtcttggattccagtcgcggttgagaacgggtaagatcgtcaaacgtccctatgtattgattcctgaattgatcaataaacccgagcgctaattctgccatggacgtcatttcagcgagattggtggtttgctcaattattcggtcgaaaccacaagcaacgtccttgctagacgtcggttcgagatgcttcgttcactcgctcagagtctttgtgcgtttccctctctccttctatgtttgactgattcatatcctcagtaaagtttatagtgcacgggttcggtaaatatctttctttccacaatctatttctcttaacacagccgtttgccagagcttgtctcaattttcagaggcagctttgaatgcgatggcagaaaacgtacacgatcttccgttcatcatgctttactctccgccaactgtccaaaatacatcgaccactactctcgacctcttgggcaccattggagtccccggtaagtattctagtgtttatctgatctttatgcaagtgctactcaggtctaagtcttgttaaatgggtttcctcctttgtttcatcagccggacatccttctgctcctacgaatatcactcttgaccttgatatcgatgccaactcgacacatcctagcgttactttaatggaagttagatccacacattcagaaccgagtctggccgaagacacagagagtatcgttttggctggctcaagctctcgatcgacatccacacgaccagactaccaggcgggagaagcgactggatgcccttggccgatagcacaggcgttgacaacgaatgagatggtattcgtggaagattgttctagtttggtgaccggattcgaggtgagaagttggccagagctaccagagacagccgttgtgatcccgatctcggatgaggattccaggaaaatagtcttcatatgtgggctcaattctcgaagaccttgtgagtttaccgtaatcttcttgttttatgtcagcttcttcattcagttcgaaattcttattgcaatatgtattgtaacatgcttctcccgcgattctagacgataaggattatcagagctggatccgtctactcaaatatcaacttgcatcaggcctcaaaggagttgccagtttccaggcacaacttgtgaaagcagaagagctcgcaaagctcgacagagccaagaccagtgagcggttcttcacaatatgatatacatcatttacaatttattgacggactgtgtcttcgtagcctttttctcgaatacatctcatgagttgaggagccctttgacgctcattcaaggtgcgttcatattctctcgtacctggccatactatgtgtttcgccactgacatattcgtgatcactcttctgctaaatgcttatccaggtcctatcgcagatctgttagcgatggaaacaaacggaggcagccgaaaacggcttcttagccttgctgatcgaaactgtcaaagactgacccgactcgtcaacatgctaatggatgtctcccaagtagatgctggacggatgaaggtcagaatactgttttccttttgctcaacctgtggtttgatagatatccacagagcctgatagtattgatgttactcgcttttgggctcactctcatacagggtgtattctcaccgaaacaactcggcgtctacactgcggatctggcgtctctcttccggtacatatctttttttctcttgttgaaacgtcgttatatacaggccggctaacttctgccctttcattcatgttctgcgccatagttccgccatcgagaaaggcggcgtgacttacgatgtagattgtgacatagaagatccaagactagtgtatattgacccaggtaagcttctctgctcatttggtatatatactcgttgatgtacaaagtctctcaaatactgtgcgcccaccttgttatagatctatacgagaaaatcatatacaacatcatcggtaacgctttcaagtattgcctcgagggaaccatcaaagtctatcttcgatatcacgccaacgaggtggaactgagtgttattgataccggagtcggaattccaagtatgtttttcatggtttaaatcacattttaccatagcggattggctctgatgacttgatcggcacagaggacgatattcctcgaattgttactaggttccatcgggtcgcctctgttggccgaagttttgaaggtaccttagtataaccttttctcaatatgattcatgaacatatcgttcgctgtttgctcatcaatctcttgcgcgattcaactctcgaaccccaaggcactggaattggtctttctcttactgctgagctgatcaggttacatggtggtactctcagcgtagaatcatgtagtgagtcctgttccagagccggtttggttgactgttcccagaaacttatatcttattgtcctgccgtaacagccgccgaggaatcacccacaggaaaacacggatcgtctttcatcgtccgcttccctctggggactgaacatctcagccctgacatgatcttagacttgccagaaccgccgacgcacaaagccatgaagtacgcaaaagggatcattgacgaagcgtcgagatggtcgaaggaggaagtcgagacatcgagtatatctgactcaggagagtcctctaacaactcgaataagatcgatccgtcgactttgttttggtcgaaatctgatacggtcctcattgttgatgataatcgtacgctgttctttcatccttctaattttatatatgtggttggtcaaagccaagctcaacaatttttttaattcattttatgttatctgaagatgatatg

SEQ ID NO: 449 - DNA, 86754 bp, Xanthophyllomyces dendrorhous
tcctatggtacacaaacacgcctaccgcacgcaatctgacatcgttgtactattctatgaacgtcagatgtcaattatgagtcaatattgtacagtcatcggtcagttgtcctctccgttgccttaatccatgtttgataactgattttttcattcgagttgccttccagaggcttgcaatgggaaggaagctctggatatagtgctgagttgtcagcctctccctgatctaatcatctcagacggtcagtcagaaaacgcctcttcatcacaatttttaacacttgggtgataactgatgttcgtgaatcaccttcgtagtaatgatgcctatcatgaccgggtttgaattagttcaaacattgaagaaccagggactcaatatatcgttgattcccgtgcttcttggtgagtttcttcacacaaatcacggtggaagaaaaggctcagaatctctttcgacctgtgtatggaatttttgacgtaacagttactgctcgaaacggagacgaagatactgtcagcggaattctcatgggagctgaaggtatgtaaaatgcatcgttataccttggagataggctgcgctaatgtgtgctcttaatgatgattttcttggtagactatataacaaaacctttctcatctagagaaattggtgcgtatcctcttgatttgaactcgcccaccttattgaacagactaacagagtctgtccatccacgtcatagttgcacgagcacatcttcagatgcaaatggggaaacgtatgtacacccacaattaaatcatgattctcgtttcggacgcttaaagctaacgcatcttgacgtttacaggacgaatcgagcttgagagaaaatttgccgagtacgtgatctggtctggttgtactaatggatacttcacttacccatataattcatgacaggcgaaccgtcgaacttcaattccgcgcgcaagaagcagaaatcaaaagacaagaggccgaggaaggccgtcggcaacaggaactgttgatcgatgtcacgagtcacgaggtaagccgctaacactgatcttcgtagtcagatttcttactcagttatcatgttgtagattcgaaatcccgtcagcgccatcttacaaaatgccgagttgtgcaaggataatttgaaatgtaatttccgcctctcattcattagcatagatgtagtcggtcttacttacctctttctttcagtcttccacaaagagctgcacagagctctcacatccgatgttggattgcgtccgaccacatctttgttgtcaatgattgaagaagatgttgaaagcttggacgcgatcatcacaatggctcagtctcaagagcgcattgcgaatgatgtgctcagtgtaagcactgtagacttctgtcactacctcacgattactcgaactaactcccgaaactctacaatctttttgatgatcaagcttgcccgcatacaactatcaactttggaaatatatccagtgtcagtttctttttatccattcaagctctttaagtcatttgctgaatgtgttcatggtttcgtggtactttagtcaaacggatctcgtcaaagagacgcgtaaaatgtaagttaccgtgtttccgtctcagcggagccaaatgtctcggagtttcttattctgatcatcttgttcgcctacttgtagacttgccatctttgcaagtgaagcgtaagtttcaaatacttgatagacatacacaatctgctcgttttgttaatcgatctcggcccttttatacagtcgactcaagaggatagacctgtcgtttacttttgggccaatgcttttatcgcttaaagaatcgaaactagacttgcttacagatccccagcgaattggtcaagttcttatcaatctcttagcaaatgccatccgatttaccgccacgtcgcctgtcagagaaattcaagtttccgtagaggttagttcatttctcatcatcattttgcagcactgtgttaaatctgaaaatctactatcatgaaaaagattcgaaattgtcctccggatgacgactcttgtgtaccaccgcctgcgaacttggactcctcctcgttcgcatctatcggcgaaaaagatatctggatctacggggcagtgaaagatagtggaccgggtctttcagaagaagagcttacgagactgtttcagagattcaagcaagcctctgctcagacgcatgcaggtttgtcttcatcaccgccgtccaaataagtctcttctaaactgatgctctcttttgttcggtatcatcttgtatggcacagtgttcggtggaagtggcttaggcttggttagatcaagtttaactccgactcaagagaaatttaagattcactaatgtactttatttaacagtatgtgtgccgacgaatttgcgagttgatggacggtaaaattgaagtagctagttgtcaagatcaaggcagcagtgagttaacataaaccctgcttcgaaaaagaattttttgagttctaactatggcccgctttcatcagccttccgtttcttcgtgaaagcttctctcataccaatcattaccccaatcgaggccgccaaacaaattactcttaccgagaaaacacgtgcttcaagctccaaggctacactctcgcctcaattcaagagtcttgttctcgttgtcgaagataacttgatcaaccagaaaggttagtaaagccaacatttacagatatctcaatttcatcaacttccttgtccccaaaatgaaacgtttgtttgctacttgtgtgcatacccaaagttctctatcgacaactcgttaaggctggaattacacagattgatttggcggatgacggtcaacaggccttgaatatgattaataaaagagtcgcgcgtggggagtcgtacgatgtggttttgatggacttggagatgcgtaagtagagcttgagctttcccataatctgaaatacattttctcgtcatcagacattcttaccaatcgagcgatctgtctttcatgtcatatagctgtaatggacggtgtaagctcatccaatcgatgtccgaacgtcctattgacctacaaaacttctgactcatgctttttaaaccttcctcctctcaatttgacttactagcttactgcgattcaaaagattcgacatatggaatctactggagagcttcctatacggcacaacgtcctcgctctcactggaaatgctaggtaaatccattttttcgttcactctatcgtaaggacatgttgagcccgaatattgataattttgattttcagacaacaacaaattgagcaagctcttagaatgggaatggatgaggtagtcctgtatgtattcacccttgtttttcaatattgatacatcaaaaactaaaaatcaccatatctctttgtgcggttgtttcaattccaactattagaaaaccatatcgaatagaaaatctgctatccaaattaagaagccttggtgttttctgattaagttgaatatccatatcgccatgaaactcagttctttatcaatcgatgggtttatttctggatctatttatctatttgttctctgttccgggcctttcatctttgttaaattctgggatacatcctttttttctgtttgttgtcttgattatttattccatcgtgttgccgtgcttgactcccaagttttggcatattttcgcttaccgaataactaatgcttaatatgttgattgattatctgagtgtgaggatctttctgttttcctctctgtttagtccaaagcgcgttttcaggggcagaagtgatcagccaaatagcaaaattctctgataatagcaacttaagatcagtcatcatcgtaatctcgaatttttttacatcaaagcctagctcatagcgacccttctcctccgtaaagttggaagtttctgttggcacttcctgaaaccatgaaagttccctctccgtcgacatctacactcatgactttaccagaatcggtagtgatggatttgacaagttgccaatcgtcactagaccagattttgatagtggagtcatatcctgcagaagttaaataaaggcctgaccggttgatatggggtgtgagagtgtttgctgatgagtgtgtagaagagtctaagttcgatgatgatccgtttgtaggttctccatccatggagacgtccatatttgcttcgctcgattcagtcttgattgatgtcgatgttggagttggttccgttgtgggaagagaaaggagggagtgtcgttcggagatcgatcggaagaatttcaagtcggatacgagtgaacgatgtgcaggtatggtgtatgtacatcccagttttcttatgtcccaaatcttgatagagtcatctgcagatccagtagctagttgatacctgtatcgcaagagaagagatgtgtcagacagacaagaaggaaatagtcaagtgaagtataccaagcctacgtataaaccaaatacaaaagtgatgacatacccgttaggactccaatctagagcggtgatttgtctgacatgcccatccagtacccaaacggttcgaccagtcctagcatcccatactcgtccgataccatccagaccactaaccaaccacattttcacgagaaaggcatattaacaacaagattctgaacatggttacagaagtcttccgcatacaagtctttgaagtacttacccagtagctactaaccctccatcatcttgccatccgacggcatacacttcctttgagtgaccctcttgaagcaatagctcttcccctatatttgtttttgagaaaagcagatagttttctaagttcacataccaaacataggaagtaaaaggagtatgaacggaccagtctcggtgtcccaaagtctccaagatccatcgaaactcgccgaagcaagatagtctccagatggatggaaagctactctagctacaggcgctgcatggccttcaagagttctcaatggtgttgggctatatatttgatagaaacctaggataaataacgagattctggcatggcctgacaaaacagttttcaaattgaaagacacaagaacggacctgtccagactccagagtttgactgttccctccccaccacccgtcgccaaattgacgctttcgcttccgagcgacagagtcgcctttggatgccaagcgagtcctctacaatgagtatcatgtcctttgaaaaccgatttttcatttaaattaggcacgtcgaacaccttggccgtacccgtccatgaggctgttgcgatcagcttggaattgggggaaaatcgtgtaagagagattggtcgggtatctccaatttgagaaccgagaagttgcattgtctaaacgtcccgagtcggggtcggatatgaagcatgtaaaatgataagcaagcttttaacagaacgaaaacaattaacggtgtcatgtttcagaattgggacaagcgcaccttgagatccttataagttttcttccgaacctctaggatacggcctataggtaaggccgattcaactctctgtttttttaaccttctggcagaaatgggaagcgagtatgccgctattttttttcgagctgctaagagctggtctggtagactaggctcagtatagaattcttcctgttgtaaaaaaatggcaagcgcgtgaatttaatactgatgcagaaactgaactcaagaatagaaaagagaagaaaatcaatgaagtgacgaatgaaaagcgcacatcagattcttctccatccgagcttgaagagtctccgtctgattcttgaccgtccatgccttcaagaccctccttggccacttggatttgagacatgacatatctcaaacgagcatatctgtcagctgcctgtaagatttcatgattttcagagaagtctgtcagttcaacatgcggttaccacgtttcgaataggcaccacgcgtagcatcaacgattcgaccaggaagagtaatcgatttgatccttcgtatgtcattctgattgacgcgttgtcttgaatgagaagtacataccccttcaccgaacagcgtgattggctctcccatctctctgagctttgctcgaactttcctgtcgtctgttggaacgttagccaactttctggctcgcttcttgcgttccaactcttccaatatggccgcattatcctcttggagccgatcacctccataggtctcagtctcctcctccactgttatgcgagaccccaaaggtaggaagatcaatattcctgttcaaactggacgagcatcaagaccttgaacacgtactgagagcgtcaaggtcgaccttgaatgagttggaacatggattgaatcatcgatatgttgagaggtcaaaggtgaggtgaagttagttatctgacacgaggtggaaggtacgtaaaagaaagagtaattcgaggacccacgtcctgacccgatggattggatgcgctcatttgctgttagattagttttgaaagcacacgagaaggaaattatgctgcttgctatcgctaccaccgctgctgctgctactgctgctaatgatgatgatagaggtcgaacgaggaatgagaaagatgggagagcgtaagagagggacgaaaagggaaactgcttagtcagcacaatcttgaacaccgtaaccatgaatatgcacatttaaggcggatcatccctttcgttgtctttacttcctgttgttgaccatcaccttcattgacaatagtcagcagcagagatgtcaaggcccagagctcgttccagatcagactcgatcaacaacatactcaggcaagtatcttgctttctattcctagtttatctcgaaagccgtgtctaacttcactgtttgtcttgatgttaacagtcaggtacctcttcattcacctaccgatgccccctcaactatcacgaaatccagcaattcctcttcagggtcgcccggaaagaaactttcaaagaaagtcaagaaagaggacatctgggctatacctgctgccggggagatgcctgcgagtttcggattctggaaagatctcacaactgggagatggatgttgattccaggtttgtttgtccgttcctgatattgtgtcgctcttgggctgaattgtttacacgttcatactctatctgaatccctatcgcaatttgggaacgaaagcttcgagtggtattatgttggcgatatctttcgctctctacctcaattacgagctcattcaaacttatgtcgcgccggtccttccggccacgcttcagatcccacaatccaacccatttgctcctctctggttcatatcttatcccttgcccgctcctcactctcagcctggagatcctagattcggaaaaggccttcttgtttgtcctttcatttgtgcctgttcatcttctgagccatcggcttcggtctctcttatatcattccgctgaatctcgacaatgttgattatcaaataggatgttgtcttccttcttcaccacatcgttacgttctccttcatccgacaagcaataacactttacattcttcggccgctcgccaaaaagcttggtatccgagggtccaagatccttcggtttcaggagcaagcttattccgctatgtattatggttccatgggctttttcggattggtccgtacttttataactcataccctcttacacctgaccatcagacttactttagttatatcaatagtaccttatgaccgaccttccaacctggtgtaggtcaaaactatgttcttttcatgtgcgcttcatcatgatagcccttttttccagactgacagttcgtgtgtggtcacgtatgcaatcactatcaagacttcaacacggaagagttttggattggatatccgcattgggaaatgaaggctaccatcaaatactactacttgtaaggatacaatctttttgaacaaagacgtcattatatgcaccccttttgtatgttctcaacaaaagtatttgttttgttgttcgtttgcgatcatcgtgcatccaggcttcagttctcatactggcttcaacagatgttcatattagtcttgaagatcgaaaagccccgaaaggattacgctgagctcgttatgcatgtgagtctatcaaattactgtaggtatgcgtggtactcgaggatcccgttatctgatcaatctgacaaacttcctcccatcaatagcattgcgtgactttatggctcattggtgagtttatatctgagtgtcgcgccgtcaaaccttgaattctaatcatcatgccactgcatctattttttgatatattatgcttgatcataaataggatggtcttatgctatcaatgtaagtgatctttggcctcatattgttttcgaagagttttatcgctcacctcgtatactttggatatcttgatcagttgactatgatcggaaacgctgtcttcgtgactatggatatcagcgacgtgttcctagctctcgccaaatgcgtgaactacagtgagggtcccaagtcgtctggaatcgcgtccaccattctgtttggatggtttgttatcgtctggacatacctccgacattaccttaacttcatcatcctttggtcggtttggttcgaatttgatctgatcccggagtacgccaagcaatggaatccccctgccggtgtctggatggttcactggatgaaatatcaaatattcattcccatcatgttgatccagttgctcaatctattctggtacttcttgatctggcgagttcttatccgatcgattcgaggaacgagggtgcaagatgaacgatcagacgacgaagatgaggatgagaaggtgattaaaaagactcaataatgggttggctgattgtataaaaagcgatttgtagaagcaagagggaccgttttttttttctgctagggcttgcctttctgcaaaaatcactccttttattcttgttttcaaagcaatatactccaaaattcgtctttgcacatcttctccttctttccgtcacttaaatttgtgtcaccccatagcttatatctatcctcctcccatacccctgcttttctattgatcttattccgcgcgcaccaaaaatgattgagaaagacagaagcgacgacgttatttgtctctctagcataaccttgactaagccataatatcattgaccttaagaaaggaagaaaaaaaacgatgcaagagtatacagaagagaaagaatcgaaaggaaataaaagaatgatatgatgaaaacttgagtttgagaattttctgatgattctcgtccttcccgacgagtatgacaggaatcatgcgcggcaaaattactcgtacacaacccgttccagcctcgcttccagccatttttcagccttctctctcatcgctctcgcttctaccgtcagcctcaactctactgaattttgacttgacgacagacttgacaccattctccctcccggttcctacaaacatggtctccaggaaccgcttccaaagaactttgtcgctcgcgagcttcttggaaagcgagacgtatgaagggatcgtcaagtctgaaaggttatatggcgcgtagtgggttcgaagtctttccgtctcgttttgatcagctttgttcccgtcatcgtctttggaggcgatgaatgaggacgatgaagaggaaaggagacaaggagggaggaggtggaggggaatcggcggtggctgagatgatgaagaggacatggagctgtttggtggaagaggagggaagaatggatcgagaactgatggattgtatgtgaggtattcgagtagatctgtttgaagacgtgcagttgaccattgatcagccgaaagagagatacagcgaagacgtgaagccaaaggaagaacatacattctggtggtgtagaggagtgtcggtttacgtcaggcatgtagaactgtgatgataaaagagattaacaagcagttctctccatgaagaagaaggagggtaaacggaaggagcttacctgtgcatagcccaaaggcgttccaaacccatttgttcgacttggacttctcggatctatatatctcggcaacctgggttgacagatcggctttcttctattcttctttctcctacagaatctatctcccgggacaggctgtttcttcttcttcttcttcttcttctttttcttcttcttgagagagtctacaatttcggaatcagacaaggagtgcgtatcttcttcatcgtcaccaagggcgggtagatcgtcagacgtatcatcgtcgatttcaagttcttctttctcctctgtgacatcgtcgactggagtggagaagtaggaagaagggacctgtttaaacggctcggctgtagaattgtacctgtatgcacacaaagcaaaaccaggccatgtcgtctttcctatcggtcagtttccatgagcaggatagccaacgaaacagagaaaagatcggtgattgaaacgaacgtgaatactctaagtgcagggaaataagttgggatcacacttggtccgacattgacagccgcatagtcacccatgtccaactttttcatctcagacatctccttgcaggagtttaagatatccccctgtaacgacccagatttgcttctactcttcgtaatctcgatattgctgtcgaacagggacgtgggggccaacatggacgatgaggaagatgaagaggaggagaggaaggaagaagagaaagaagaagacgcgacaagagacgtcatttgattttgaatattggtcgatgattgagtaaatgaatcagggttcgttcgatatgcgtcaagtgaggcagagtctgttcgggaaggattcgtcaggagtaagttccgaatacgaatgatttgatagcagagcagaagacttatttgaggaaaacgaacctagccaaaagaaatggtcgacgttcatatggccatacgtgtgaccgacgatggtatcctggtaacgcaatccgagaagcccatatctgtaccactgtgaacacgagatggtaaaacgttagcgaggtagttgaatacaaacaagcgcgctctttctgccgaaagccgtcgggtggtgaagaagagaaagaacgcacgcaatctgggaaatagttacccgcgctaggtggaacatggccactcagccaaacctgcatccctctatctctgtagatttcgagctgaacttcgagccaatccatttggagtgctcccggctctgatgaaccgaacgcgcatccgtctaccgctgctctcatttgacaacgaaagagggcgaagaagagaaagacaagaatgaaacgagcatcaggatcggagcttgaatttgctgagtgaatcggtttagacggacctttgttggaatcataccaatagagggtattcaacgagatgactgccaacttgtctgggatgacttctgatgtaaagtatgctcctctttgaaaaacatggtactgttcggcagggatgtagtgtttccagatgctacggagagatagaatagagaagatacaagtatcagaagatgatggtcgagtaggtgacgattgtgtaaggcaaaacgacccactcgaggaactcgttggtgaccgagttcggcccagcagtcaggatgttgtgcgctgttaaatattcgacatttatgagcttttggacggtcgaatatcgaggtcactagtgacaaaagatactcacgataaatatcgttattctatggatcaaccggacaagagcagttgaatggtttttaaaaaaattaatatgcagcctagaattctctgaaaattgatggttcagattgaggacttactcccaaagaaggaacgacggtcacgcctctggaggtgaaaactttgtccatcctagcggcaaccatccggttgagttcaaagatttctttaggcgttcgtggatgagttcgatcgatatcatgtctgtttgtgaacatgagagggagagccaagaaagaatcgcgcgcgcacgacatgagcggtaaatctctgtcctctttccaaagatacgagagactttacctggcgttgtccccagtccctacatagtacacgatcaagttgaacacaatggctgtggtcaaaacttgtcttatgacaaaaagacaagtagcacgaaggcttttcacatatgggaccgactcacagatgacaaagtcaaccttgtccgcccattctttctccaaccagtcgaatgtgaggttcatcaacgacaacggtgcgtcgcaatctctagataacgatacacacaagcatgcgtccatcagctcctttctcgcagagcaacaacatagaagagactataacatacgaaggcccatttccccatctaccaaccccatccttctctttcttcttcttcttcttcttgtctttcttcttcttgccctttctatcatctttcatcaattctccggacttgctcctgacctgtgtcaccagcccagccgtttgatcatggacttctactttgaagtcgtcatttcgggagtgacacgcatccgcttcagatgatcctcgcgcgtagaatggatcgggatggatgtcagttatactgtgatagtgacgcgacgcacggagagtatttttacaataatcattgtgtccgcgttcgtgaaagttctgggtcagagataatttttcgtatagaggaaatactcaagttgatcaagacgggagaacaagagagatgcaaagagatgacatactgaatgaaccggccatgtaattctatcgtgggcgcgatcaatccggaagaaaaagatagatagcggacgaaggaagaaacgttcgtgagattgccaagttctccttttcagtagagaaagacggctgaagggaaaccaattgtcgagccgggaacaacgaaataatggtacgaacgattctcgggtgcattggcaaccaccgggtgagtcagaaagaaccccaagacgagtgtggtggccaacgaggccgacctcatgatgactgtttggcgtgaagtctagcacatggatcaatatttcgcttggttggatggtgagacagagaagccccttcggaaggttaatgtcacgtgatctggatttggctcactgcgatgtcccctccggccttatacacccgcatgtgcaagctggcgaggatcaaggaagacgatgacatcgaatatatgcacgtcttgactttccacgagcttggatgagggatcatatatagcatttataaaaggctatagaacgtcttccatctatactgtagacactggtttcttggccttgacaatgacgaattctaataacccactgtcagcccaccaaccgacgaccgagccggcgacccaccatccaccacctctcgccttcaagaatttcgcaaaacctggaaagacgtggtgtgtgatatctgttatctcaacgttaacgaaaccttggttgcgcatcatattcgccaacatggctggaggaatgatattctcctttggtacggataatagccaaagaaagaaatcaagagtatggcgtgaaccgactgaagaaccagctaggttatcagccaacgcaagagttccgtgaggtcgaagcgcattgaaagcctgctcaagaaactgttctctattctcgaaatgatatgctgcgtcgaggcaactaatcgaggtgtaaatttcgcgagatcgttctgggttcaacggatgagccaatgaatctgatatttgcactgttgtcgaagccggcctccagatggcatccgcctggactatattcactttggtggctgcgttgaccaaaccatctgatcgagcttgatcgatccggtcggttgctcgttgcgcatgggaagcaagagatgtcagaccagagagagaatcctggactggatatgctgaagccggatcaagaacaaggagaagtgagtccccggaaccgtaagcgacttccaggtgatgaccgtgcggttgaagatcagcttgcttgaggagttcaagtgcgagggctagagtacatgcacagaggagtgagtgaatagcgtgagcgccgggtggatgaacaactacagttacttgcctcgacaggcttctggaaagcttgtagtctctgcccagtaacccctgatcgtgacacacaagaaacagactcagtccattaggtatccccaacaaaacaaagaagagtcaaaacaacacatcaacacacatattcaaccactctgtctgtggagggaggtccgggtgaaccctgttgagttcgacatgatcaaacgtgtatggttctttgtctgtatagaatctggctcctatgaacacggcgatggcgagactgatggcgaggccgatgtgcggaacgcgtgtgaacgagatgttcattgtcggtggccaaaagttgtaatcgattttggaaaagggctacaaaaagattgtaataaaatcggaatctcgagaactgtgcggaagtaatacaaacgatccgtagtcttgactgcaaagtaccatcgaactaaactacggactttctctaatgggaactacaaaatctttgtaatgtgtaacatatgagcagtcggtcactttttttcgctttgttgtttcacctctttctcccatcatccatcgtcttatccatagatctctcgttctttctttctctttcttcctatcatttatctgttgctcttcagagcttgtctgtctcatgtcttctccaacatctactcctccttcagctggcttgccctcaggtggatcgcctcccggccctagcacgtcccctcaaccacctacgcttccttctggacagcagcaacaacaacctcagatccttaagccacagcctcctcctatcaacggccttccccggcagacacctcctatccgtcaatactatcctcatcctgctgcacaccagaacgctgcccatgctcaacaacagaacttctatcctcctccgcagaaatcaaccaaggagactcccgctctagccttcgcggagtccgcacagcagtataatcgacggttccaaggtatcctcgatcgaatcaccccctactcggcttaccgatggctcggcactgctgtccttctcttccttttcggccttagagtcgtcctaggacagggatggtatatcgtcgcctacggtctatcaatcttcctgttgaacatattccttgccttccttcaacccagattcgatccttccctcgacgctgatcttcaagaacaggatatcgaggaaggtggtgaggctggctcccaacaggggcctcggtcggatgatcttcccactgccggactgggtaaaaaagtgctcggtcttatgggtatgaattcttctactctcaatgcggatggcgaagaagagttcaagccgttcatccgacggcttcctggtaagtacatctccatcttgtattctctttgacgcgccttgatctgtagatctcagacggctttgtctttatttgaccatgatatagagttcaagttctggtggcaagccacccgagcgacgttgatatcccttggactcaccactacccgggcagccgacattcctgtgttttggcccattcttgtcatttactttattacgtacgtccttttccagctggaacttatctcctctttgcattctcatattgtccgactacgcaactaatctctttcccttttgtcccgcttctcatgtctacagcctgtttgggttgacgatgagacgacagctccggtaggtcaacagtcgttgacttgttcaatcatcgctttttgctgaacataccaatttgttttcttccctccttgatctttcatgttgacgcgtccttattagacacatgatcaagtacaaatgtatgtcctcttctcacttcaaaacgtcttttctcttcgcatagattcaaaagattctgatgcaatttttttcgaactgttacccctcgttggcagatattcccttcgaccttggccgaaagacgacttatgggagaaagtgaaattgagagatctttgatctgcgattggaaagtttgtttctttccttcttatctccgtttgtgtggttggccgaattgagcagacggaaggatttgcatatagaaatgtcaataggcagcagagatcatgccagcttctcgatactgctcgttctttattatccccaccttctttttctttttttgtaaacccttttgtttctcttctctgtttgttttatacatcattcttttgggcattgtgctttgctacttctccctcccctttccagaggtctgacatcatctctgtttgaaccaaagtttccactttcttcgatatcgtagagttatttcacatgtccaagtcgtctcatttgtccgtcataagtcagaagggattaaagatagacagaacgggaaagatttagcatgaacatcaaattgagacaagagactacaaggacaaggctggggtttctatatcctccaccctccagaaccaagatcaacagctatagcccggcttccacctttctcatctccaccgtctttcttgtcatctcctccgtcagcatcgtcatcgtcttccacaggtcccagacctaccactctgaacccgccgttcttacctctaatcgcttcgatctgtttataagtttgcataagagccagtccaagggatgcatcagccaaccgttcacatccacacgcgagctcgaatagaggtgcgagctcacctggaaaggttctttcaagaacagctctctcgttcgaccgagagactcgatggcgctgactctgtccatgacgctatccaggaaatcatcaaagcgatcttcgttgattatactcttgatggcttctagcgtcacatgagagtcgggtcgtacatgatggtttacctaaagaaatgaacaaacataaacaacccatcaaagtagatgacacgttagttgacttttaatctcggtaagtaggtaacaaccaaaaagtagaggacacacatcgatagagattatgttcaagtgatccaacctgttcagataatcaccacgggtcatcacctgtcttgcccgaccaaatgtcacataacccaacaaggatggattgtcttctgtagcaggttgctcgatcacttcgttagaatggctacttgaggtgagggtctctttcgcctgggcaagtgctcggaggagtagcctgattgttttgaacggaatgaaaagggttatacacaattgaggactgggcgagctatgagtaccaacaagttacgaaccatgaagatgaagaccctacagaagcccacatccaaacataaggtgagattcatgagccttcgtcagattcatcgcaatttttcaaatcagatagaactcacacttcatctcctccatcttgtcgtcactggatgatggtagggcatcgagaaaggtaaaggttatacatcaaattctcagcaagtctaaaatgttttctgcgacagaaactcgagacatagacatactcaacatcaggaatcaaaccaattctaaagttggaccagattatgatttgaaattagcacaaagcgatcgaacccgatacagagacacatttgaaactcaactggctcatcaaaaactctctttcgctcctgaccatgaattgggcttcttccatcatatcctttgccctcgcgattctggtcaggtagctcgttcggccaccgacgagcttgacacattctctcaagacggattctttaggtggatcctgttgtgggaaggtatccaatcggagatcccggagagcgcgaagagcagtcgcgtggggaaggtcatagacagagagaatctttaaaagtgcaattattgatgagaatgagcgcacagatagcctggatcatggaaggaatggatatacatactcgcatacgggatgcattctttcggagcatttcatagggccctataaacgttccggtaaatttaaaacatataaagaacctcggatcagcgagaccgataggctgagaaaggttttaaatacgtgtgcgtcgaggagacctacagaaatcgtcggtggtaaacaccatggtgcagatccctgcgtccgaccatgcttccgctcgctgctgaagttgatgtagcagcctgtggccctcatcatcattaggaaacagatgaatgtctgaatccagaatgatactcacatgtcaatacgacgcacatagtcaggaagaaactggaaaggtagatactgaccattgaagactaaacaaagcggtctgccttgtttcttagtgtacctcaaggcaaccttctccaacttgttcagtgcgcgctcgatgtcgagtgatggccctccattccttgggtcagctctggagaacagaccaccctgccaatcttcaaagaaatcatagttgagcgcctttccaaatcggagccggaagacttcaagatctggatgagcctcaacaaaggctgataattggtatgaaggcattagtgatgaccaatcaactcggctcaagaaagagacgaggcagaagagtgaaagaagataggacggaccagctccatctgcttttatagctcgcatggaatctaatatcattgttgatttgccagttccctgttgttggcaaatccaacgatagctaatgtgagcttatatccaaggtgaagatagaagaacaaaatagttgacgaagtgctaaccttaggtccactgatcaagtagtatttcccagattctttaccgctgacaatgcgatcgaccaaggcctgctcgaatctaacgatatgatctggtcttttttccttgtcgtcggaatccaccgagtcaggatctagaccagccttctcgagctgtcgcctctttctccgcttgcttcgaagagagcttgtatcttgtgaaagctccaaggcgggatcatatcctggcgcaaaagctttctccatccggtagagaacgataaactggaatagccccgcgaacaaaggacagagtttcatagattaatccaagaaggatcagtgaaacagtcacttgtaagccgaacgacaagactctttcggaagatatctcaccttgtaccactcgagataggccattccacttccgaacacaaggaacagaccgacgcatgtcgttagcgcggcgtccagcatgggtgagcttgtgaaggaagggaagaagcctcctttcttggaaccgtcgttggatttgggtgaatctcttttaggagattcatccggtccgagatctgggatattagggctcggagatggattcggagcgaacggggatgacacgtaagatctaatcaaggagatggaggcgaggcggtccagagtcgaaggttggatcttgttgatcgagctgaattgtgcaaaggacaacaatctcacggcaggcgcggctctaggccgtacaagcttgcagaagagactcataacgactagtaggactggtgggcagtcaaggaaatcaatcgtctccttataaatgagaccaggatggagatggacgaaagagaacgatatcagttcatggtcaacgaaggttgatcaaactccgagttgcttgctttcttggctttcgtgacgatctttcaaattgttcgccacagccattgaggcttttcgtcgccatcttcatcatcgccagcaacaacattgtatctacagtatacatgtatctctctttctatacggaatgcattaggaacgacccagcacatgcgcaaacattcggcgagagaacgtagcctgatgaggctgtgcgttctcgagagctaaccggatgaaagttctagggatactgtgtcggacaaagagagtcgtcagaattcgagttaacgcaagatacagatgacgaaaagcagactgacgcatccattcatcctttcgccgtgagcattgtgcaaaacatcatcttgatgttattatctgtctgctaggtgatctcatcgacccatgactagagaagcagagaggtcgacgccttgtaactcagagaccgattctttcgtttctgccaagagcttccttgcgattccgttcagtctgtctgaagtcttcgatcgagtttccattcgtcgcttgaacgtctgtagtcgtgtggccatcggaataagaaacatgctgaccggcaagggcagcctgatcctctctgagctttcgaaagaacttttcgacgtctgcctgatctttcgagttgataggcaatcctgtgggttcccttctgatcatctctggactcgtgtcttggatttgggtacgggaatgtgtgcacagatgggtgtatgctgatgggtgtatgcggcgagggcgatagaacaacgcattaggaaacttctgtcagtttcaatacaaaatagcccgaaactttctaatgttttcattgctggctttgttttcttttccttgttttcttttttagcgctctgcattcacttccatcaacccacaactcgccttctctcgtctactcttgtctctttctttttctttcttcttcttcttctggctactcaatctatctctaggttctcgtcatcctggaacccttgggttaatccgtctcgaggctggcctctcttctcctacgcttgaccatgtccaataagtttcaagatgcacacatgtactcccccaactcgcccgtatttgcccatcattcgtccgacgatgacggtgatcatgccgtcttttgtttttgcggtaacgaggtagagcccgatgaggagggagatatggggatatattgttctacaggtgtgtttttgtagcacttgttctgaggtagaaacatagacaggatatacagcaagagcagacacatcttaagagtgctctgtggcctgctttgatcatttacccaaatactgattcgatccgtttttccaatcgtcgttgtttcttgttgatcaacagcctgtgctagaaaagacgctctagaagcgctctcttcgaaccataatcaaccccaattatcctcctcgaactccgtccctccaggatcattctcatatctcaactcgacgcgtcagccaattccgtcggcgtcgtgtccagattcacttgcttacagccaatccgggcaagtagtctttcctccgccactctctgagggcaacttgtctgggttatctcctgctttgagtactgcgtcctcgatgtcctctatggcctcgtctgaagggatgtcctcccattatcgtcggatggaaaaggagcgggttgcccttcaacgccagaggaagaaagaacgcgaggaggctaaacaagctgccgcccatgccgccgctatggaaatactttcaacccagcgacggatccgacagcaacgagcagagtatcatctacgaacagcatcttcaaactctatatcgtccaaacctccatcctcctactcgttttctgctaacatgaacaataccgatatcaactctcacatttcttcgggaaccaccttatccagaaacaatacagcctcttctacgtcgtccacccagagtcgttacatatcgactcatccgtcccgagcaaaaacgccggatctcatccatcatggtcgaaacgaatctttggggtccaacacgtcatctatctcgtcagctgcgagcgtcgcttggggatggggctctcgatccggctggggatcacaatcgagagagggcggggaggaagagattgaaaacccttatctgattcgagaggaggacgaagagttggcagacgacgatcttccagatggacatcatcaacttccgctcgactccgtcaacttgaagcagacgggaagtttgatgaagcgttccaaggccaatctatcaattgtggatgccctcgatcaagctgaaccccaacagactgatcgagggggactcaagatgggagcgttgttggacgatatccttgatatggaacgtgggtttactgttggtgggtcgagcagccctcgatccaacgtcgacggtcgatctgatgctggcgcatcatacattccaggaatatcgccaagccatccaaccaacaactcaacttccacacctagaacacacacaaatcctcttcacaatgaacgctccttgtttacaactcccatgactgatgctgatacattagagatagacgctgcgcctattcaatctatatcaacctcgtcctcagctgatatgttacgtacccccaatgaacaaactggacctgtatcgaaagatgttccgcctcatctagcaggtataactcaggggagattgaagagaccatttgtgtcgactccaccttcttctcctcatacgacacttcaaccagagtcttacgtctcacggagtcatcaccccacgtcttcttccttatcatcaatatcaacggcaccctccgcttcaactagatcaatctcaatctcaaaattctcgaccagtacgcctccaggccctagctcatattcaaccttaggagctacaagctcgaggccgtgccctaggttgcccaccgccccgattcccagaccccgacggtccactctttctaccgagcagcatgcccatcatctcggtctagctcatagacgatcagtttctaccccattcgatatctccctctctcaaccttccgctctcacttcaaccccgttcttgtcttcctcgcatgcactatctcccagagcgggacccaatttgagtaaaaaacctaaacatcgacggtccttttccgctaacgaagcttcaagtacagctggctggcttgaagattcgtcctcgatggcttcacctttaccaccgttgccggtgatacattcccggccaagaacattagtctactctcccgaggattcaatgggagaccggactgtggtcgacctttcttgctctccttctcaatcggcgcgcgaagcgggcggcttgaaactcggttgggaacttcctcttagccctccttcgctgctcggatgggaatcagacatcagagactcaagatcgacgatccaacctccgatcacattgacatcctccgtattggaagatgagaacttgaatctggcacctccgttgatgttaggatccgatcaagagtcgggtgtttacatggatcctgacgagggtcgacgaagagtggaatcaggtcaagagaacggaggaggggagggcatgtcggcctggacgcgcagtggggagaggttgagagcggttctgggttggggagatagagattgaatgggtttgcctccatgtggatgaaggaggaatgagttccctttctttgaccctatccctttctctctctctccttagttcttttcttatctcccttaacttcttcatcaattgacttcggacctcacccttcgcccatctatcacgtctttgtacatcgactcacctatttgattcagatctgtatcgcatcttgcaacgatttccgactttttctctgtccttcttgttctctctacatccttcaatctcacatcgtatccataaactttctcttcatccttccaatggcctctttctccagtgcatctgctctcctcttttgttcaatcttgatgattttcaaatctgtcatgctcgatcattccaagtgttttgaactgtcatcttgtggttttgagacaatttatcggaagataccaaatcatccgacaccatcactcaggttcttctgtacaagaaatatgttgaacggcattcactctcgaatctacgagtatatacataaacatttctgcgttgtgcatgttcatatcgtcaaaaccacatgcagatcctttcactctggttcgttgaaaattttgcgcatatcgatccccatttggttcagcagacaatcggggatcccgagagttattgatggtaaaatcatctgaagaggagagacgacggttcaacacatcacggctgtcatgttctgcctgaacaagaaaagaagtatattgaaggaaatgttgagggcagggaagcctagaggatgtgtctgtgaaatatgagctgattttttcttttttctaacttctttcccacttgttcgctatcatgagttgaccctagatgatggaaacgtatttgatcatgggtataactgagttttccaggaacctcaatcttcatacattatcggatctgtctttcatagacctcgaagcgcgcgtgttttcgtcttagaccttgatctcttcaatcctgtcttcaataagccggatcaacgtcttgagccctttcaacacccccaaatcgggaccctctcccaatgttaactttgaatgggcgaaatcgatcatcttcactctaactgatggtggcggtcccattctctcttccttctcctccaacacatttgacacttggcttgatcctgcgccttgttctatcgttgatgaagtagataatgatggtagtgttgatgcagatggcggtgggatagatgatgacgatgatgatgacgacgaggaaactgagtcatcttcgaaccaacctccatctgaatcaccttctcctccttcgatatccaatgcctcttgaagaactgtcggatctgattcataaacaatcagaacactacttcctacgaacctagcttcggtctcaagaaggatcgaatggatggtcgttaggtccaaatgaatattttggaggacttcgagtagaagggatgaagagagacccgacgttgaagatgaagttttaagtggaaagaatcgagcgataccagaagggagtgtttcgggagtcagagctttgccgaatgctttgtcggtcatgatcgatgtttggttggacggatcccagttctgttaagtaggacagtactgatacatattgagcatgatctccacaaaacgaagcgagagaagctagaaaggagtacgaaccgaaaatccgacgagccggattccacacgacccacttgttgtatcttgcgccgctttctccatgcgagctttcttttctggtgaagcatgctcgtcgtacagcacagtgcccagcttgacgtctagaacagacggatgggtaaacgcttgagtcaagtttgtcaggacaacactcttcagacatgcgcccaaaccgacaatctaatcagcatgacaagactgtattgaaatcctacaggtcatgtacaaacctcggttgatcgaacggcctgggcacgagtttcgctagtttcttctcccaaagcgagcgacttgacgtcgtgctggccaatttcggctgaatcgtcagctttgtcgctcacaaccggttcatcagccgggacttctttcttttctttgtcctgtgggatgcctccttccaaccggagagtgcctagaaactctggagtaaaccaccgaagtcttgtgagctctggccgagttgtcagggcttggtaaaattcgatttcttgtgcgttcgttggtttaaacagaagcgaattatctggagaaaaatgaattgtcggatgtcctcctacttgcgacattatctctttatttcaatgatatctaggtatcgaaagagcgagaaacgaggtgagaagacggtcgtggtcgttgtcgtcgttgagctaaacagatgagatgaagttgtgttagactgatgaattttgttacgtaagcgtgaatcctcgtgcaatgggattctcctcccgtgcgacctgagccatctttgtttcccatcaaacaccatcagcggcaacagcagctactacagccggtcttcatcatgggaatcaactacatgctcctcgtctcccgtcagggaaaggtccgtctggcaaagtggtaccaaacgctgcccacaaagtccaagaacaagatcgtcaaggatgtgactcaacttgtgcttgccagacgaacaaggatgtgcaactttttagaatacaaaggtttgtgttttcgtccgtttgagttggacttgcgtgttctctatgatgtcaaaagactggtacggtttatttcgaggatcgagtcttacccttcttaccaataaaatcttgcgtacatacttcaggtgacaaggtggtttacagacgatatgcctccttgttcttcatcgccgggatctcgtcgggcgataacgagcttgtgacgcttgaaatcattcaccgatatgtagaggttcttgatagatattttgggaacgtgagtctcgctgttcattccttagtggaagagttgaaaggcggctttatatcaaaacaaaagggatataggcaagcaggcccgagcaatatcatcaacatgagatcttttcagctctccatttcagcatcgctttggtcattcaaggttttgatcaagaaccatgtccatctaaccaaaccatgtcctcttctctctctttctttctttgttggccaatcaaccgatggatcacttgaattgatcactttaggtttgcgagttggatctcatcttcaacttccaaaaagcctatgctgtgagctttttgtcctctatcctttttctgttcatctgtatcgatcacattctctgaaggtcctagatactgaagacacaatatatcttcttctgtttgtctatagatcctagacgagcttataatcgctggtgagattcaagaaagttcgaagaagagcgtgctcagagttgtacgtttctgcctcttgatctatttctttctcgttcctatcactcaactctaaagcgcgcgcattcttcaaacgcttcatgcgaacatcaggttgctcaatcggacacaatggaagaagccgaaattacgtgagtgttttgctgatatatcgttttgtcattgatcatgactgaccggtacattgctctcatttcatcctccttgtgatataataacagggaagactccctggcaagatttggttcactaaaaggttgattaggctatctcgagattttcctctttcttttcgacagcgcatctggctcctatatcttctctagaattgtctcgagacctgtccgagctcatacatcgagcttctttttttctcactgcctctttatatccccgacgtgccaatctatctttctcgcttataaatatgtaaaattagtatccttgctttgcctcttttccttttggggtcattcaaaaaaactagaaaagtcctgaaccatgctatgcaacgtcgtgtcatcaattcatctttcggctttctccgctttctcgttttcgttgagattccaactcgatctcaagctcaaactcgtcaacatgtttcgagggagccctactcgcattcaccttctgaacgactcccccactccctatcatacctacacctaatcctccgcctgggcctatacttccgccaaggacagttccgctcgggtcaggagagactgtgagtggagctccaggtggaagggtgagagttgatgatcgggaagaacggaactcgttctgtctgtacgttttactagttctttgaataggcacgctcaacattcctcccactgttgccgctgccatcgtccctaccggggtcggaaccgctgttgctgtcatcgtcgatgtggttgtcattgttggtgccaatggtacgatggatgagataggcccatcaagaggattcgaggtgataattgatgtcgtttgagagatggagccgattgctgtatcaagtgaggaggttggagaagcaaacatccattcaaggatcgaagttgaagacgctttaccaacaagttccacaccgacatcgtcatcgttcgtctgtaacaccgatggcgatagagacggggatgaaaggtcaaatgattttgtagaaagagaggggaagagccgaatcttgttaaaaaagggttgtatggaaggtgaagttgaagtgaggatgaggatgaggaatgacatatgtatagagttatcataaaggattcgatcccatgcgccccatccaatcgaggaagaatttgaagtggaaacggtcgaagaaagagaagagaaaggaggatcagggatcaatctcccaataatcgttcccacgatctctcgtgctttttcagctcctgcgccgagtgcatagtcgatgattgtccgcagaacgagtcctattctttcctcttcaccttcgtgccttatttcgtttccatcctcgcgccgatcagagagagaagtcaactgattcaaaacacataatgaagtggccttcgaaaaaaccagtcccgacttcagccgctcagcttccgagtctatcagacccacgtcctctctgttggttgataagagatcagagaagagctcagctctgacaaatgttgagatcgcgttctgcgtcgctctgatgatggccgagtttgtcgtttttgtttcaaccagatgatcgatctttgaccgaccagaagtaaagctgggagattgagaacgagatgatggagaaagaccgtgaatgatgatcttcagaatagaatctatcagactcatcaaacctgctccgagctctcccaacgctcctagcatgttctctatcccgtccgcgtgttctgcgctcgattctcgatggatgagatggttgagtctgacaaaagggggtgttcgggcgaggtcctccatgccgttccagaaacagcttgtcaacgtctcatgaagctcgatcgtcagtccaagataaaatatccagaacgacctgctcataagcctgtccgatgacattgatcgtcgagaaatttgaggaaacgaccggagtgcatataagaggtaaatatgagcttgaaagatagtagtcgatgtgggagaggaggggattgattgagctagatggataaatcgagagagaaaatgctcgaacgagacatctgatgtagtgtattctgtgcaatcgatcactatctgtagtctttcggccgatgtgaatacaagagaccttttcgatgatgacgctgatattggtagtgatggtgggggaagaaaagcgacgaaggaacggagaagacttaatgaatggagtatacaaggtgaggccgacacaactggacttgtgaggagcttcttcacaatcttccgggcaggtgaatccaaagatgaaacggatagcgcaaggcgtaataaactggagaacgtagatggccggatgagaaaatacatacatatctggatggacggaaatgagaatgttagtgaaaacgaccgaatggttcgttttgcagaatgagaaatgatgaatgaaaaggtagattcaaggggatggtaactgacgtattcccaactcttctgatccatccagcgaactaaccaacccaactcaacatccgcatcttcgtgattgtctctctcgttcaacaaatttatttcggtgcacactaagcccacgctgatacacctttccataaacagaaacaatccattcggtgtgatttcccctatgatctgtcgactcaaatagctcgtcgtattgatatcacaaggcgcgtgaggccggagaaggtctcgagagaggaagaccacagtggattgatcggcagacgaaatgatatggttggaatctggagtacataaaatcttgcgccaggacgagagatcgtagaagcgcttgtagtgtgggtaatcgtggttggatgcggctgcaaatgcaccgaggagtcgatcagagacagacggaaccttcagcaagtcaatccatatttgggcagagacagcgagggcttcattccaatgcgcaagagtagaccagtttagaagataaaagattgcatgaaggggaatatccaaaggtagagaggagaggagggcttgagatccagaggaagaggaaggttgacgagtcagaaaccccagtacttcagaaaagtggatgaggttgaggaggatgagttcgatgcacacctcgggtgagatagaagaggagggttgcgaggaagtgtctcttattagatgttcggtagtgtcttcgttgtgtagagttgacgcttcttccgaggattcaatcagatgagtaagactcttgaggatttcgttcagtctctcctgaagaggatgatcagctatttctttcaacacaaacccatccactgccatatcctcctcatattgaccgcatttctctgtctctttggttgcgttcctatctggatgattgggccgagcgctgataaccgaaagtaaaacgttctcgaacgagttatttgatgaattcgactgagaaccagccgaaaggttgtacagataagtttcccaaccggccatcgacgactcctccctatccgcgactgctgataaagaggtcgagggatagccgtacagagagagcgtgatgatagagaatgggcaccgaagaacgaccaacgtagttgtgacctataaatgatggaataaaacaaagtcttgaggaaacatgacccaataagtgtgaatggagtggcctgaaagagtgcatacatccaaaggcatcccaatctcaaactgttggatcgctagaggtgaggttgagtcgattcctggcggcgctccgtccgagtctcgcaaaaaaggattatagctcaaggtcgatttgtggagagaattgggtttccaacccttaggtgctttggttgatggaatcaacggaagtgtcgatatcgtggccgattgcgtcaacggcgatggaggatatcgagcgttgaagagcaggtcaatctctgccggccttgttggagtctgtctagtgtggaccacgagagtgaggttaatttcggactgtcatgtagagagaacatctgtaccaagtctttctcgggttacaattcacacatgcaatactccgaaggcttacccatcgtctaaattcgagtcgggttgatggtagtagaacggccttaggccgagcggagtgatgacgatcgaatcgagtgatgctgatttcgggagtcgaacaacagcgagaaacgaatcgggttctgacggatatgtagcgatgtttgagtggaagagtaagctgggtgccatgagatgtggggaagggtatatgagctagagatggcagagagagacggatagcaagagaggcggatggaggaaaaacgaaaaggaaggtgacgaaggagaaacactgaattcaaattacatcagaacacagattctcacaagccgggtcttccactcggtcgttcatccgctcaacattgagtctctgatggcactgagtttcttcgttttgaatgtgaatacaggatgtgttgttccaaatcatgtgcgcactagagatagcggtacatagttgcacttgtcttgctagatgtcattcttggtacaattgtacattcatttcagctcgcaccttacacttcacactttacacctcggtccactcagtcaacgaaagagatttatgcagcttgaaaataggccgacgaagcctcgttaagctcgtcaatgaggagctgaccttttggctcccatccaaaagtctgtcgtgtccaagttgtactaaagtcctgatgcaactgcaaaaatatgccgaccataccgaggttgagctcgtgaatctggtccttggtgatcggtttgacattcgtgtttgtctttctacccaatacttcaacaatctccttgagctcgggaaattcttgaacggcatggacgaccgttcctggtttggctgtttcgagagcgagcacgtacagtaaaccggcgtcgtcggcatgacaggcggaccagtgaacaccttcgaggtagggcaagaagccagtctgtttgcccgttctgagcaaaagggcctcaaacatatggatttcatctgcgctatgggtgttcatcgccagacgtacaacaatcgatcttatgcctcggtccttgtaggccaaaacggcttgttcggtttttgctcgggttaacacagagctatcacttggagagtgctcgtcctgtccgggtcgtacggtacccgagccgctgctgagaaccaaagctttgcctgatccttcgagctcgtcagcgaggagatcaagaatcacccgttcatcccggtgttcggcgtcaagattgttggtcttgtggttcaacgcacagtgtacgactccatcgctttctctcgcgtgtttcttgagaagctctctgtcggcaatatctcctatcacagccgtcgctcccagcgcttcaatctttttggcagcctggggagacctgacaagaccagtgacagtatggcctcgagagacgagatgagggatgatatgggagcccactcggccagatgcgccagtaaggaagatattcatgatgtatggatagaactgatgtgtatttgcgccaggaaagtcgacttgcggagagatttggtggttgcgattgtttgggaacttttcccctcgacgatctggcatgacccgttattatatactgtgagcggttcaaatgtcttgccgactatcttgctggtcggcgatgtttcgtcacagagtgattaatcaccatggaatgatgaaagttgatggccgagcccgaaaccggactgtctattttcatcatccttcatcatgtaaatgagtaagagatcggtgtgaacccttacgagaggcagaaaaagaggttagtcatgatcttggaatgaatagattagcgcagataggaggagtcaaacgaaggaatgtctagcaagagtgcaagcacgactgggaggttcatcataggacctaggcatacacaatgatcttaccatacaatgtacacctcgaacgtctaagtgtaactcctattatcgtctttaataaatacaatcatttctcttcttcaatttatctgcagagggaacgtatggttgaatgtcctggttagagaaaccatcaactacaagcatggctcccacgatgaagcaccgtgggcaggtgtgactggtctgggacagatcgtagaatgatgatacccttcttttctggctcacttgcctctgttttcatcgacaacctttctctatgcgtcttagatgatatctcatgatttcagccatgtgttcgcctgcttacctgcttacctgctcacccgctcacctgctcatcatcgtccatcatcataggcgcgtgtaccaagccttgggcaaggcatgctagatggaactcttactccggacgtaaccctaacactcggcttgttgactcttgcacctaggcgtctctctccctgctcactgtttgaccaccttcctcaccttgctttggactcgacggtgtagacgacatactcaagacctgattacattgatcctgttcttgtccgttcacgacaccagcactttcgatatctctgtcctgctctctttctcgcatgcgtcgggacgtcagagtactcttcgtaggggatggtaagcgtgccgttccgttctgcccttctcttactcctttcctggtcacctgtggagataaatgcatcttgattgacaacatatgatggtctggacattcggtatcaatcggtctatctaccttttcattcttcctacgccctctattggtcgtcggtccattttctctttctagagggtgtcgggaaatcgaccatcatcacctcagtaagctatcgtttctttgccgtgatcgaccgggaggctcttggacttctataatcttctcgaccaagttggccaggtttaagctgataatgccggcttgttttcttctcttcagttcatcaaaggcaactatatagaacacgtaagacccacatcatgagcttctgtccctccttgctctcttgttataggaaacccctcggtagagacatcggcttccttccgcctgccggaagcgctcaatcatccttctcgaaacatgtctctctcccttgaactctccttatgcttgatgctcatccggttttctatactctctcaggtacaacgagtcttgcctgaggtaaccatcccggactgcctcgatagcgtcactgctaccattgtcgattcgtcctgttcgttttagatcccacgcggagatatcttccctttagattcatccgctgatcgaaaccttctgaattcgttcacttgattctccttcaaaacagctcgcccggcagatcgagcacatctcgacattgaacttcgaaaggctcatgtgattgtgattgtgtacagcatagaccactcgagctctttcgatcggttgggcgcctggtggttaccctacatccgagctcagggtgtgaacgtgcgtcgtcagcagactgatctccctcttcactctcttcgttcttcccaagtatctgacctcatccgaacggaacattctttcgtctggtttaactaggtgccggttgtcatctgtggaaacaagatagatcttcgaggcggagagattaccaaccaagagctcgaaagagagatcgccccgttgatgaacgagttcaaggtgcgaaagacttgatctttctttccttgaggcccaaacaatcatctcatcagttcatctctgtcttttccttctttccctcacaaaggaggtcgagacctgcgtcgaatgttcttctagggttcagcttaacgtggcagaagtcatcttcttcgctttgaaagcagtatgctacccattggccccgttgtacgattctcgtgaacatgtttgtcctctttctccttgtgacaagattgtagacttcacactttgtttttctcatcagttatcccatttctgctctcgaaatcctttattttgaaattttaatgccagacgttaaaaccaaaatgcgtagacgcgctgagaaggatcttcaaactgtgcgacgtcaacaaggacggtattctagatccgaatgagctgaacgacttccaggtgcgcgctagtccccgtctgtttgaacatcattcgaacccaatcagctaacgtctttgtctcccgccctgtcctcttcggttcttcttttcaagcgaaaatgttttggaacgcctcttcaactacaagagattgaatctctcctccgaataataagcgagtatgatccccagatggtcgatggcggcggtgtcaccgagtctggaatcgtctactttcacacgaggttcatccaacagggcagagtcgatacgatgtggaccgttctttcaagtttcggatatggagaggatcttgatttaaaagaggaggtcttgaggcccaagttcgatctcttcttttgctttcaaatatactgatcacgaacaaatccgaatgtctgacacaagatttctggttgtgatttctgtctatgctcagattcgatgttccctcagactgctcggtcgagctcagcccgagtgggtatcagttcttgactgaaatcttcgaaatcttcgacaaagtgcgcccttttcttactcttcgtattcgaaggatgtgtttttgctgaacaagtgcttatcgggctgaccttctaatttcttttttaattcaatcaggaccaagacggagcattgtccgaacaggagcttgcagcgctgttctcaacttctccagggaacccctggatgagaacaggatttccagacaccaccgttactaccggtgggaaagtaactttacaaggcgttcgtctcatcaatatatttttcttcctgtctgtttcagagaagaaaaacaacagagtctcacttgatcatcatttctgttccttcatcttgggcaagtgtagtggttggctcagtggagtctgacgacgttgcttgaccaccgattgaccctctcctacctatgctacctcggttactcctcccttccatcatcaaaagatttgtctacgactactgctcttcaccttacgcgaccaagacgtcaagaccggaaagctggaaaagtgacaagaaacgtcttcttggtgtatgtgttgggagcggccggttcaggaaagacgagtttgctcagagcgtttgtaaataaacggttcgaagaagagtgggagccgacaagtagagtgctgggcgtggtcaacggtgttgaaagaggaggccgtgagaagtaccttgtggttcgtttcttgacttgttcttttttcttcattgcatctttcgttgagaacatgagttgacgaaattagttttttggggttggtcgcgcgtagcttcaagagtttggatcaaaatacgaatcggaaattctccgaaatacaaagaaactcgagttggcggacgtgattgtatatgtgcacgatagtagtgacaccaattcattttcgtatatctcaaaccttcgcgtttgtccctgtcttttattccttatttgtttttgtcaagaaaggaaaggcgatgtgaactgacttttgtctgctccttgggagttgttattctcctgtctatgcatcggtgtaaatgacagcaacaacacaaactcaatcacatcccgtgcctctttgtcgctacaaagtcagatttagatctcgcacaacaggtaagcctaggttgtgtgtctgttcactatcttgaagaaatttggagatctaaaattttctcgtttggctttcaatgttcagcgccatgaggttcagccggatgtatactgtaaaagactgggattaccggtcccgatctcggtgagcgtgagacaaggccagacggccgatctctgggtaaatattctcttttgtgtttcttctgtctcctcatgggctcggacaacttacagttttgcaacccttgttattcacagagcgcgatatgtagaacggcaatgaacccgtgcgtctagctaccgctatcatttcctcttcctttacttgttttcccttttgaatgagatcgagcctcgctgacgatttgactaaaaacatcctactcatgaagacattcggccattccgaaatctacatcgtccagctcattaacaattcctagattacccaccgttttgacgacccttggtgttttctcagttgggacataccttggtctgagatggtacaagttgatcggccatccgaacgcaaatgggggaccgagcaattgggttggagtgataggccgttggattggacttggtgttggttttgttagtgggagaggaagagaactttgatgatgaacttcttttctatacggggccttgtgaagtgcagcgtaactttgagagtcacgagatcaacagaggaagaacattagctcaaacgcatgcgaaacaatcctaggagagacattggaccatgtagagaattcatagattagaaaggcgaggaaatcaatagaatctttttgcggttaatttgttatttcccgattttttgtccaatccgctccggccgattgatccgccttccatccgctctactttcctcgatcttgtgtccgttggagttttttcttgtcgctcacaacactcacacccgcacgtatacacacgtcttcgctattgttcttgatcaagagaagattgatccgagatgagtctcgctcgatctgtcctgacgtctgctgtccgcccagtcggtcatgctttccgctcaagtccaaccaacatttccacattaccctcgactgttctccgatcccgattttcctgtttcagcacccttagcccaaattccaacttcaagaggccactgagcacccagatcaacaactctttctccgcgtccctagtcaaggcaaggtttgaagctgggccgttcagccctttgttcagacagttctcgtcttctgttaaaaggagctcaactggccaaatccagttgcaggctgaaaggccgatcttggtccagaccgaggggtctcaatcctcatcttcgtcttcgtcatcttcaagctcgcgagcaaatatatcaacccctatagttgctaaatggctctacttcacatccttccttaccctgagcatcgtcgtcgtcggtggcctgacgaggttgacagaatccggattgagcatcaccgagtggaaacccttcaaaggaagcttaccgccattgaatcaggctgattgggaggaagagttcaggaagtaccaattgagtgaggagggaatgatgtatgttttcttttcctcatctcttttctttttcctatcttgtctgtatagagcagaatgattaatcgacattctggcctgtcctgttctgttctgcccaagtttgaacgctcagatcagtctgaacgagtttaaattcattttcttcatggaatgggcccatcggaacttaggcagatttctaggtgttacatttgttcttcctgctctattctttgcagccagaggaaaacttgttcgaaaagatcaactcaaggtgtttgctatggctctcggcatcggtttccaggtaagccgcctttccttcctctttcttccttacgctcatacgttgaacattgttttttttctttgatatcttgcagggtttcttgggatggtatatggtttcctctggtctcgacaaagagcacctcgccgctcgacccaactccacgccccgtgtgtctcaataccgacttgccgcccatctgggaaccgctttcgttctatatctcggtatgctccataccggactttcaattgctagagattggaaactcgctcacggaggaccggtcggtggcgaaaaggatggattgagtgttcagaagatgctgcttgacggagggaagaagttgacaaggttcagaggcttagtctgggttgtaggcgctatggtcctcttcactgctctttctggtaagtcgatactccctgttctttcatagcaccttaactaggttctcattcatgaccaaccatcatcatccatctgtcaaacaggtgcatttgtggcgggtcttgacgccgggttgatttacaacgaatggcctcagatgggcgaaggttatattcctccgatggaagacatgattgaccctcgatacgcccgacgagaggacggcaaagacctgatttggcgaaacgttttggagaaccctacgactgttcaattcgatcaccggatgctcgcttatgcgacagccacctccgtctttactcttaccggactttcccactctcccctccttcgttcggtattaaacagaagagtcaggttgttcgcttcgcttgcctcgggtgtcgttctagctcaagtaactttgggaatcaccacgctactttatctagtcccaatccctgtagcggcggctcatcaagctggcagtgtgttcttgttaagcgcgatgacggcgttggcggtggcgttgagaagacctagcaaggccgtcaaggaagtttgggccaagagagctttggtagagaaggctttgaaaaagtgattagtaaaaaggagctagattggttcatctcgtgtattttatagagctccattttcaagtataacatggatacaacacgttccacacccaattggacaaacagtacccgaagtttacatagaacatgaaggcgaaaccttggactgttgattctcctcatacctcaaagtttgggaccaccttgtttcgctgccttcaacttactctgaccaccacccttcttcggatctctgatgatgctcatgaacttctctggatcaaggactgattcagggtatgggagtgccggcctggatgtgtggagttcacctccgtcgacgacctttacgaatacgcagaaccgtgttaatcagagcgtgggattagaaacgcggcggaaagacagaggttctttgagattgatcgattagagctacgtacgaagacttgaccagtgatccaatcggctgtgtatcatcatggttatgagcctactcttcacttcaaaacagaaaacggacacagaagaaactgaccttcctcgctgaataggaaacagcacatcgaagctatgtcctgagtcttccccatctgtcccagagggattgcgttgtgcatcatcttgtccgattcatcagttcctagtttctgcattcctggtgtatccccaataggacgtaagtccggtcgggcgaacccattgagataaatgtgtcaagagagagagggaagcgtgatcagcatcactgtctagttcgcacacgttgatacgcacttggtgaagagtacagggagaaagagacttatctggcgcgacgatattactacgaactcctcgaggaccttcctcgacggcaagtacgttggaaagtgcgtcaacgcctgccttggcagctgatacgtgcgcctgataagcgattcctaaacacatgccaaacatagacaggtcagtcaatgaacgaaacttgactccagatatcgaagaggatagttggccaacctcggtagtgcaaagtagcactgatatggatgtaagaccccttagtttgccgaatgaaaggcagggttgctttaatagtattgaatgttcctaactgtcatgatcaatcgatacatcagtatttctgaggattgaggttatgtatcagagagtcaggactcaggaaccgaccaagtcaatctcaatgactgtcttgaaggcattcggtgaaagcagatcgataggggagaggaagtttccagcagcgcctgatagccaatcgaaccacaagagcatgagttgtccactcccttagctatgcaaacgagatcaccgaaacaaaaagagcaacaagatgaagcagataacgaaccacatatcacgaaatcgatctttccgaacttttctatacactttcctaccgcaaccttcattgcttcaggatctcttacatctgaagaacaggctatgcattcggaacctgtcgcttcagtcaattcatcagctgccttctgtagagcggccgcactgaatggatagcatagtttatcaacgttaagtctccctcatataatgaaacaagaaaggtcgagacgtactctcggccgacaatagcaactttgcagcccaatgaaagcatcttcttgacaattccaaagctgattccactacggcctggatataattttttttgatgtaatatattcaaacgatttcatatcgggggtagtcaagttttgtttcatagacaataacatatagtttgaatgagagaaagaggaacgaacctcctgtggagaaaagaacttttccattgaacaggcctggctgaaatgtcttgctcatgatctatctgttgcctgtgcgtgtgtgtatctgaaaccaaggaaagagtgattgaattgagatagttgtagcgatttgggatgagttatggaggatgaaatagatcagatggaaaggaaacaactcctgctggagaattccggttaacgcggtccggtctttaccggattagcttcctcaaatctcatcgttcttcgaattgatagatacatcatacatagactatagatcatagaatacaaatcatagatcatggtgaaaaggcatataatgatagatcaatcacctagtgttcaccagccatacgtccctgaagctgatcgatcgatcgatcgattgaacccagatccttgatcttgtcagacatctctggacagctgatgaagatggacatcgaacagaatccacaaacatacctcccttgaatcctttgggtccaccatgaacatcactcgtgatccaccctccatagaaatctccttcctgtgcctttacgttctctccgtctactaagcacttccaatgccctttgctttctctgctgttggagctggatgaggcgtagaagctgagatagtccttgatgggtttgaaactaggtgtaggagatggataggaccaaattcgagaggttaccgaggcagatggagagcctgatgaagagggaattttgagagtatgatacgccgctgttcctttccactttcagagtgaagcaacttgatcaagatcgaatcgagaggttctcgaggtctcgtttctgatgatcgacaatcggtttgacaggccgaagcaacaaacttacctcacaaaaagaactctttccgttctcaacgctcaacttgacgttatccgagtgaatggatgaaggaggtagataatacgttggtggatgactggatccacgataccatagccaagaagagtcatatggtttcaatatagttagagacacatgagcgacagaaggatacagacctcgtctccaacaccctatatgcctcccgagtggtagcaacatccacttcgtgtccatcagggtacacccatttcacctctagcaaacttttaagatttcagatcccatacgagtgatatgagccatcatgagtttccaaaaattctatcattcaattcaggtcgggatagaggaacgaaccggtccgtccgctccaacgcaggcgggcgggggtagtcccacacgttttccttgggtctgctgtttgtagacgacattggtcgaagattcgttgaagcgtgaatgtatgtacaaggacgaagagaacttctcgtattgtaagagatcaaagatgatgtacaccgagacattggcattcagatcgcttcgatacggaaacttatgaccttgattacttcacgatccccaagtatgtaattcatgcaacatgagaatattctaaacaggcatattaatcacttatgactcaacttctatagaacacaacctaaaatatcataaagaaaagatttgagagaaactgcatattgaaaatatagtatctattcccgaccggcagctcgagcagcagcctcggccgctcgtcgtcgtctccgcttgggcccaatcttgacgattaaccaaggcaatgggctggctgctaaacaaatccctgagagaaggacgaacgtccagccgacattcaagcgtgtgatgatgatatctatagttgatgttccaaccgcgcctaacgagcatcgcaacaggttgaactagacagtagagaaggtgacgccccatgagtatacagagtcttgcttctgtgtagaagagcgaagacttactgaagcggtgaccgatgagcctttgccggggaacaagtcaaccaccaaagtctgggtcatcagcatcatcgctgtgttcgagaatccaactgaaattgagacgcccatcaagaaatggagagaatttcaagtcatgcaaaatccaaacacctcttcaggaggaaatgatagctgtaaagagaaaagactaactgaagaaatgaagaacgactggtacagccagtgatgtctgagcatataacgcccagccaaacccaatggcactgatgtgcgttaaagcctgtagttcgaatccgaattgataagccaaaccgtggtgagtgcttaggggcgatgaagacaatggccctgatgatcttgaagcttaccacaagaaaaggcaatctcttgagtctggctcgctcaatcgggaaatcaagcggctttgaatcatctggcaactctcttttcatctgtcgataatcccaatccagcattctaccaggcaacagagaccctaagatacagcctgctccattggatctataacactcagaattgagattcagaagaaagaacaggttggatggatctcatgttgagtgcaaggaaataagaagtacgagaaaaaagggcatagaaagacttacaagtagcataaaccaatcttgatctcagaaaggccgtagatattcttgaacaaactagatgtcgcagtgagaatgcaatagaactatgattgccaagacaagaaaaacagaatgcagtgaacacgggttgcggggcacagtatagacatcgcagaacgagagaccaggtgtgtctcaacagatggagataggacatacctccatgtatatcagagaagaaaagaaaagcatcataaacagatcaggattgagcaaaagctccaaactttgcaaaggccgaaactgattccaggtttcaaacataatccttatcaggtcatgcatactttctgatttctatgaagaacagtatactatcggaatgacaagacataccatagctcgtctctctttcaaagttggttgagttgacttcgagcttgatggttcatgtgccttttctaaatcactgatcccctctcttttagcatcctgacgcgctctcctccctgtgaaaatttgggcaaaaggttggttgattaacggtggatgtatcgagccattgcccacgataagccttaatgtttccggaaggaagctatgtgtgtgtgtgtgtgtgtgtgtgtttgcacagagagaacgatacatgaacccgtttaaaatgtcatgttgtcacgatagcaattcgtattgggataaaacttacaaggcgataggaatgagagcagtgctgcttgcaatgaccaagaaccagaaaatggctctccaaccaaggtattgtgccaatatacctcccaggactgggcctacagaatgaaacgaacaggagaggaacactccgttttattcttgaaacagaaagttatgggagatgatgccgaatggaatgttcaaaacttacctatagctggcgcgagcatattgcctttaaacataacacgatttgcaagatgattagtagagagtcaaaaaaacatgaacggttgttcgacatacctagagagtaccatcctgtatgatttttcagacatgattctgtcagtatgattgacttcaacgactatgcggcattttatgaccgagataaagaagaggagagacctcctcctgaacaaacgacgtacccatgaaacctcctcgctcatgctgttcggatatatcagagactactcctgctccgatggcaatcactgaagaccccccaaatgcctgtacgactctaaggaaaaggagggcccaaaaggccgaagttgggaggacggcaatgacgatgcacgatgcaatatagattgccatcgtcaatagatagactggtctatattaagcaatatggtcaacaaggaagatgtttagaagtggtacaagtcaagattaagtgaacgcaagacaatgtgatgtgatataggacttaccttctgccaaacacgtcggccatgcttccccagaaggtaggggataatccttggaagactaaatatatcgagaccgtcaagttcatttcctctgctgtttgtttgaatgccgaagccaacaggggtaatgccggcacaaaaatattcgccgacaagggactaggacaagacaaattggagtggcatcatcaatgagacaatgcaagattgaggaaaaaaaaggcaaaggacctacgagaaaactcctatagaggaaaccccagcgacgatccaggctttctgtcgaggggtaaataccgaatgaggtttcgtcggtatcaccggcagagactcttgttgagtttgagactggtcggtattctcgttcggaagaggtccatctgtgacgggaatggtctcttccaaggacggcgatgatatggatgcgagatcagtttgaaaaggtgtggcgttttgtgaattcggaggcaacgcagtatgttctgagtggggtgaggacatgcgtaggagacgtgcgcgttcagcgacggttttctatcaaggatacaagcgcagatgtcaaaatcgaggagagtgttgaccaagagttctttcgtttaaaacataacctacatacaaatcacagacctatgacaagcaatccaaaggaagaaaggtatgaggtcaaggagaagaacggatggagcttgagaatcagcagtagatataacatagattagacgaaatgctctatcgtcctccctcggccgacctcctcggccggagccgaatccgataagtccaggtggttacgtgattacaaagatattttgtgatctcgtgatatcatcgttcaccttctcccccgatctttgtctggctcaagtcgctccattttgaatcccatctagatccgacattcacttcgttcaccagtacatacacttcatgctttctttattcacatcggcatctaggtccgtcgccactgctcgttctgttagagtggcgtccggtccaatgaaccacatcgctcgatccatcaaaacggccgagtcgactcaggccaaggaggatccagagcctcagagatccaggcagggagacgaggaaggcatcaaggtatgtttctacttctatttcccgttttcctttgcactgctcttcgttgtgcttgtcattatcagtgatagaagagcttaggcctgatcttcttccatcaatgactttgcctttcagaccgatgacgtagctgaatcggagtctgctttcaagtcccagtctggttccggtcctgaggagttcgttcaggagatggacggcaaagttggtttccttcgcttccttctttcagtccttgcttaaaccccaagatattcatcagaatcattttttgtttgtttaaactatcttcttctggtcagaagggagcctcggcccaggtgactcctgctaatggagcagcctccaagcccgaaggaggcatgggctctaccggagctcacaacggttaagaatatatcctagttctagtttcctttgcaaaagacaagtattcttctttcttcgcttttcctcccctcaacgctgttgttttgtcttctcgcttcgttgtagatcactatctgtatacatgttgtctttctttgtaacaatcgatcaaaacatgatgttgctatacagaaaggcggtacttctctagtaaacccgtccttctgtgttgattttctccgcctctatgaagaatattacaacgacggaaggaagaacaaaagcaaaggaggaagacgatgatatagcttacaaaaagaaatccccttccgtcaggtagaagccttccgtatctctctttctcaagccatagtgacctctttggtatcaacccccatctctgacgccatcgactcgaacacaagctcggaccagatggcaagtgtatacggaacggcttcttcctccaaaaccttatagaccgatggagcaaggggggtgaggtgtagagcgtggtcagtcaaacagattcgaaagatacagtaaaagagcgagaagagaaacgtatcagggaacaagggtggttgtatggatagaaacgaggatgtttgacgcatgtcttttcaagagttcggccgtcaaagagcgaacgcgggggaagcgtaaaatagaggaatccaaaggtgatacagagtactcagcgtgcctcttgtgtttgtttgtctttgccctctcgacaatcatgtttgtgcattctatttgatcgtcactttccttgatcgatttcgatttcgatttcggatttggccattcctcaaaagcacgtgaagacaaaagagagaggaagaaaacgagaaaagaaagcggaagggaaaagagaaagggagtgttcttcactcacaggttcgaggccttcaacaagatcggaagcgctcttcctgccccgaatgtgatccagcacaaagttcagcaagtcgtcgtcgtccaactcaccgaggaactcgatcactgcattgttcaagaaagaggtcaatggtcaaactttgactaggaacaagacaagcgtctcgaagcaagcctcaacatacttttgcgacgcgcgatcggttcgatcttgtgttgaatcgttgtctgtatagagagaaaaccccggacgacatcacaccatcagccaagagttggcatcgctacaccgtcaagagaaaaagattcagacgaacctcggcgatgccgtcccaatagatgttggcgttccaaagcccctcttgagtcttgggtaccttttgcgttcttagtttgaccagatccagcaacctttgcctctccttctcctccggtgtcagactctctccataatccaacttaaccaacacccgtttcttctttccgtcatcctcatcgtcctcatcgccaaacctgacacctccaccttctcctggtcctcccacggcaggatgggcaagagccttggcagcagcggcggcagatccaatggacaccttgattggaccagattcttcggtaaggataccggcagctttttgcttgattgccaggtcggcttgttcctgtctttgacgctctcgaagttctgcctcctggcgagcgagaataacgagttcctcagcttcagccttgcgatcgagctcgtccgcttcctcctctcgacgacgaacaggtgctcgttgagatcgccagcgaggtctaaatataaacaaatggaaaccatacataacgcaaaggttagctatctctctcgcatcgatggagaggagtcacaagagactgaaacgaaccgatcaataaaccaaagatctctaccagcttcttccagtctatcgtcatcgtacgctttgagccggtcgcgagcaatgaaaaagtctttctgatcactttctttcctgctctgctcgacttgggcttcacgttctagaagctggaaccgctgacgttccctctggtccaaacgacgctcgcgctgttaaagagaaaaatttgaaagttttaaatcagatgtagccatctgcgctttcattggaggaaaaacactcggacatacctctttgagcgaatccatctggtcccgccgttttctctctcttcttgcttcctcctcctcctcgtctgtcctctctggatgtccgttatcctgcccggccacgaaaccaactggcttcgagtatccttgcggtccgttgccgaacgcccctcggtctggtccgatcatctcgtccaccgactttcctagtcgggctgcttctctctcccggtgttctttctctctctgctctttgactcgttgttgatgttgagcggcaaccatctgttcaatccttcgtcgctcccgatcttcctctactcgtttcttctcgatctctctcgacgcagacgtctgtctgaaagcagagatctgatccagcacaacctcccgacgctcttctggaatctcttcctcttgaagatctcgcagatgagcagggacggcgtaaggatctggggcgctctctttctccgacgagctctctgggttggcggacgagttgagggcggtagatgaagttgaaggaagttcagttccgttgttgagagactcgaggatggccgttatcgatttgacagctgccagttctagttcttcgtcagcctgtagtaaaggtatatgattagaagaacagaaatgggaaaagaaaggtttatttgagtgctcatcagtgtttgcactgcgagcgagggccaagagcgagagggaattcttacatcagttcgaatcatcatcgattcgtagtcatccaagaactttcgagtcttttcatcagctttcacctgtcacattggaggttgcatcccagcggccaaaaacgaataagttatggaaaacaacactgatgaacaagagccaccggacgatcactagagtaacaatagaaacaaatcaacctacaatcaattttttacctgccccgtgtgtttccaagtcaggaagttccacgccgtttagaacggccaacgctcgtaagacagaatccggatcttcaaacctatcaccaggtctcatacttagtaatgatacagtcaactttgaacaggataaatgcgtactctgcgaatccaaacgcttggggttttccggtcgctcctttgactcgctttagatttcttaatggtccacaagcctgtggatatcagttcgaaacaattattcattaggattttgacaaactctttgtatgcagaatcatccacgtttcagaaagatagaatctcagacgtacgttcagaagctgttccaatacgtgatccaagatcccagaagcgataccacctacgaacaaagtcgtttgaggactgagctgatctgtctttcctgctggggtggacgagcctggagtggtactaggattggaattcgatccagaaccgcttggtctgtttggtataggcgaatatgactggttcgatggtgggccaggaggaccattatagcctggaggaggtctcgagaagtcgacggctggataattaccatgttgtcgtggaggaggttgaccggtaggctggtagcctatacctggtcggctattttgatacgaagattgttgctgttggggttggtagtgagatggacgatatcctcctgattaaacgaattcaccaaattagtacgcgtcgagcagatgtaggagataaacaacgaatgctaggttcatccatcatccattcaccatccatcagctttcaggtgaaggtagatggtatcaacgacgagcgtagtgaaggaacgagctgaaagaaagttatttaaacaagcaactaaatgaatgcattaacgcacctggtcctccgtacatttttgtcagttgcctttggagtggatagaagagaagaaagaaaagaaagagaaggggacggattgaccgatgaaagagacttgatggaagttgttaaaagaggttcttagagagaacagacggctgggcttaggcaaagtagatgaatgacataaacatcattcatctacgatgtaatcctaatctgtattatatattatccgtacatatgcatgcaagtctcattttgaatcagatatacaccagtcgacagaccagcagaattacgtatgatcaacctaggtactatatgtattggtacagagcaagacagcaaaaaaggaagcgcgcatgcaaagagaatgcaagaccaaggattgagctaaacacaatccagaaagaagagtaagaaaataaagagaattacacctgttgagaagatgagcaagacataattactaaggaacagcaaacgagaaaaaacccaagaaagactagattgagcaaaattagatcagatggaaacaaagaacaagatcgaaggtgatagtcttaaagattatttaagatagaacatcagaggtgtgttggtgggctcttttgtgcgatttcaacggaacaggtggaagcagaatgatatgtccagcttcgtctggccagacactcatcgacaattcatcaatatcgtgaagaaaggtctcgatcggcctgttcaacccatcgtcctgttcggcaggcaaaagatcaaataaatctttgtcgtcctcatcgcgaggactaaaagagcagattgaggtgcttgagatcgaggtcgtagatgagctcaaacgcagacgaggagagttatcttcaacagagtagagcggggtgatggggaggggcgaaacagatgaatacgacccatcttcggagcaagagctatccgatctctccataggcatatatggaagagttcgacttcgaggtgaaagcagatagctggtggatgagccgttgacagacggggcagggacgatgctgtattttggaggaggggaacagggaggtacagcattagggttgacggagaaaatgtatctgtcgtccagagtgacaggtacgctagacactcgacggacaggacgccctgcgcgtgatccaaagaccatgtcaacgttccttgagggtcttggcggaacaagagagcctgttgaagtgagaggcataggatcggaggcctgtcgaacagtctgcaaacgggggatgtgcttggaggtgagcacaaagcaaggattccgtgcacgagtagggcaaagaaatttagggacgtactctttgcttagtctccacggaatggctgaactcgctgtcgtctccgaggtctacggtccaaggcaaaggctccgtaacacggttggtttggccgtgcatgaccgccggaagtgtatcacggatgtgttgcagatgtgttgccctgcttggcacgcgcgatacatgcttctgtcgctgtaaggttgaagaaatcggatggatgatggaataggccggcactctcagattcgacggactcctgatgggtaaggatgaggacggaagagtgttggtggaagggcttttcgtaaggttccgcacataccgaacgctgggaccgggggaagataaagaaggagaagggatgacccgcagataagaatcaggatagaaaggcggggctgaggttgggtctgaacgggcgagtgcatgattagatttgtacatttgtgttcttgtacgaaggactgatcgagaggatcttgtttggacgaaacggattgcaaactgtcgaggataaaggtccaaagatcaaagatagtgcccaaagagatcaaaagatggagacaggatgtcaaggtatatccaaagaagaatcccaaaggtacagtcaaggaacacagaaggaacgagaaaaggaacgaaaaagaacctgaacctgaagcggggaggacatggatatatatgagtgtgtgcaaactgtatgcctgaaggtgtctctggctcggtggcttttctgagtgctggtatgtgattgtaagaatgacaccaagatcgacggatcgcctttcggatgttcctctattcgcgcgggatttgctctttagacttttcttgcctttcgtgttcgattgtttacaatccctatcgatcggactaacgcctacgcccagccgagctcggtctgaaagggcctgcctggatcaactagatcagcacgttgccaatgatctttccttccatcatatattctcctccacctgtacgctctctctcagtgggatcaaccgaccaaccgctttactcttttacagtttaaagatgaggcgtaaaagaatggattatcaggccgacgggccaaacacgggctgcaaaaagacttactgcgcgtgcagaactctcggcccgagccgatcaggccaatatgacgtgggcatgtggcgtcgattctaacctcgtgaatggaagcgagttcaactgccaagttatgctgtgctattacacccagagtaaccactttctcaacggacggtccaactgtccccatctattcccatctcgtcttgctgtcgactttcttgcttctgctagttcgttgtcgcctctaacacttggcctctctctcagagatgtcgtcctcaaatcaagacgcatacgatcaactacatgcaatcacttgctcatcctctcccgctgatatagatagagataggcgaattcttcgagaaactaattacaacgtccaggcaagttttataatcaaccgatacgagtgtcgggctttaccggttctaacagcattttcgatctctccttgtgacgtcccgtcgtgtacgtcttgctactttactacaggctgctcttgaagtcattttctcagctccttccgaaccaacaaattctgctccgacagcgtcgcgagaagcaccttcggcttcctcaagtctttctgcccgtgctggctcttatcccccgtttaggaacgataacccgaccgatcaacttgcttcttcctcgtccacaaggaatgacggtcagccccagcctcactctacagaagaaggcatccggcccttagcaggtctgagagtacccagaggtctcagagggattactcgggtcggggtgggactcggctggacggtatactccatcgtgctctggccggtagggatcgtttggagcgtccttgtcggtggctggcaatttgttggcaagttcagctcttgttgttgtctctggactttgagaggatggtgagaatacgtataggcatagcttgctgatttctgtattgcgcgtatattctcttttcataatactcacagctcgcttcctcccaagtgcattcctgtcgatgctgcccctcgctttcctgccatcagtagatcaatttcgagcgaatccgtctaccctgcctagaggtccagcctcgctccggttcttgcgctcactggagcagctcacccgtgctcgatcaccatcatcccttcagtatccatcatcagatcatgatggagatgaagtgaaggacgatagcatgtcagctgaggaggacgagaaggacgcacaggccgaactgccagagttttttattggaaaatacaaagatgctttagaaaaagctaagaaagaaggacgaatcgccctcgttggactcttctcgagtcagcatgagaaggatgaagatttcaaaaagtgcgtttctccgtcgctttttgattctctcttaataggatagggacttttgaaaaatcgattgacgttttcttctccatcctgtttcccgccggcttctcaatagaactgttctgaccgacccagcactagtcgatactctgaaacgacataacattattttttgggcaggagacgtgagcgacaaggagccgtaccaaggttagtccaaaataatggatatctttcttgctgacaatctatttggagtacattcatcggtcaccaacataggctgatatctctcttcttgaacgctaatttatcggctcacatctcgttgattcatcgatcagtcactcgtttgctccctccaacgacatatccttctctgacattcatctcacttctaccacctgctcggactcgagcgtctgccccctcatcgccacctctgaagctgaccgttctctctcgtctagaaggaccatccaccacagcctccgatctgatcaacacgatcgagcagtccatcctcccaagagtgtcagccacactgaaccggatccatcgagagatcaggctcagagaggaagaacttagtctgagggagatgcaggatcgagcattcaaagaagcagaagtgaaggatcttcagagaatcttggctgtgagaagagagcgagaagagaaagaggaacgggaacgggaacggctcaggaaggagaccgccaaggaggaggaaactagacggcgaatcgcttacctccgctacgctcgccgatcgttggtccctctggccgaaccggatcaagactcgataggcatcactcttcgagttccaccgaaccagcggccgttcaaacgatctttccctaaatcagcatcaatggagactctctacttatgggcagatacgttgacattgcccgcagaactggacccggcagacgatccggcagagttcgacattgagacatatgcccatcaatggtccttcaaactcgcaacggcttatccaagaaaagtcgtctcgctggacgaggcagacggaacagttggagctagtcagatcctcaagaacggagcaggtgtactcgtgttggaacggatcggagagactggaaggaaagcgggtggggatgatgctgatggagatgagaaagatcaagactccgattgtgatgaaagtgaagaggatgacgagatggaagaggatgatgatgagtagatgccatgcttcacttatacaatcatagcatacgatgccataatcatgagtcaatttagaccccaaagagaagtatgattaactatagacatgtagaacggaacatcatataagaacaaagcacaatctagtagggaatcggaatgacgttcaacggggtcttttttcacagatcagaagaatcgactggacgaggaaggtgaaaaggaacagcaaacaaatatatagcggagataataatattgatctcatgataagcagagatagagatgtagtgatcagggcgcgaagacaaccaaagaaagtcaaaagctagctcaaagccttctgttcaccatcgatcacctcccaactgagcgcccaacagacccatctctaaaccattctcttgttcgttcgttaccttcgaacaagatcccatcgtcagccttggtctcaacaggggagacgaagccccttcccacccaggtttgtagggagatagaggtccttcgctatccgcgctagacggacagatgtcaaattctagtccgggcgggtttgagcgcgcgtttgccgtggatcgtagcttgtagatcgccgtcgatgtcaaagactgagagggaggcgatgaacaaggtgaagggtgggacggggtggtgtagaggatcgatgaggacgagacagaggacggacggtcggctggtagaggggtggaaccaaacaaaaggtcctcagccgaaagatgtttagatggagtagaacttgggtcgaacgagtcttcgtctgtataatctgcgtcgtcgtcgtcaccatcatcgtcatcgtcgtcgtcgtcgtcgtcgtcatcgttgtcttcttcgtcgctcgagccttcgtctaaatctgtagtaggcggagtcgtttggaaaaaattccatgattttccgaagcgatcatcgatagagagatcactttttcgacaagacgtcctcgacgccgcagattgcgaatcaaactgaagaataggcgaggacggaggtgagctgaagaacggagaggcttggaaaggcggcgaagtgattatttggttgatggatggacgtaaaactgaggatggatcaatcattgaagaggacaagctatcatcactcggttcacatttccaacaaaaccattcttcgtctaggtcgtctggcatcaaccctatgcaggacatctacagtttccgagaaacccggaataaaacaacacatgacgagaagaatatcctgtcaatttcaaggtagacgaaggcatatacggagagaagaacgaacgtgatgccaagtttgacaagaatcacagttgaccaccgcttcatcctccatctcgcattggcagaaacatccgagaacatcctgctcattgacgatgacctcctttcccgaatcttttttttctaattgaacacacgataaagaacctctcgtttgattccttagcaaaagcgcttgtcgggcatcagctggatcaaactgctttccgtccagtcccagcattggtcgagaaaggccgtatcggactttgggtcgtttagcgacctcgtttcgtagatcgaatcctgtctttcctccaccgccaccactgatctcattttggcgagtgctgtgagtggattctacagaagacgaagaggtcgaccagtttctactcaagggatggtccgacaatctttctggaccattgaagtctgattcatcccaagcgtcgtcatctaagtaccgaccaactgcctcgaggacggctttccgtctttccgcttcaactcgatgagcctctatagccgaaaatgaccagggataggacgtatccggccagtcgggttttgaaatagatggtgtagatggtgcgatagtaggagtttcgcccaattcggacaaactcgattcttcaagaggttcatcagaattgactgaaccgatcttgagcattgttttaaaagtttcaagcgataccgcaattcgacctatgtccgtcattttgacaaccccaagcgtcgaggaagagacgccgtcactggctagagagcccgtcagagcgagattaggtgtgctcaaagaattgtgcccttcgaaagccgccaatcggcttcgtcgagtctcgtcgcttctcttcttcgatgcagaagcgggctggatcaggagtccatgattcgagcaaaacgggaggagcgaaagggatgaccacgggatggcagcgggttggaaattcgattggtatgacggtaaggaaatcgaaagggagcgagggactcgctgtcgtgtagaggacgggatgagccaatccatgtccgttgacaagatctgagcggttgagagggatgcctttcctgttgacagcaggtgaagggcgggagcggagaccgttcgtgggatttgacgcgcgaagggtgaactagatcgcgaagaagagcaagatgcggaagaagaaggtgaagagagaagaaattcggttgtggatgagcatgttgatgttgatggtgataaagttgacgaatacatatgtgattccgattggtcttggtcttggtcttcggacgacagacgacaaaacctcttcccctcggtcttctcccgaccttcgtcatttacctgtttagaattcttcatctcccacaagtctagacgccttccttcccctccttccccggccttaacatccactcctttccctgctcggccttccctcttacttcgaatcagccataggggccggctagcttccttcatctgagcctcctctttccactttaacctgagttggttgagctccccttctaccggagggggcgacggagcgcgtgttgattgaatgggatgcgacacatatgaaacggatggaggagcgattgatggaggaacctctaactttgtgacagagcaacgttgtgtgctactcccatccttcgaagcagtctttccattctcgacgtggaggacagtcttcttagtacatcttcgggtggaccgtgtgggtgtctcgaagtaatcagaggctgggagggttgcagctggcgaagaagagggaacaagaggaaggcaggagaaagaggcgagcggggatgttggaggaggagatgaggaagagggatctgggatcgatctagagatcactgatatatctgagtgagaattgagcggataagcaaaggacgatgagacagaaggttgacaagactcgaacggcaagtaataacccgaggggggagatgatgtctgataaacacaatcatctgcagaatcgacggaggttgctgaaggcgttcgatgtaattcgatcctgatggctcaaattcaattccacatgcccgatatgaggtgataggaacgcattttcagcaatgtcattagcaaccaatatataaggtaagacacccaccgagctgtctctcctttggttctgaatcggctcttaacaacggcagacacgctatcgtcgctgctgttctcagatcttccggataggctttgaaaatgtcttttttccgtttgagctacagaagaaaccgaaagagctttgcgattcgcacgcgtccgaggaaccgataaggggtaaacggtcggactgaaggagagatgagctgaggtgggcccggaggcaggtgacatggccggaggcgggaaggaagactgatggcgaagagaacggacagggagagggaggcggggagagtggaagagagtaaagctgaactagaacgtttgtacgtgtgaaatggtcagggaaatagtgcgaggtgaagatgaagagttgaaggacgcgacttacgctccaatggacgtcaacaatggtatgtcctagggttatgtccaagatgagagatagagagagaagaggaggacaatagaagagtgaagagaagaagaagaagaagaaagttagaaggacaaaagaatggaaaggtaacaagaaagttatgttgaacgagtttctacgttcttatttaaaagtcgccgctaaagaaaaaaacctcgtaatgcacggcgaagttctcgactatttctgtttcggtaatcaaccacattttatattctccgttttgttttctctcaattttttggtctgcgcattcttcaagctctacttcttcttcttgggcatcttgggatcagtcaggatttcggcgcccgtcgcggtgatactggggcagaaagggcatggtcttgagtatcactctaaattgaagatgcatgcaaagaaaagaatgaagaacttacaggatggtctcttcgaactgagccgatcgctttccatctctgtgttgtttgagggaatggagacaaaatgagcaacatgaattgtagataaagtcaaggctgaatgaaaagtaaaagaacgaaccgagtggcagccgtccagtcgtccgaccaatgaatcaaactgctagctccagcgttgatcatgggttctgagtattttttcaagccaagagatgatcagagggtgttcttcgacattgtcatgtacgagacgttcatgaacgagacgaaccgattgtgaagatatttccctctttcatgaaaccaggcatcttggactttccataatgtaagactgaagaaacgatgtgagagtaaatcagtttgagaaatggacaattcaaatagtgctactgataggagacgtctcactgttgggaccacagtggaactaagaaagtgaccggaacaacacacgaaacagacgaagtcagcactcgggattatgatccttacgacctacgcgaaagaaagctctaaccagctgattgatcccatgtccagtatatcgcgtcacgattccatatcctttaggcttgactacactctcgatcacattgccgatttcactatatgttttcaagtttcaagcagatcatcagaatacatcggacaatagtgatatcctggggaggcagaggaggtttccggtcgaacttacgcaaacgcaactccaggcttacatatcgagattgcttgtctgagagactccttggaagtggccattagatcgagcgaggcttgatcaacattacctactgggtactgcaatcattcaatgtatacatttgaagagaaaggatcagctgaattcgaatataagttgtctagaccttggaacttacagtcgcattgagatctccatggaaacctgagttaccaagaacacgccatcagtcagtgcctcctgtaggttcgcttcaatagccaacaaacgaggaatgtttgggattccgaacctttgtaaaagagagaaacatccaggttgacaatatcgccatccactttaatagatcgaaaaaaaacagggaaaacagcaaatcagcgatttaccgtctagacaggaaaaataatctgagaataatcactcacgaagctctcgttgatcgggaataccctgcaaaagagatatttcaaatattgacagaatgtattagctaaaagcagaaaagaaatatggtaatgactagacatacatggcagatgacttcgtttacactcgtgcaaacactcttcgggaacttccggtatcctagtggactggctatggtccaaggaaatccgatgatatgcaagtcaatcagtgatatttctgttatcagtggagcggatgctcagaccgaagggtgaacgaacgataggcatcccgctttaaacattcggcgtgaacgatggcatctagctcatcagtcgtgattccaggcttgatggcagctgctgcaatgttgaggacctttcggccaagctaggttcaaagatttgatattgaaaaaaggaatttaatgagagccaggtcaaagcgatgttcagcgcaaacctcacaatcatcaaaatgaataaacagacagaagtaatcatcaaactcaccttgcagacttccctcataccagcgatctcttcaggggtatgaaccttggcagcatagagccttgaaggtcgtctcatcatagaggcctcccgcattccctcttcggcctccttcatggattctccttccgctgttggagccaaaacagagccaaaacaaagccgtggtcgatgaagtcaacatttgtttctctattcacctaatccgaagatttgggaatgcagaaagtggacaacgtacggtggtcgacataatctggtcgaggaatgtgtgctggaacctctcgcttgtctgaaagagggtatactgctcgaagggagcctgtgtagttgaaatctgggtcaaagatatattgaccctccttgagctcgattttggcagcagggactgagctggcactcaatgcggcagtagctgcagctggattctgaacagccttatgaataagccggtgtgatttctaagcgaatatagaatgtgaaagaaggagacagtgagaaactgaaagagtggacatagtttctgggacattttcaatgataggtggatgcttaccccttgatcacagcggacgggcccagacaggttgaacggggttcagttaggaacaaagaataggatgagagagaaagatgaggcctacagttcttgttgaagcaagcttggtcatggaagaagcttccccgaatacccaagctatgagtgaactcggatgggttagtttatgtactgtcgattcccatatcaagacgagagatacaacgcacttgatgcaaccgggacactccagctttgcttcattcgaggaacattcagctccgatacacttgctcatcttgaatggtttgaagagaatataaaagagtgagggaatgaaagagagcaacgactaggcgcaaggaaaaagttgctggtggttgtcgcgttcaaaaatccagagaattcttatctctttcactgtatcttgacgcatctccatctttgacataacgagccactcccatctgttgtacttctattctttcccttcccccaagattcttgttcacgcaaacgaatccatacatatactcagttagtttcgaggcttcaaagatggacgcatcaatcgatgaagaagctatatttaccaggccatcatcggatgtcattcagttcgtgatctatcaaccgggaacgtcatcgaaaatctcacttggattccgagtgtttatgaaagctgaaccatactcacgctggcattttgttcatgtcatctcccttcttgattgaatgggaatagaaacgcatggcaacacttgttcaaagatccaatgctttccgggagtaagctgaagacacagggactggacggtatacctgacttggttcatggtggggtcgtacctaactgggttccgatgtacgtctgagtcgagttcatcattggttcttgtcattcttcatgattaatgctcaacgctatatagaatcttatccaatgttataggcgaagtgtgtactggaaagtaagtcaacaagacaaacatatccggatcgttttctagacatacatactcatatcctcgacgacagttctacctaggtctactcccctcacatgatccctcaacctttctcaagccattgtcgacatcgagagtgacatatgatacgatgagatcacagtatctcagagcgcccgacggaagatgggcagcagatgtcagcgtgcccgctggagtcaaaactcgggatgttggagaagcagctgggaagagtaaaggagatcttggaataaacaacccattgagcctagagagcgaggtacgtctagcgagtgttgatctgtttcttgattatcctttctgaaattctccgttgatgtgttcttgtacttctttatttggttcgattacgtctaacggaaatctcatatacgatatgtagaatccttggcaaagttggtttagggacgtcgaattaagaaaagagatcaagaaagatgtcgagcgaacgtccgttgcagcatcttttatcaaaatctccttccagatatggtgtatctaatgatatatattttgactatccagatatcccgatataccgtattttacccttcctcgagttcaaaagatcctcaccacaatcctgttcttatactccactctgcactccaatgtgggttatcgtcaggtgagttctctataaatgagtgactctgttagatacatttttctactgcgctaagaaccgctcattgcgcaattctcttttaggggatgcacgaaatctgcgctgccatacttttggcagtggacttggactcaatcgaacgaaatggaacgaacgaggtagagcatactctagacagagagaatgtagagcacgatacttggtcaatatatgaggctgtgatgagaagtgcggtagtttggtatcaatggaaggaagagcctgtcctcaagagtggcgagaaggtgtgtctctctgttcagcgtcagaatatcgttatttcccatgtggctacgtcatcaagcacatccactaactttggaggaacatatcttcatctaatgtagccacagcaaccgatcgttcaattgtgcaatcatcttcatgggacagccctacgagttcttgatcctcagctatggacaaagctggaagaactgggtatcgagcctcagatatatggaatcagatggattcgattgatgttcaccagagagttctccgtaagcacattcgtgaatagcttcctcattttgtgaatctgaatatttatcaaggatgtttatggactatgaacagttggatgacgcaatgaggatgtgggatggtatattctcagcagatcccacattgaagatgattgaatacatatgtatcgccatgttgcttcgaatcaggaatgagagtgagtcttctatgctatttgttggtttacgctttcactgatcacattgcttcactcggtttccaacctgaaaagttatatacgcagactattctgaagcattaaccattctacttcgatatccaacatctgaacctccgcttcttataccacttcttttacagcaggcaatcctcctccgagattctactccgagtcctgctttgggcgtatcagttgtgatggagaaccaagctattcttggaatcccggccaatccacctcgtcactctcaagaagaagatgtagcagctgtaagccgatcaagggggaggctgggagtgggaggcgcgagacaaagtcaaacgcttccttctaaggggatggctagtaggctggcgatggccaggaactttgatttgagtggagcgatgggtgcagcgcagcaagcggcagcaggcataggaattcaggatctggcgaaaggattgatggaaagaggtcaggccttagggatcgataagagtttactgggaaaggtagcggaaataagagtgtgtatctttactcttgcagtccatacggctgaagctgactgatctgtgcttttttatttgtaagaaaaatcttccagactttccggcctccacctacagccgtacacatatcgtttcaccttcgcttgacgatgccaatcagcttcccaatcgaggatttatacctacaccttcttcacctgattctgaatcatcccttttagcatcgccgtaccctcctcccttgaatgttctggaagacgagattgctcaactcaagcataagatgcgttgtatgggcactttgatggatacgttcatgtcaaggattgagaagcatctacaagaatctgaatctagctcagaacagcttcatcaagaagaattaaactcttctacatcgataaattctgccctcttggggctgagagctatcacagcgatcctgaaagatccgtcaagtccgcttgacaagttttctgatagctggcctgatccattggctccggccgatcttggagtcactgctgacttctcgagaagctctcaatcagagataccctcagtttctacgcttaatgcttcagatctcaactccgactgtgataatccttcgacagagatacgcccgacgtctccctctacttcaaccactgatgttcctgctctagattcaattccactgcctcatctacacttatctaggaacgagttaccttccttgtcatcaccgaaaatagacggcatgcccccagggaaaacagtacaaccttccaataactttataacaaacaagacagttcagaaccaggctcaaactcctcggtcacctgtccctgtaatggtcagatcgactgatctggaggatttaaactctaaacaacatacgtctttttctttagggactgcgacggttccttcgtcttggatccgggctccttcacaattcacagtaccttggtctcgagcgggcccttcaaccaaaccttccctcacgtattcttcggatactcctccgcaaaactctggggtagtaccgaatagtgtttatagttatccgcctgtaactcctggggctcaaggtcctagagacccgctggatggagctctagatgtggaagatggaagaaagacaacatatgtccctcgcgttgggcaaaaaggatacgatcctctaggtgcattgtgacctccgtggtccagtttccattgtttgcattcatttatactgaaaatgcatgattgattaatgcggtttccacacgatcaccgaatcaagcgattatccgttttgtcagcaacagtcagacaaacatcaagagcacgggaaagaaaaaatatcagtttaaggaagccaagagtgattatatgaatcgtctactttggcgcggcgctccagagtcaaaagaagtagaattagcgcgagagaaaaactgaaagcgaccggggtcaagcacaagtgaaaggtgagcatgtggtcaaaccagttttttcgcatcgtctcgttcctactgtctagtgtatcattcgtttcctccttcaattcgatgttatttctgtataggactgagtgcgggtcatgttatccttgaggtgccacagaaaaaggttgtttcaaatgagaactatacatctcaacgcattcaagaggagcatgcaacctagacgaacatctacaagatgtatatctggtgaagaagcagaggaagggggcggaagaaagatgcggaaaaacatggaaagaggccgcctggacgacccggctcgtcagagtagcttttttcaagtaagagagacccagacactgggccagtcgaccaaagaagattccacaagatagaatctgtcggctgacgagactatggaaagagatccttctcttttcctcttcttccttccaagttgatttcgctctaggtatggcgatcagccgaagaactgatccatctgccggcaaatcttcgcttgtacacattcttggggtcgacttgtcagtttctgagtttcgttcggcgaacaaagctttgctgaacaaccaggtcaccggaatgttctctcaggatgagcactctcggtttgcgaggcttaccacagtgaatgtagctattacgctattggcgcaagacacaataagccaaggttttctagccgaagcattctgaggtcagaaatctttcgtttgatcgttctcatagctccggacagactatcttctcggaggatagcgccttccactaagcacccgcttcatagaactaggagaatcatgataacgcttccggtatatagggctgggcgaccgcgctacttggtctggtcttacagagaaaaggctgtggttaggttcttcatcaaattcaccatataggttgcgttagcgaatgctcttggccagggttagcctcgcacaagcaggaccatctggtcatttgagcctaaaatgatcagactgaatgcagtgtcgctgactcagtcaatttgtcaatcaaactaggcgtgatggatgttgtgtcccatttcgagatcagctggtatacggaagcggccatatttgaggtcgtagaaggcattcagggaagagtgtttgccatataagactcctcatcaggagcctgatcgtatcaggaggagctagtcgagccacccatcccattttttatgatgccctgctctacagaattgaagatgatactgtgaacgaaagctaacgagatctatgtagaggttgagatccgaagaaacaaggttgatataagtgatctgattatgtaagaaaaaacggcgcaccccgatcttctggtcgtttgagctctaagttgtcttcttgcaaaacagcttgcttgatcacaaccggccaccaactgactctcttgtctaactgtacttctcaacccgttgtctgttttagcatgtctgttccatacgtttcaaaggaactcaactcaaagaatttgtcgtatggaacgatgagtgccggtccgtccaacagaatcgatatctccatcccctctgggcaaaggacttcaggaacaccgggagatcatcggaggcggtatgttagtggggacaagaggaagggtaagatacttcatcgcttgattagaacatcaaaataaggacaagtcaggcagctgtcttacatgttatatgattcttgttcttcaatcgcttctattgacaagcctctctctcgaatcctcggtctcggccgcttcatggatcctcaattggtcttctgtccagttcaggcaaggaatcttggaggtacaccatcgccgactcctacagctccaaccagaatcataaccaggcatatcccaagaacaacaatatctcatctatccaggattattcttcatcccgcatatcttctcattcttcgctcgatgtcctattccacccttctgcctctggatcctcctccccctctccgcgcataccctcaggtcgaggtaacaagccgctttctttgctcaatcaagggagcgctaacgaagaaagaaaacttggacagcaacaagaggaagaaagacgcagaatggggtcttggtactttcttgccgaggttcaaaatcagacaagatctggttcggatccctcgagctatactcgtcaaagggatcagagagcgggaatggagcgcatagatcaagatctaccttcaggaagggaaggcgcgtactcgtttgcagattccttccaatcaaagatgtctagacatacgatatcaactccttcgtttctgagtggctcgcctagaggagacatcgaatccggctctagaagagcttcgtttccgacttctgtacaagaggaagatcatcctgaccctgaagctcaaccccaaactctcgttacatctccggtccccgtctccggtgatctcccgacgcagtctgcttcgacctcactttcaacatcgccagccttcacattcttcagtacagatcgtagttccatgttcaacaatcatccccaatcttctcggattgaatcaacttcatccagtaatcctccattggctacagggttctcattgtatggagccgagaaaggagacgatgaggacgagtcggcgaatgacacgtgtagtgatagcatgggacaaacaccaacgatcagggcacgaagatacagcgaggcatttccttctttctctgcttctccagaatcccatccgaattgtacttcagctacccctcagtcgctgaatgctgaatcaccaaggccggcgttagcagtcgatgcacaatggatccgacctacatctgttcgtccaataaatctaaaacttccaccgaaaccattgcccaaaaaagacaacgtgaggtggtggagaaaaacaatgatgggattttccaggcaggaggtagacgtgacgaaatgtgcaattgcttatttcctagcaagtctgttcacgttcaacgaaaagttgaacagctggctgcctaatgcatccaatgcgcacatgattgtatggttttttcatttttatttctgagttaggaaggcacttatcttgattattagactcacctttgatgaattatcttgacaggctacgatcgcagtttactacaatcccggtgaattatgtctgctcacaagttttcggtcttctttgcaaactactgattgctgttataaactttttggcttcattcatatttagctaaatctgtgggcgctatggtcgaggccgatctcttctgtgtctttgtctctgcattctcctctttaatatctctagcggccgtaggaacgatcaaagccgcagacgctgcagggagtcaagccggagattgggccgctttgttcttctggatgggaggtgcatgcgccatcatggcttggcttaaaagttgggtcggtaaaccaacattcaatagtgcgacttccatggggttccttactatgtccatcgtcatcgtcaaagaaggcggattaagaaaactattggaaacactattgaacgttctattgggaacgacgatcgccaacctcacgtgtttgttaatctacccctactcggcaacctccaaacttcaacatgatatcaactccaccctcacctcgttctctacccttctctcgatcctttctcaaacgtttttgcttgatgcccgatcttcaagtgagcctatcactcccgaatcactcgccaaagcggtcgaggcacatgaaaaatcgttcactctcttgaagaagaatcttgctgaagccaaatctgagttcctggatcatagaattcagagaacctcggagagctacgataccgttgtatctagcctgacaagattggctcagcatctgaccgggcttaggtctggaaccgggttgcagtacgaaatattgaaggcagaacgagaaggaaggattattattgagaaaaatcaagagagcgagaaacccatcttctcaccaatgttacgaggagatatgtctggaaaaggtctgccgacaaccgtgaatgtgcagggagaaagcgactacttctcaaagtcacctgatcccgcggggcaaacatcaaaggaggtgaaggacgacgaggggatgacacacactgaggctgacgcaaccacggacccgtctcagttggttgagatccaagaagcagagcagacggaagaggacaattctgaagaagatatacggttggctgaagatgcgaatctacttgccgaggtcagagagcaagtcggccctcaaattcgagctcttacagtgcgtctctcttgccatctcataatcggtttgtattctgctttgctggtttgtctaataaacataatcacaaatcacctgttccgcaatattattattttctaaatcagaccgcatgtaatgaaacccttcttggaattcgagctacctttgcgccggctgatccaggcctcagctgtaatattgatgcgcttcgtgaaaccgtgtccaagactctagatgcgttcagagctagctcttccgggtcgatcatgtctctatacgacagtggatgtgatataccagatatcggttcaaataatctgaataccgctccaaaagagagcgctttcttggttttttagtaggttcattcatggttgaaatgagcttcctcgaggataatatagaagccgatcctattctgattcatccccccaatagctttatctttactttagatgaatttacccgagagctgctgtttttcatcgactccatgagtgaaattcaagatcaagagcgccaatttggattgcgcgcaaaaagttggatcaccaggtggacacgtcaaatctccttttggcttgaacgcaaaaggtccgattattcaagcacgacgactcgcaagggacctccaactatgaagcgtaccttgagaaaacggatgtgtatgttgattcgttgttccaaaatattgttcttcataaaacaagagggggaagccctcaggaatagttatttgctaatccgtttctatggggtaacagctatgataattcccatcgacccaagcgaatacaagataaaattcccaaataatgccccggacgcacctggtacggccaccaatccagatcgaaaaaccctctctttcaaaggtcaatttcaacactgggtttgggagcttgctgaacggactcgaaaaccggtttgttaccttgaattttgacatcatcaagaaaacacaacggaaactgatattcgaaagtatgataggatataaaatatgccatcaaggtcggattagcgacttctcttttggccgctcccgcatttacaagtacttggcgacctatcttctagtgagtttagaatgctcagtcacatgttagtggtgctgcctcggtgaatcaatactgatgtagaagatatcgtgtaacggttgacggttagcgagtacaaaggagaatgggctctgatgtctgtgcgtatgcaccttccatgtttcatgatagaattctagccgttatacggattagctgacttcttgtctgtattatacagtttttcaccactatggcgcctactgagtacgtaagaaaggcccttcttctacacattatgatctttaatctcacttgattatccttattcagaggacaaaccaactttttgagtctgcaacgagttttaggcactctgtacgtcatttccttacctcttctcttcccatcactgcccgtgactcatattatcaatgctctgaaaacagatctggagcagccacggctgcctgtgtttattcaatatttcccgagaatcctatcgcccttcccttgtttgggtttttgtttagtcttccttgcttttggtacatcgtcactaagccggcgcatgctaccactggaagatttggtgaggccaatctatatgacacgaatccttcaactctttcgctgatatacctgttgatcttaatatttcagttcttctaacatataacttaactgctctctattcgtaagctcgcctgatcgactacaaaataggcagtctatggctgtctattgaaattgcttgaactgacacgtcgcataatgttgatgtagttacaatgatcgagctagagacacgccggtgtggtccattgcgtaccgtcgattcactgctgtctcggttggtgtcattttcgcattttttgtaacaagattctggtggccatatgctgcacgaagggtaagccacttgtttgttctcgactcacttgatgtctgcttcgagctaatgtttctctcgttaactctttaggaattatcgaacggtctgagcgagtaagcgtcactcctgttaaccatgatatatagaacctcgttcactcacaatgactcaaactcccaatagcttctttatcgacctttcatacctctacacacgactcatagcaacattcagcgagcatcaagggactgaagatggtgtagtcaccagtgatccgttggatgtgattgctgaagaacccaacgagcgaacaagattagttattcctaagagtcctctgagcagctctgtacgagaattcatggccatgtgcgtacacgggatctcgcaagctcttcctcgtcgacgagcgtggcgtccttttattgatcgcttttttgtctttagggaactacatttgcaaatcagcttgatcaatttgagaagtttgatggacgccgctaccaaagaaccaaggttcaagggaccctttccacggaaactgttcaatgctcttattatgagctctcagactatccttgatcgctttcactctattcgatgtgttgtgaaccgagaagaatgggacgctgtaagccctatatattcactgatttcgcgttctgtactcgagctgactcaaggtcgtttcgtgtttcttcaaacaagatcatacatcgtgatttcatagagcctgtgaatccagaacgtagagagatggtaggtcatcaagtcgctatgtaaagactgacagtgattatgctgattgttttcaatgtaaataattaacctcgttatagacaggaaacgttctcctctacttttcgacaatatcatccgctttcaaactcaaagttcctctatccccctaccttcctcccgcagaggaagcgcgtgtaagattactcatgaagattgaagatcttgaagtcatgcgaagtgagaaaggcggtggagctaggcatcttctgttcttctcttgtatgtgaacatcctcctaacctttgctcttcagtatctttatcagagtttgatttgaagactgacatattggataatttatttgattgtagatgttctggcgatggcaggtgtcatcaaagaattgaattatattgggagcgttctccaaggttcgtctttctactatcacagtaacatcgtttcaggatggtgacaatctataatcttatcattctaactcttctcttttacagacgcttatggtgtagcaggagggtcgtttgctaatttcgaagcactgtttgaaacacctcgatagacaatgacgttcacataagttttcacaataacaatgtgcagatcaatctataaatcagcctgactgtctatcgctaaccatcgttgtgctctgatgaatcaatgttatttctcagatttcttaaatgccatagaccacaagggttgaagagacaagtgcggccgtatacagagacaatacatcatcgcaaacggagaacagccacgccttcaacatgagctgtttgagggaagagatcaaatcctcgaagactctcgagaatatatcgtttaccgtccatatcttgcttcaacaagtatccgatatctcgagcctgtggttatcgtgttaaaaagccacattcgagcaggttgaaaacggacatcagcaagatgagcttcataaggactagttgagatataagtatagaggaagaatgaacctgagtatgaacgttgcaagaaacgtaaacgactgtttgagggtggagggcaacaagctgagtcaagaattgctgatcacatccttttcggggaggctttgaaatttttgagaaccagacaagaagtcgttttagcaagtcgttttccttgtgcagaaaagatgagcatgagaagcgaaaactcacgtcgatcacaacagctgtgtcttcccaagcgagtccttcgacattttcaaaaatgtcctcgctcttaccagccttgaatacgcattttccatcaactccattcagttttgcgtttctctcggcatactcgatactcttcgggtcgatctcaattcctgtaatgctcttgaagtggggggagagcgtgataccgaacaggccggatccacagtaggtgtccactaggtgggtcggaggaggataaggggatgggttggattgaggagaaggagggaaaatggcatgcttgacgtagtcggttaggggaataagaatcgagttgttattttggaagaaagaaccagaggggaatgtaaagtgaaaatcgccgacacgctcatggatagtttctgtattacacgaaaagaacagtgggaatcaataaaacgcaaggacggtgttttttaggaacgacgtcaaacatagcagaggcagaagcagaagcggaagtatcaaacgcgcacctttgtagtttgtgacagcaaagtgaacgtcgtcttccgcggtctttccgggtccaaacgaattgggatcactcgcgtctcgaagaataagtgttgcatcgcttgaatagagatgaattgtgctttttaaaaggagaagaaaagaagaaaaggacagcatttaggggagacccgtttgaagaggatagacgagtaaagaacttactcgatgactttacgtctttcgattgcgtactgtttgttgagcacactagttcctaacggacaatcctatgaatcatgacgatgatatttgaaaggaaacatcgtcaacattgtgtaatcgcgtgcatagaagtaattccaggttgaattttagatatctgagacacacctcgatatccatcacccgctttgagattctctcatcgaatccaatcttgaactcgaagtctccttctgcaggctttccgtttctatcgaccattccacaacttgggaagaatctaccgtctggaccatgaccagctggcccctcagctttacttccctctccagccgcgacaataacgccatcagcttctccattaacctccttcttctctgatgtttcactgatggcttctacaggatccgcctccccttctgccagaccgttcatcgatacttcttcttcgatggtgccggccacaggcacgacggcctttgctcgtttcttggaaggcagcgggattcccttctctttgagaatggtctctcgaatcgtcctaggaagcgatcggaagtgaggggtgatcttagttcgataaccggattgtttgggagaggcgatcgtaggtagaacgtctgggatgagggagagatcagtgtctacgatgatgaaggaagtttatgttgaagtcagcgccccatacgcgtcacaatttgatcaaatgaatagccatacttgagaaatacttgaacgcttttcgaacggtctctcgtttccaatccaactgagtctcgtaagaaatgttttggaattggcatcctccactgagaaatcgatgacagagcagaaggagggtgatagaaaaagtagattagattccatgtgattcgttccttcttttctcatacgcgcgcgcgcaatatttgcacggcaataagcatcactgaccatgtcccaaagtatttgcaaccaacaccctgcccatccttcaatcgtagcttgtcgtttctctcaatgacttctacaagctctgccaatgaatgcattcttgaattcttgatgactcggactttgatcagctcctctggaagagcaaacggtgtaaggagggcccattttcgagaagggttcgcgggagaatcatacaacgacaacgagtcacctataatataacgagaatcatgacgaaatccgtcagatgttagtaccagtttcttatgagtcggtgtaatatagatatatagatatccttacctccagatccaaccatgcccacccggacgacaacctccatgccaacatctaatggagattcccaatcaatctcttggctctcagcctcgtcgcagacctgcttggtcaagagtaactgaacatcgttccagagtacttcgtcgaccaccaggtgcttgtttcgtctgtttgctttcttgccctttccctggggcctccgaaccgaagcagggataggtttggaaattgagctagaagactgcgaatcgggaagagctgcagagattgagttagaagtagaatcctcaatggatgaaggtaagacaatggatatcgaggaagggtcaggagaagattcatcgagtcgagctcgtttctcatggtggtgtttgggcgaggacataggagacctcggtctgatagttgaagattcagacattgcacggaggatgccggaggcggaaacctgtctgttcaagtgaagcgctggtgattttgttattatatgttgcaggactttcgaactatgtcttgctagcagcatgcaacaagcagtagagtaacgaaagacaaggagaccaacagaaggaagggaaagagagaaggtaaagaagaagtagaacggcaactttcaaaaatcgttgttttttcttgcaccaatcaaaatcatgtctttgaaagttgtaaccatgacattgttacgtgtagccatcacgtgactgagatgggtgaagtctctcacccacaaacgaccgaatctctcccaatgccctatgaagcaccatcaccggctcgctctcatctggtttaagaagagaaaagatacatgagagatcaaagagtgagatgccaattcggatagattgtaaactagactgatttcatcagttgaaggccgaagtaggaactcaccagaacggttgactttaccaatcctgttggcagctttccgggtcaactcgaagaacgggtggctttgaggagcaagccggtacgaactctttaacagtgtatccgaatgagaattgaggtttaaaaaaattctattggtttgagagatatagataggtttcttgtaagagacatacctcggcataccacgtctttttctgtggatcatccacaatcttcaacacttcattcattccatatacctgcacaaccgccttcgttctggactcaacagcttattgtatttattgcgcccgaccaaggtgcagaaagttcagtgtttttcaaaggaaaattcggtatccgttaagagacgatagagaagggtacggaccagaagaagaaattaatgaagtgagtgctgtacatccaaccccatgtccaatcatcactacatttttcgcttgaccgattctataccggatggtaaacagattgataagtgataagattctatataaagaagaggtaaacagaagaacaaagaaaggacgtactcgacgacgtggtcccaaacatgttgcaagagcgacttatagctctgtttagcaaccttcgggctcgaatacgccaactgggcataaccggtgaacaaagttattacaattgcacattactatggaacacggttttagtgaacaagaaataagacatactccgtattttaaagagatagggtattgcaatggcaaactaatgtctattactccacactctcccccttggcctaaaccaagcgcagattgatcgagcgaccagttgatgatctcgttcgaacagtcgatcttcaaaagaatttataatggttgttagcgaatgagaaatagccgtttgttcgacatgggtgagaagagagcactaactagatagctcgatggcaactcgacattgcccattggaccactatcttcaacagacaggtttccactacaacaagtttcttcatcggtatttatccacacgtcctcagacaaacagaaagaaaggcagaagctcacatatcatgaacaaacaagaccaaagtatcgatagatctaaacacgttcatcctgcgccccatgcatatgtgtgtacacacaacacaaatgatgtcagccacaagaaccttgacgtcgcgcatgtttccttaatgaaagactcacgttgtatgtactagaccgtcatacacctttgccagctgagtttgacttagtggtaggggtaccatgccatatttctcgctcaaccattctctccggtgggaagagatgatttctatatgcacatcgtttcatagaatgaaagcatcattgagtactaagtttgcttggacttaaaataatcaagcgcaacgacttacccggtagttctgatatggatcctgtcatcccttcaaaagctaccgagcgcatacgcaagtgggaaagagcaaggaatttgtcagaatctaaaaggtcgacatccttttcacagagaacagttcaactcacaatcttttggtggtttatgacctggcaccaatagtctccaatacttgctttggacctttgcaacctcatagagagtttgttccgcggagatactaggctgaagttttgaaagcatcggtggtggatctccaagcaaggtctgagtgcatgctgccgcacattcagctactgtcggtggattgtatcctcccttgagtcggccgtatatcgttagcagagatcgtgatcaaatgaatggatgaatggatggcggaggaaagagtaacagggtcggccgacatacctcaagagctactaccactttgccattcgcaagagtacaaagaagggagagtatggaagcatatcctgctggagtgacatcaaagccacccaatggatcgcctcgagctgcatcgaatccagcagaaactatgagatggaaagaaagaatttcattagttcaaatgatatgaagcacatggcatcagagaaagataggaagtgaatcaccaaagataatttctggaacaaactctctcagaattggcatcacaacacgctcaaatgcaattacgtagtctgaatcacccattattccgttccaaggaatattcacgttcaggccttctcctttgccctctccacaccactccatgccaccttcaggagacccaggatagaaactcccgttgtcatatcggtgaagtgaaacataaaggatcgaatcatccgtatagaatgctcgctgggtcccgtttccttcattagttagaaaatatcggattcactaggggtgagctatgtaaagtacatcgtctgtagagacaaagagcacataccatgatgcacatccctaaggcacaattcatcggatcaaaatccactgtgttagcagcggaatgaacggaaagaaaacacaagaagtgcgatacctaccaatctataatgaccgttctgatcttgccgtatttctcttgtacgaccctagcagcaacggcaacattgttgaagaagcagaacccagagggcgtctgaggctctgagtgatgacctggaggtcgaacaacagcaaacgcattccggacagagttcattggatccattaccgtgagcgctgtctctatcactcctccgcaagagatacgagcgcagagagaggtttcaggtacaacgtaaagtgagaccgctttgtataagtcgagtgtccggaagacgtcgtcctcggtgaactctgttgagtggttttacagtgcacaaacaaactgtcagcgcaagtctatgaatagagctgatgcaccagaatgagcagagaatggtttgacgaacgggcaaagccttcgacttcttcccagagcttcctggtatggactagagagacctcttcccatccaacttccttgacaggaatctttttcattcgcgcaatcaacccttcagctttcaacttctcaaaggttgctgatatccgagctggtgcttcagggtgatcgtcagagaatctgtccatctctttgtgcatcaacatcctctcgtcgtacacataacacgtcgtgaatggtttatctataccattcgattgtacaacagattctatagatcgaagaggcgaatttcgtgagatcttggatcgagtgggtacagttggaattgcagatgcttgaagagagctaggggtggtcgagcgtgttgttcttacagaggatgctttagagttggtagctgaagcgaactggtgattagattctgtccggtttgtcgaaggctgaggagacgtggatgaaacagatatcaccgaggtagttggccctgatgctgccgatgaaggcagtggtggagggtccaattcgagttctatcatatccaacggatcgtcttcctccatgttgtgatccattttccttatcgttatagaaaaacaaaagacttaaagatgtatcgatttaaacaattagaagaagtcaccgagatgggcggacgcgttcgaaatgaccggaaggagaggcagtatgtactgtgacgacaatcgacggtgcacaccaaatggtcatgatagctttagcttcaggatctttgacgctagtcctcattatgactgacctagagaagacaggactagagaaacagccgaaagagaaatcaaggtcttcaccaagagcgacgttgagagtcggagaaagaagaaaagagcaaaaagcgcgacccggaattttctgaaatttcgatcatcgctgtcttcaccaacgatcaacatctttcatggcttcttcaagcaatttctcagcctcaaccacatcaagtgagatacaagaggccgccttgatatccaaatcgctgtctcctagatgtgttagtgcttcgcaggttatgactcgtcatagtttgatggcagctcacctatctctcgagtgtgtttctgccactaaatcagcctttcgaagaacgagagagtgcctacctgaaagtaatctctcagagcacctcatcgtctctgtatcttcggaaactagtcggaagattagttcctcaatattttgccgaggtaggtgagagtttgttcatttggtcagtatcatcagtcctgtacaagaattctgattcgctctacaattggcaaccctgcatatatcagttcaatgctcttcaggaaaaggctgtagacgcgatctgtgatctttgtgaagattctgaaaaagaggtcagctagcaaacggatgctcttacttccagtcgtactctatctgattactaaactgctccttccatcatatctatgcacacagattcggattttaggatgtaacgcgttcgagcaaatctctcgcgtagcaaattcatgggtcaaaagaaatacggacgtgttaatccagctcctgcagattggttagtgttctctactctctgtgatatgtttccattgatcatgctgatctaagtgttccgttctgtcgggttgtagatatggaagatgaaattcttatccttcgacgtctgattgccgcccatattgatatcagcatatctgcgttgagcgtgatcattgattcgttggcagatccgggaatggaagttgtattgaagtcaaccttggtggacataatcacggttgaaggaactcaatggaggaacaagaacatgccgtcgacatctaggtctgggccaggaatcgactcagaaagcgaaggaggccgcgttttgagagaagggttatatcttgttcgtacctttcttttcatcttgttcacatatctcagtactgttattacaggactgatctttatcaatcggaatgcgaaacatcttataacagattttatcgcaatcacctccgcttgctctagcagagaaaatatttagccttcttttccttctgcccctccctacaatcgctcgacgcaccacccatattctatcatacagctatccatcccccctacctccgtctctctttacaatcgctcagcagtatacatccacggcaagacctgagcttgttgaccctcgctcttttgttcggtattactttgaacaaccatccaatccattcagttcatcatcggaagaagttgacctggaactaagccaggagaggatactgttaatctggatcaagcaatgggcggagagggagtggagtggaactttgaagcaggagatagaaggcgatgaagatacttgggcaggagagataagggagaaggagaaaattgtcaaagatggaagagagaggtggcagagagtattagacaacattgctaatcgggtttcatccaaagtattggttcgtataatttttctctcgtccaacctgttcaatttcggttgttttttgcctgaacgtagcaaatactctttttgctctcggtttctgctctcttagcctctattgcgttcaggacgacgtgatagaaacggactaaacctcccttttcaagcactggaaacttccatgtttattctcttttatctatctcggatcgtgagtcttcgtctcatctgtctgtatcagggtcgtgatatgtattccctgcctgacgaatgaatcacatctctgtttctttttcactgatcacttgtacagccctcagttaccaaacaatttatcgatccaagctcaccactggttcaatacatcaaccaaaggataggtcctggacgtcctcatgagaagtctagcggaagtttgaggctagcgcagtcgaacgtgtggtttcttctcgatgtgagttcgtccgttgtgcgtccgtatatcagttcgataggctcatctatctttgctccttgacagttcttccgcgctccacttcccacttcaaataatgctccttggtcgaatagaagaatttctttttcatgggaaatgaaacagtcttcaaatcctcctgtgaccaatgtatcgccgaacattattgcgccagcaccgcagtcaatggcctcgacacctgtgatccatggccgaacaatctcttctaggacatccccagctactccatcagctccttcggtgaatggaatggatcgaaagaccttgactgggacagtcccaactatctctccttctgtatctaaacctcgacctgctactctgattcattcatcttcctccgaccttctacaacgcttgataccccagtcatctcagggtagaaaagacttgaatcactctcttccccgtcactcatcccagattcagcaaagatcattctctgtccctaaaccaagtactctcaacgctcagaaccaacttcagtcggaacaagcaccaaatttatcgaacgcagaagcccgttcggaccctgagcttcgactcaacctctccaaacatgaaggtgagtttccttctgcaaagtatctatttgtacaaccccaaatagaagtatataaatcacatcaatcgttaatcttgtgccgtctgttacaggcccaaatacaggtttaggcttctcaatcaaaggtcgcgcatcatccgctgtcaccgctactgtaccatcaccactactatcaacaccggcagctatgccatcacttagagatagattggcgccaagcatgggtagcattggcgagagagacgggacgcataacacaggacgatctctaggtgagagtcaaaaaaagcgaaagagtacaggttcttccggtggaagaagaaaaagatgaacgatacaaatatcttgatcaaacatgggctccggttcgagtgactcaactgagtcaaagaaccctgatatataaacctatagacttgtctactcatttacgaatgatttgaactcttgagtgttttcagacctcgaaatatactttccgttatttaaacacgatgaggaacgagccatctcaaatatcacaagcattcgatgatcaatatcactaaggtgtactacatctgaaatgagagtattgccttatatatcaagatgagaaccattttcgttcttgattttatctgcgacgcgttccacatcctgcagaacgtcgctccaggaggatttattaaccttgcagatattaacgttgaagctaagcattcgatttgtagaaacgaaaaccaaagtcaaacgttgcgcattgctctatcgaagaagagaagaaaaaacgggcttttatgattcatacctagctgacactgggtggtctgatatgaaaattggaaaaaacgcgggatcaatgaatacgtggtcgatgatatatctatcaagtgtcacatacgatcgctaaagttgatagaaggatgagatgtataagacacttgctcaactctctctctttcagatccacgccagagtacacgatcacaccatgctggaagacgcctataacgataagttgagaccatcagacctattagtaatgaaatcttaaagccgtaccaaggagaaagaaacagatacttggtatcgaaagaattactctctttctcgtatttaaatgttctgttcaacgactggaggtcagccttagtactagattggttcagattcctaacatgaagacactcacggttcaaatgtgattcctccttcctcaaaaccgtaaaaatgggttccattgcctcgttcgagattcagctggtcctttgatagtagtgcggatgcacccttggattcaacgagcttccagccctcatcctcgggcatgtctattcgatcttttcgacatataaagttttcggcgtaacaatgtagttctgtcaaccggctgttcactcggcagaaataccgcctctagtgtcatcaactcacaattcaaatcgcccaaccagaaacaaagtccgacttcctcatgagcaagtgtaaccggaccgcttcttggagacttgattccataccagccaacactctcgatggcttgatcagaattaaatggaaatttaagtcttctggatatctcttcaaaatccaaccgccgcttgtcaagctgatcggcaaatgctgtcgattcgcatctttttatcagcaaaatgaagcccagagacatggtgggaaatttaaactgacctgctagatgagagtttacaaaagtgactttaccacaaaacaattcgtataagtattctcgagcgacaattagatcttattcaatactcactataagatccttggactcgaagccgaactccaaccccagctttgtttccctacagcggtgcgcaatcagacggcttcagcgacaacatcgatggagtgcaaaggttctggaagcaaatgagataaatgcgcaccatcactcccatgagaccgatcggaacggcatctgtgctgatgtctcctacatcatgcaaatcttttctggccaggacaatcaacagtacgcccacatactgtttcgatgtgagctatacaaacatcaaggttgacaagttagggccaatttgagccaaccggtattcaagaatcgataggtatgaagatactttgatgtaattttctctttcgtcgcctagtccagagagtagagccgatgtccatagttcatcccttcctactgctctttctgatccatcgaaacctacagtgtttttgggtggcgcaaaaaccaaactcgccaccgaaagatcaagctcctggaatccaaatgcaaggatatcggctggtctgccgtctggggaggtgatccagtcggatagatagcttgggtccccgatcggaggaagttgcccgttcacattgaacgtaccaacacgaattctgtattgatggattgaatacaagaggatctatatgcgtctctctagagatcagatgatgacaaaggatctaacatacctaagtgcacattcatctgtccattctcggaaccgagctttcatctctttttcaacaaacatgttgctcagcttggttgacaaaccagacggtgagttttgagactctgacaaggtcgattctttgccaaatgtcgagtttgtgtcacttgagtaaaaggcgagcctgattgtccgataacatatgatccgatgagaccaaactcttttatagataaaatggaactagtgatcaaactaaccaagcaaaggagacctttggcgagagattttgattcttgtctaaaggcaaaatgattcagcatatgatgtactgagcaggtagcgcgcataagacaaacagactcacctgattttgatttcaacctgtttacctccgccaacaaatcttttgtcgtgttcaaatcgctcacgatcacttctatatcccgatgtttctgctcaggcctgacccgaactccctctggtggttcatccagcagcttttctgtgaagtttagcataaattctgccgacacctcggttcgggcgaattgaagctcgacagccgttggatggagtttatcaaatttggcctgatactgagagatcgagattttcagagaggtagtaatgggcaagatgctttgtattcgataggtgagatcagaagagcaaataacggtgaagatgctgtaaaacaaagcagacaactcagcaacactgatgatactcgttataaatgggattacagaactcacgctccttcatcctctcctctttccgagctcaaaacgatgcctagaatgacattgattggctgaccagctggagatacaaccgttccctgaacaaatgatctgagatactctgtgggccgaaacaacttgtgtagattctgtttgtccacacccgccatgtgtaagagttgtgagatgggatgtgacaaagagttgcagtcgtcatcggtctcactctccaacagcatataacctccatctcgtccatctttggctttcaacctcacgctcaaacaacatcgcacatatcatctaatcccatttaaaggcatagagaaacactatgacggcctcttccctaccttttttcactcccgtagatggatttgacacatccgcctttactgatgggactcttgttcttccctgtgtgtcgtaagcattttcagccctattctcgtcttcaacgataaatttctgaacacattgttgtatttgggcatccagagtaggaaatgttcctcagcttaccgtggaccttcttattgccacactccccaatatcaagcgggttggattcctttccactgaagatctcgttcctttcgttggaggacccgaga

SEQ ID NO: 450 - DNA, 51881 bp, Xanthophyllomyces dendrorhous
ctcagtctggcgatgaagatcgtggtgtatattacctccagcagcgatctccagtcctaaaagtatgtctgtgtctcctcatgatcgacggaggatcgagattgacatgttccgatcgacctttattcggcatacgctcttctatagagccgaaaagagcactacctttctcagttcgtgccttgggtcgaacaaatgaagttcaagaagatgcttattctggcctctctagatggaagcaaccgtgcttccggatcctcgtaagctgtgatgctcttttatatctgaattaagaggtcttgagctcaatagcgcctcctgccttctctttaaatactgcagtgataagcactaccagctccccatgccatccgtagtatctattccattccccgatctttccggtcttcccgcgtactcgcatgagtcagcttcaagcgcatcctcttctggcctggaagaaatctcttccaccccttctgcggcttcccaaacagtcacaacttccactcagcctatcctaccacctcttcccggatcaggtctactttcttcactccttctccggatctcggctgatcgagaaagtttccaggtagccaccggtgtgatcctcagctttgttattgagggagataacagagaggatgctaaacagatgggtaatgtggtggatatggcgcttgatcttggaatcggaagagctggcagtggtgggtggagagagcctgagagttgggaggccttggtccgaggtagtgagcgagaccgatttgagtagatgtcaactggattctgtatagagacgtcatttgagatcacatgttgaaacttcaccattcttctaaagcttattatgaagccaatttacaacaagatgctcatgctttcctctttaagaatcgcaacgctgaatggctctgtggtgtgagttgccgttctgggcgatcacaaagtcaagcgagtggaattcagattaaacaagaatttggcagagattagattgtttgcggttgccctccatccaccatcaactacgccagctaggctcaatcgcttctcgtccctcttgctctttccaataagcagtcttcaagcaagagaccggaaattaagaacgaagagaacttgaaaagatgtccgcctctaacgcacaagcgactcctgaaacagaaccgaagttctttgcctggctctccgctctctcccacgtcaccggtcttggtcaatcggccacagaatcctcgatcgaccaaactgaagaattcaagaggctgcagaaggaagaagcagagtggactcagtgtgaaaaatggaagagctatactatgaaatggggtaagttttccttgctctccggcctgtgtctgtatctctgttccaacatacttcatcctgttgttaagctctgtggacgttgcggattaagctaatcgtacttttacttctgctggtttgaaagatccctctgttgtttttatactcaaacatctttccttatcagggtgtccgacaacagcggcatctattcactgtgctccttgtgataacaccaaggctggagggttcagctctgatttaggagttttgctctgtcaaaatcgattggttgataaagctcatatgggagtgagtttttcttgtcatacgttcttctgttcttctttccatgactctttctttcactcgagtctcctttgaatgatcagtttaacagtgatgccaatgcacacatcttctctcttttttctcgcttcgttctatcgatggcctatcaggacacgttatctcatgagttgattcatatgtacgaccactgtaaattcaacgtagattggacaaaccttcgtcatcatgcctgctcagaagttcgtttttctccttcctctccatgcttctcatggcctttggtctcttacgtcttaatctgttgatttcgttcttcaacctcatctgaacgctcgacctttgcaatttgaagatccgagcggcaaacctctcaggtgattgcgcgtggtggcaggaatttaaacgaggacattatgagactaccaatgctcaagccgttcgtttctttctcttcgtctagactgtcttttcgctgctaagatatatccacgaaaaacagactggaataaagctgacacttggtcttactctgatgtgactcgtggtgagatagaaatgcgtccggcgaagagccatattatcggtcgaagcaaaccctgcttgtccatccagaaaggcagcggaagaagcggtcgatgatgtttgggacagctgtaaacctgatacgagaccttttgataggttgtttaaatgatttattatccatgaaatatgaaaattggaacatctagatttgatctagacaataatcaatacatatataattatgacatgctaaagaggagcgtgtttcttccttgttgtacatcaaccatctgtcgtatcaattcactggaagcaaatctatacaaaccctactaagcagagtctttgtcttgaaagctctctccgcgttttcttccagctctctcgattgtcaatcattcctcggtttctgaatcatacccccagcctgctgcaacctccttttgatgatgtagaggtaaaagtttttcatattttaagctgttattgctgtctgatccggctagtttgatttcgaaaaatttgcgatttggtcaacagagctcaatttggtcagcgctgcacttttataacagtcttcatcaggatatccgggatgaaagcatgaaacgagcgaaagaagatgatcaccttggaaagagtcagaactgtcaagctctgcagccaagaaacagatggtctcttgtatctgtgattgatagtggacttcaggaagaactttatgagccactatgtatttcaagaaggataagatgatcttgggagcagcggccaatcgctcgtctgacctgtttgaaacaaaattcattgggagaccaaatagtcggataacagacatatgcgcgtcaacatcctcgcttcttggaatgttgtaagaagacaaaaagaggaaacaagctgaccagagtatgttgacgagatcgggattaaacctagaactcaagaacagttttacggttccttctatatcgtccaaaaaccggcatttaacgacatcgtcaaccacatccccgccatccagcccatcgttaaactgagaaatgtttccttcctcgtctctatttatataagatgacaaagaagagagacttgagccgcaattcacctgaaaggcttacatatgaaagacacatacatcaaaacgacatcgtcgtctctgccgtcgtcactagactgattgtctgtggttgttctctctgtttgagcgaaatgcttccacttttaatgaccaaacagagtttcaaaaacagatcagtatatcagctgaactatatcctagaaattacgtgcatctgcgctagtatgtatccaagcgcagaaaggacttacatgagcccagactatgagatatgcctgatcgtctatcaagatctggtttcgggagatctcccattctcttgtagctctatacaatcgtacggcaggatcattttgtctgaagtttcgtgatgtcatgatagatgtcaaagtcatagaacgtttctagttcgagctggtcaactcgcgctccaaaatgaacacataatcaaacgagagtttgagcaaagattttaacatacgaatcgtacggcccaaaatcatagcttattgtatcgtctggctcttttccgtgaatcccgtttcctccgaatatgtccttaacttgaaggatagttgctcggtagacctctcgatcttcagcagaagacaacttttgatctttcctaatagacaaatctggaatgatggattccagaccgtcaagatggtgttctgagcttccttcgtcctcagatgcttttgtttcttctattcctgctgaggcttgatgcccgacagatttgaactaggcgcaatcagaaattgcagtcacttggccatcagtctagcaaatctcaaatgtatagacctatcagatactgacctcttcgaaagagagtagaccagctggcttaggccatggagggaaggtaaatttgaactcgctcaagaaagaagtgatcctaggctcggacttatgatcttgatcgttcatccggctcttcgtcaatcgatcgtgctgtgttgtgtgcttgatagggagaacaaacagatcaatgaacgagatcaccaaaagatcctaaggtgtattttgagtaagatgaaacaggcggggaagcgctagcgttgttagggttatacgccgtaaggtcacgtggccatcacacgtgattttagggtcacacgcccaaaatatcttctacagattaatatctcgtttggatgtcgaacaggcaagggagaggatagatatcaattagtgacgatctactttcatagatagacaaaacatagctatgtcaaccgagaaggaaatagataccccggaagctcgagctgctctggaagcaatggatatccagattgcagaggctggaacaacacttcttcaggctgctcaaacagcggtaggtcatacccccggttgtttggtacagagattgcgagcactcgaaactgtgatactgacctgatgaaatctttgggctttgtgttgtgtatgggttcgaattcgaagggtgcagcagaggttcttcggttactcaaggaggaagaagcaccagcttggtaccaagatgaactcggatggactgcaatgcattacgcggctgagcgggaagactccgatatggtcaaagctctgctggccaacggaggtgtctggaatgctggtctgccctctttcttataattcagatccctttcgaagacaagaatcgcaataaagctgactggaggcgacttttgactgtatctgttggtctgcgcggcgtcttggaacccaagtcgataaccaaggctactgttccgccgacattgctctgtccctcaacgctactaaaatctacaaacttatccagtctcacgccgtccgatcagaactcttgctttccttcctcagttccaagggtagaacctccgcttcggatagtaacttgatcctgaaggatggcgaagaagatacggtagcaggcaacaccgacaacttcttgaagtccaaattgacgtatgaaaaagatgcggacggaagagaaagagttgtggatgaagaaggcaatggagtcatgatgggctgggaagaaggcatcatgttcgttcatctattttttctctttctaaactgatcttcaaatcgatatgtgctctaacttgtaattcctcattggcggcttgtattcaactaggagggcatcggtagacagattgacggagggtctgttggaaggcagaaaagaagacgaaggcctccgaattctgaatgttggtttcggactaggcatcgtgaggctctcttgatctttgattcataccttgaaagcgcatggtaagcggtaggactgacctttgatgggttttctctgatatcataggtggatactatgtttcaaaatttgacaccgaagccactgttacacacagtcattgagcctcatccttctgtgctagcacatatggaagagacgggctggacggaaaaggagaggccaaatttaatggtcttgaagggaaaatggcaggactgggtggagtacgttttcttctttctcacagctctatagcctcacgctcgcttcgcatctgtatagctgtcattcctacagactctgaattgatttctttacaagggtttctaacactttgacgtttgaccttgtgttattatggtgtctgtaggaaagaagaaatttacaaggagggcggttatgatgttatctatttcgacaccttctcggaaggctactctgaactcaaggacttcttccaacacctcccgaatctattggcaggaccggaatcaaggttctcgttcttccatggtttaggtgccaccagtcagtgttgatcttgctcgtttcttgaatagtttgctcgatctgttcgatctgatgaagctgacgatttgtcttatcacatagacgccacatttcacgatgtctacacttcgctctctgagcttcatctccaagaagtggggattggatctgtcaagtggacggatgtgttgatcgaggatgaggtcagggaagaggtttggaacggaattcgtagaaagtgagtctgtgctctgactgtgaacccgttgaatccgcttttgacaaagcaagctcatgccttctctccccttctgccctctcgccatcataggtactggactctgccattgtatcgattacctatcgcgcagatggacttgtgaacaataaagacaccaatagggatgtttttgataaatgaatatgaatagacctacataagcttatctattttcagtcgcgtgtatgaaagtccttaccccgctttgggccatcaacaagtacggccaacatcgtccaacccatccttcccagaatctatcttattctatcttgtcttaccaatgtcagagcctcggtcaaagaggcagcgttcgggctcagcaaatggttctaggctaacacctcagcaatatgatcaatgcaactccattttaatcgccgtgttacaagccaaggatggagcgttagtctgagcacatcctatctttctcttctgtttcccgttcacgtatttgggattaattgtcgtttatcatccatatcaaaatcatgctttactactctaaaccactcaatctggatcatttgggattgcttggatttattctttcgacgacacggatagtcggttgatcgctacaaacttcaagacacttcctgctgcaaacgaatggccagattactacgagaccattgccgagccaatttgtttggatgaaattcaagtgagctaactgatcatgtcggggcaggttgatatatcgcccttgtatactgacagagccgtggttttctctgtcgctggttgtaatcgtttagtcaaaacttcgttcaggggagtatagttcaccccaggcgttctaccgtgatcttcaactcgtgttcttgaacgcgaagcaatacaacgaggacgatagcctgatacaaaaggatgccgaacgcctcgaggtaagtcaaactcatgtttgttctcacaaacgattggtctgtatgatctctttcatgttgacatctacatcttcacttcacaccgttccaccaaatctttaaacaggaaatcgtcacttccgtatatcaacttttgcaagaacgtggtattttccccccactcccttcgcaaacaatacgctctcaaaccggtcccccttcttccggattgcctgacatttcatccgttcctggctctcaaacacctcccttttcttccgtcgagcccctgaacgccccttccccatcgagttctatagcagagtctatcacgagcacagcgaccaagcgaaagcgcggtcggccacccaaaaattcaatagatatatccactccgatgatgcctgtgaaacctcttccgtcaacttcaacttctacaccgacaagtgggactagtcagcttgctttcaagtctaagaagattccggctccaggagtaccaggaatctcggatctagtagatgagtcagatccagctgtagcagaatcgctagagatcatagctgatttggaggtgagaacaccaaagctggaagagtatggaccacaaggatggtggtcgatggacgtggattatatcgcatccaaaaaagatcgattcagatacatcttagataatctcaaaacattcaaagacgcaaagtcaatatactttgttcattttgaagcatccagctgcgaacatactgacatacctctgatcttgatgtccttgttttacagtggaatccgcgtagcagaatctttagaagcgttgcccatgcaaactgacaaccctctattaacattctccgtaagtttatcacaaacatatatcactggctaaattgttgacacctggtttttgctattcgttcatcatggtatcccgtatccatctcagttcccacactctttacctctcattgaaggtcaagtagacgctgacggctacagtacatctgtggaatttgatgtggacatgatgagactctttgaaaagggtaggagatattattcggatgggactgcgccatacggccaggtcgtacttcttcaagtgagtcaagtctgcaccttcagctcggaagcgaaccgaaagtcatgtagcatcatcgaccctgttgttaatttttggcgccacttttcagagatattatcaatctcttacatctgcgaatcccaacttgactacggcgtccactaatttctcctctgtgcctggtggacctagtccctcaatcgctaagaatatcgagggtaggctaaattcagatgaggctgtcaccacattccggatcagtggaaaagatcgagattttgtggatgtagcgcattacaaagggttcagcttctctgttggtcagtgctgtttgcctttcttgcttgcttttcgtcttctcctttagatgtattcttaaacgttctcttttacttttcgggatcggacaacgagtaggtgattttgttcatgtcatgaatgcggacgacccatcaaaacctatttgtggacaggtcttcaaagttttcgtccccaaccggtatggtctttttcctgccaactgaaacatcttatcactactgatctttctgtgcttcggcaatctacagaggtgttcgacagaatcttgtttctcttacagtgtgctggtactatcgccccgaacaggtgagatgttttctgacctgcggattatgtgttgctcttatttatgtttcaacaacatgtttttcaatacatttagactgttcaccctgcaaatcgaacgttttttgaaaacgaactatttaaaacgggtatgcgttatgatttgttcttgctcacttgttgtgatcatcgtattgaaaactgaaaacgaaaaaaaatacctcttgtggtgtttctacaataggccatttcggagatcatgtgatagaagatgtgatcgaaaaagttggctgccagttctatagtcgagctatcaggggaagacctgtttccccattctggttagttttctatttgattcataaatcttctgtatttcatttcggggctgatcctgacaagggtttttacctctcgtctttcatttgaactcgtaggtacccaggatggcctgtatgtgagtgggactattctccaatcagcaagatagcgatgcatattcttaactcgactcttccttcatatcagacgtttgcgattctcgctataatgataaagacaagcttatggtccggatcaagaatagagatagctgtatccctgaagaacgtgagtaataaaaacaacattatctcaatggaggaagaccagtcagctgactcttcataccgaaatcatggacgatccgacgaaaagttcgaaagaaggacttcatgccttacgccccattctctgcccagatcaaacttcgtcgatacccgtcacctctcatctctggcatatccggaccaggatatataggtgaaccagaaagcaatgacgatgatggagagttcgatctagacgactctcaacctccaccggctcctgtcgctgctcctttgactcccagaacagaagcgcgtctccggaaactggaggaaatcagagcgaatcattcagctaaaggagcctctggatataacttgatgtataacagaggatcaccatcagctgtctcttcacctgtgtcggccggggcaaatggtgcggcatctacttcgatgtatggacgaacaggatcgactaccccggttggacaaggcggtgtagggtcgatgagcaggccttcggctctgcctgccagattgtcagggaacagcacaccgacagcaaagaccgggcaattcataccaagctcatcatcatcgtcatccgcgcctttcgtccagacaacacccctctcccgagcaggatcgtcgatcattccatcacagcagccgcagcaacagcagcaattgtaccaacagccatatcagcatcagcatcagcaacaacagaacagcccaggaagtaggtcaaaaacaatattggatcgttctgtagtagggaacagtggtgggatgggctggctttctcaagtagctcaccagagtttaatcaacgatgacgtcggtgcgtgttggcgttgtttcctctcacttctctctctttctcatttgttactacatattacccgaagagatcaagaatcaggtcttgacgcgagatattgcttcaactctttacaacagcaaaccgatttgaacgtgatccaacgacgaaaaagattctttggttctccggcgcgcctctagctcttcctttacatgtccagcccacccattctgctcaatacgccatgttcttagccgagaaagctctaggtaaaggcgctgatatcgacgtcgatgacggagacgagggagactcgtcagaattgagattaacggccggggaagatcatgggttggaccctcggttattggaggctgtcaaaggaaattttcaacctgatctgatgaagagtgcgttcttccgtctttccttctttcttcatttctcttcaactttgaaaaccaacacatagacttagatctgaaacctggtcttccctctttttctatctcataatgtcctttctaggcatagacgatttactagaaagcgctaatgaacagatcttgggttgcgagaccttgaaagagatggaaggtgcagagtagaatctattctcgtgatcaatcttgtttgtcatgtcatatcgtatgcgtgttcttctttacattctactcttttcttctctcttctactcgtctaggtgtattggcctggagcttgaaatgatatatgtatcggctctcaaatctcattggtgggacacaattgtccttttcaactcttcctcttcctttcataatcaaggtacggacggaagttcaaaaactgcttaagatggtatagcaatacgaaagaaggtcaaaaaacaaagcgaaagaaaggaacaatgcaagaacaaaggggtttggttcaatgtgtttaatggaaaaatcaagagaaaggagaacatgtcatgaaaaagtaaatgtaaatgggtatatgagggggatttaaatgcagagcatgcaaagcgaggtgaggcaaaaggtgcagagggtttcatgcggtacctaatcgaactctaaagatgatggtataaaggatcgagagtgatcgatctaggaaactgagtgtatcaagtttgaggagagagttcttatgccgatggcttttcatctgtcttctcagcctcgtacccatgctcttgctcatattcggcagcatcagcggcgtaagcaaggatgtgagcgggttcgtcctccagatcaagatcatagtgctccgccagggctgaagcgacagaccttctggcgtcgcctactgggtatctgaaagattctctcaaccgaccgaccgtctccttctttggtcgttgctggacatcgttggacaagagttcctcaacatcagcgttcgaccacggtccttgcttctgttcgggagagagtaggatgaggtctctgccctttccgtcgttcgtcatagcggaagcttcgattccagacactgaccacggcgcctttttgtgggaggaaactccttttttgaacttgtcaatcaatccactagactgtctcgagtgttgccgctcatgcgtcttttgctgctgctgctgctgttcctgcctagataacgaagaccttggaggggagtttgttgcaagttttgaaagagttccgtgaggcattgacttggaagttttcattcctctgactcgtccatggttgacgggaaaggaatgtgtgctagcccgattggcagcgaattcgtccttccttgcctcggcgaacgaaacccttggccgagcttctcccacaaatgaagctctgggccgagcttcaggactgtcgatcgagaatctggagatttcttgcatctgaggctcggtgccttcatcctgtccacgccatgtcccgaaaccagcaaagttgttggaagcaacagaatgaatcgttcgacgatcgccaccgatggtccggctgggagaggaacccacttcggattgccagccctcagacaggactgacattcgcttgtctggggtagtacatcggacgtcgaaaaaagatttatgtcaaacacggactttcattcgaagaaaatcacagagaagtggtgacacgaaccgacggcactgctccatctttttcgcttttcggcctgacgccgtcgggcatacacaaggtagacgccgatgagagcgaggagagcgaggacggggaagaatgtggcggcaaaaattttgccgacggagagagaatgcttagtggtcaagttgacgaccaccggatcaggagtggctaaatacccagcagaaggttagcagaagattttctatttaccgagcgcatcagattgagccggaaaataatcaccagtattggcggcggcagcggcagtggtgctgcctccggcgatggtagtaactaatagatcggcaggataggtaacgtggaaaataggtccgaccgggatagatgatacgaacgaaaggctcgagtccgagagggacatggtcatctgtaggtcaatcacagtactcgagttccacctgaagtagacattctatcatgagtaaagttcttagtgcgttaaggtcagagtggaagagtggctaccaaccatttgggggccaaagtaactgaataagatccatcggcatatgtaacaggactccaaatctgtttttaaaaagggtcaaagaatattgtgagcaggcgatgcacgcaacaggcatgagtgacaagaagtggcttaccttgatgactgggttcgaactagatggagctcgtagagtgagggtcaccttgctggcgtctaaacaggtagtgttctaagaaagaatacagtatagattttggaaaaaaaggagatggaaagaaaagagtgaataaaaatcgagtcaagtataaagattttgaaacatacccatgtaaactcgataggtccagaggaggcatcaaatgtagaccccaaaatggggttttggtagagttgagtggaggtacaatctgtgtggccatggtgagtatgaattgaagacatgagtgtgagtctcattacaacagtgtccgatgtgttaaaaacccaaaaattactaaccttgctgctgaagagatgcacgggaatgatgcttgattcctcgtcggactgctctagaaattggatcgcccattttgagaaaatatagttgttggtatgcgaaaaggtctgacgcagattatcaagctccttgccgagtcaggttacaggttgatgtggaaaccgaattggtaattaagaatgatcaggatagaacaaaaacgagtatcgaatgaacgagcgtgtgtatatgcgtgtgtgtacttgaacgagcgtggtcgaggtcagggaaggaacgtgttcctcaaagtgtcctgtatagtaagaggattagaaaagaggaaaagaaagaagaaagtaagcacgataggaaaaaagagaggaaacgaagaagatgttaaaggttaaaatcaaaagagaaaaatgcgaggaagaaaatcaagaaaccgcacgcgcgcgtgttacgcacagggcgtaaaaggtctcggcccttggacgcgtctgccgtatgacgcgtttcttacggtttgcacgcgacacgcgactgatttctcgccgatcaaccaacggcatgacgttcgtgatgatcgatcggtcgcgcagcggtcaagctatgcaagagggccatcggagctgtacagccgactggatgctgcgcgtggcaatttgctcaccgccttgagtagactacgcacttgccgccacactctcacgcgactgccgcgtaggctcagaaaattcggacgcgtcgttgttgctgttgctgctgctgctgctaatacaagaagacgcttaaacaagaacactctaaaaggagcaatcggtaaattcccttcttttctctacacacactcttgtttctcatatcaaccaccaccaccaccattattatcaccactgttataatccagagaaattttacttatgggtatccaatctatagtcgcgctcgctacctttgcctcggtggctcaggcaacttcttacactctcgtacgtctcaactgccgcttggctgcgcgttctctccctccgaaagtgtatgcacttacaatttaagctcatcgtaacctgcgctgttatatcctttaatccaatttttcacaatgtttcgcaggcaaagacgtactctggctcaacgttctttgatgactggtcatactacggcaactatgacaacctgaccctcggggatgtcacctgggtgaacaggacagtggccgatgccaacccagagctgacttacgtgaatgagtgcgttcctcttgtttagtaattcatagcgaaactatttttaactgaatcccattttgatatcatcggttttgctcaactcccttctttcctatacactgcagtgctggaaatgcgatcatcaaagtggtaagctcggccagaactaatttgcctcaaacttcctcctgtacgcttgctcactcacagacatttttgtccgccgcttggtttcctaggataacacatcgaccgtagcgtataattacaagcgagattctgtccggatcacctcgcttgattacatctctgtcggatctgtctgggtactcgacgcgactcatgtaccgtacggatgctcggtctggcctgcgttctggagcacaggcccgaactggccttatggaggagaaattgatactttcgaggtcggtcctacaaaaacgatcttctgtttctattttctttctaatcgtcaattctgacttgatatttatctttcgtaactcaagggagtgaatcaggtcacatacaatcagaatactctgcatacaacagccggttgcacacaggccagctcggtcaaccaaacaggaatcaccacgtcaagcgactgcgattactcggtggacagtaatgctggttgtgcagtcatcgataacagtacgaccaatacttacggtgaaggtttcgcttcggccggcggaggagcctgggtcaccgaaatggctaccgagggcatcaagttagttgctttcgttgcactctcaacctttctctactttcttactcattccttctttcttccctgtttaacttaatatgttctcgttctcctccccgcagcatctggttcttttctagagcagacatcccatctgccgtctccaacgccaactcttccatcgacacctccgctctcggtacaccggtagcttcgtggcccaagtcatcttgcgacattgattctcacttttccggtttgttcacccatccatactctttcttcctgtctctttttcccttcactgacagctctcctcgttctgacaatctccttgatttagctcaacaactcgtgtttgacatcactctctgcggctcatgggcaggcgaagcttccatcattgccgaaacttgtgacgccttagtcgggaccgacacatgttacacaacctatgttctcaactccacgaactacgaccaagcgtatttcgagatcaagtccgtcaaggtctacggttcggtttcgaccacattcaccaataccactggggactcaacctcttcttcgagctccacctctagttctgtcagctcgagcgcaagagagagaacgatggaatacggcgtggttgtgagcgcgggtgtcctgagtctgcttggggccatgactctgttcatttaacctggttcgattcgtctaaaaatatagatcttttgcttttctcttgttctttttcactcggacatgtttttttttggccttttctcttctcttttcttctcgcctttctttcgtcttttcgccttcttctctttgcctgtacttttgaaacctaggacatcacaaaattggacatggaaattaccgactcgccatacataaactcctcttctcaacccatcatttcttcttcttctgcttcacccgacgtatttggtcaggtgttcttgctttctttgtctctgtccctgtccatgtgtttgtatttaaatgcgattcttcttcttctctttgttctcgcgatcgacaatatctgacctcttgaggaagaacagatgaccaagaaggaaagttgaagcaagacatcacacatttgatcctgattatatctaaggcttttcttctttttgcgaaaagagagaagattaagaaaaaacaaagagtggaaagaagaagagaaaatcaaacatcggaaagaaaagaaaaaaagaagaagagaagaaagtaaaagggatcgatgctagatgagaggagagacaggggaaattgaaaaagaaagaggagatctaataggtacttgaacaattttttttggttttaatttgggtttagaactattcgagattcgcacacgaggagaaagtattccccctagagaggagattttggacttaggaattcgaaggagaggaaaaggatcggttgggttacagagttcacaaacataggcacaaggaaagacacagacaagcacagtgacatgaggggagagaacaaaaagagagaaaaggaaccatagacacacaatcacacatagaggaaagagtaaagattcagaataggaaagatcgaagggaaaatgattgttaaatgacatgttgaaggttttccctaccatcaaggaggagaaatgacaaggatgagagaggtgggtaggagaggaggtcatttgtttgtctgtttatttgtcggttggttgagcttgtcttctttcatctcttctcgacagaatctacatgccgtaagggaagccagcatgttgctgtccggcctgtccgtaatcacccaacccacccaatccaccagcacccccaaagcctgccgcacctaaacctccaaaagaggtcaagctaggtccgacggctgggtttccaaagtggtcgatctgttgctgttgctgctgctgctgttgtcgctgttggaggtgaccaccaccagcgtacccaccgatggaccgaggaccgtacatatcagcgagcgagtttgcgtgatgcattgttgggtttccgaggtttcgatgggggtgaacctggctagacgatccagcagccatcatacctcccatacccataggcccggttccaccaccaccaagagcgaggtttagaagagcagcctgctggttgtatcctccaccgcttcctcctccccctccgccagagccgcctccaataccggtactaccgccgagtcctcctccggctccgccggatccactgtaattgtggtggtgctccatgtgctctctttggagcttggattggattcgcttgccgtaaggagtgtttcggatcattggcaaaatcggtcgaatgcattccacgagctatgaaagaagaacacacggtcaaccgaccgaacataacttgatcaggtacgattgataaaaatcactcacaagcatcctctgtccgggctcggcgtaatccaaagcagtctgaacgacatagtttgcgaatgagtctcgcaagagtttttcaagtctgttacggttaagcagttcagagatcaaaattttcctcgtatccggctcggcgactcgaatgcactggaaaaaagcaagtatcgcccagataaaatgtcagccaacttggtctgagtttcacttctgtcgtttagaagaagaaacaattcaaaagataggtacacaccttttcgatcacgttcgaactgaacttttgaacggaaagcgcacagacgttcccaatgaattgcctagtgaccgcatccgagaacctgttatcgttcaagtccaatacgtattgctaacagacgcatagggagaaacatatgagcccttttgagcaagttaaaaagaacgagatggcaaagtagacgtacgacaacgtagtttccgaagggatcttgaaccaaagtcagaccatgataagtgatctcggtgacgagctggaccctctgagaatcagctgcgtgatcaatacaccgctgaaggacacaacatccatgtcggtgtgtagccacctcgacacagtgagcggcaacagcgttgtagataaactaatttgtagtcaacagctcgggttgagtcaatacattgatacggaagtttcgaaacaaagaccggtttgactgacctggttatcctcaggcacaagcctgttcaaacacttttggataacatggtttccgttcaaatctttgatcaggggcacaacattcgcagacaaggcaagaatgattgagtggatctatggacgcagtgatacatttgattgagaatggaaacaatgtaacgcatatgagatcagccattggtcgaactcaaggaagaaaaagaaagcaaagagacaacaaacctgtctgggagtagacaaaaaatcgatcatcttctgtacggccctcgttccgtgcatgttgagcgagattgtcaccaagtctccagcaacggattcacagatagcatttcgctgttcgtcagtcgaatactcgagaagcttctggcaaaggtagtttccgaaggggtctgataggtttgaaaatgtcgtcactagatcagcctcgatcgaacttgtttacaacgacgatgacatagagaggaagaacatcaagctctcaaagactcaccggtcatgagatccgagaaatggccgtaggtctctcggaagatcatatctcgatgctccggtactccctcttcgagcttcttttggagatatcggcagccgtgctggtccttgcagagcggaagaatttctccttgaaggtcttcgatccgggttccggcaaatcggttgactaaaatgaagtgtgcacaaagatgagtctagtttttgaagcttggtgagacaaacgttcaaccgaaaatgaacgacgaacattcagcatctctatcgagttcggctcgtcggtgcttgacaccaccaagcccatcaattccgctgaaaccgtgcccgctagagtaatcggccgaaggagagaatccaccgaactgagagcttcctccgagcttgctagagtcccgaagaccgatcgattggtagacgtgaggatcgaccactccaaactgtgtagattgaaatttaaaggataaaacaaaattgagtttaacaatcagatcttcgttgttggacgaaacttggtacatcagaagagaataacgatagacagacctcgtcgtgaatggacgagccaaagtcatcggtcgccttggagaatccactacccagggctcggccgaacgtcttggtaagatcagggttagagaatcctctctgggcagcttcaagaccgccactggtacctaatcctgctcctccgagcgaaggactggcgattccggatgaactcaagtttccactaaaagcgctctgtgcaccggccaaaccgctgtggacggctcgatccctgctattcgaattggagtgcccgttcgaaccagtgacattggtagcactaccggtcgaggcaaagccgttctgaggagttcccggaacggaccgagcgttcagggcaggtagactggatccgatggaatcagacagggaaaccatatgagggggtgatcctctgttaaggtgctgattggcggcaacagccgacctgatagaaggcgaaccaccggactggggtcgtccggtaaggggaacggtttgagtttccatgatgggtcgagcggaagcgccagagtagagccaggcattggcatcggccgaggcattcaacttgactgctgtggacgtaaattcggtgagacaaagataggaaaaaaattagacgatcgaccaaaggttcaattacgaacatgtatcatgtgcaaagcaggtgaggtgggacagtaaggtgagcttaccattggagtttacaggctcgtcatcaaacccaaatttgccaggatatccgccggatgagaatccatcgagcttaccgatcgacttcatgttggattccaagctctttctttcggccgagtttgaaagtgcaagggcagccgagagaggaccgggagtgatggagagtttgttcagatggaagcttaggtcatccttacttccgccggaaggtcgtcgggaagcaggcattgacttgacaccagaaggaggaccaacaggaagggccttggtgcccgagttggcaaagcttttggccggaggcgacgagggagccgttgtggcgccttcaaacgtctgtccgtttaatgtatcgacagagccggtcgcaggaggcgtaccagcaggagacttgagaagcgcggcttcctctcggagctgttcttcttcgagagctttcatctgagcttcaaacagtgctcgctgagcggcacgctgtctctcgtgttcctgtcgcttttgttcgattcgctacatgagaggagatgatgaaacgcatgttgacgcacggtcagtatcagtatttgcctctcaatatacatgtaaacgaggtaactgtcagatggctcgaacaaggaagaaagcttacagcgttgacttcagcctgagaagcagccttcaaggtcaatcacacatccagggaagaacacgatgtgaaggatagcaaagaaaacagaggaattgaatgaacgttgtggattagttacacagtgtgaatttaccaatcctcgtggccttgagttttgatatacgtactgtatcagcgagatcaaggaaatcagatgctcctctggaaggagcggcagacatatttgtcggggacgaaggagtcgttgcagttgccatcttgtggaagaaggggtgtttaaaataagttgggaagaaggagttcgccaaatcaaatgtggtcgggtaaagttcgttctcgtaggaaaagacagcaagagtgagttctccttgttaagagagatgtcgacagttgagctgaaggagaggagggtatgtggataagatgtataatttttgaacaaaggatactaaacgagacagaaggggtttgggcaaaacaggtcaaacttcagataacgctcgagcagtcaaagttcgttctcttttcaatattggtgtggaaagagaaacccagacgactgattcgaagcagcggcgatgagacgatcaaaggtttatgagagggagaaggagagacctgaacgtaaagatcaaacttggaggaagagaataaaatggaccgaccagttctaagcgatctcacttgcgtacaaacaacgacgggatgagatattgctttggacgacagaggtcaggtgttacagagctggcgagcttggttaatctgaattgacagagcagggccaagagcaaggaagggaaacagagaaggagaggagaagaacaaggaggcaggcaaacagtcagccgagtcgggacaagaagagagaccgaatgaaaagtgaacgaatgggcgtgaagacgggaggagtgagaagagggagggaagcgagacgacgacgacgacgacggagggagccgctttgcgaagtgaccagagttgggatagtcggaaagagaagagagggagaaagaggaagtgtctgtctgtatctatgcacgtatccttggcacgacaaaggcgacgggaacgatactagcccagggtcaagagaggagaaggagaaagaggaggggaaaaagcacgacagcggcagaagcagccatgacgactgaggcagcctataaggaacaaatcaaccgacgacgcactaacctaaatccgacgaacacagatcttggtttacacagataaaacgggaaagctgatggaacagaacgggagatggacagagagagcaaagacgagaagagaagagtgagtggtgaatttcgaccgtgcgggcgaaggtgagatgcgggcgaagctggaagcaaaaaaaattgggcgtagaaaaaaaagaaaaaatcaaaaaattctatgttctatcttctccaaagccgctcttcttcggggtttctttcttattttcttccttctttctttactttttctgcagtaatttttaggcgccgtctgctcgtgttcatgtacattcattcatacacttgttgataataaaaaaagtggaagaagagagccggaagagaaggaaaaacagaggacaaatattttccggaagcgttcgagacacagattgtatccggcgtgaactttgctctttttttttctctttccttgcaatccctgtttttccaacccaagaaatcacgaaacatcctagcactggtcaaaggaggaggaggaagaggcagaaacagaggaaaaaaattagaagagaaaagagggacttggtgttttcattggctgatctgcttggtctccctggcttgggcttctttttcacttgccccacgggtcttttctcttgcttatttccccttgctgaagaaaaaaaaaagatccgggctccccggtcaccaagtccttcttcctcctttcttcttcctcttctttggctcatccttttttggatacatgtagaacgagaaagtgagcgcaagcgcgaataaaagggatgattcatactcagtttgcttcctgttacatcgctcgggtcacaatctcttatcttcatgcctggcctccacgtggcaaggggaacataaataaaaaaatctcggggaaatgtttggaatttcataagaatcctcttcttgaataaacaccctcctgctcttgttcgaatgcctttttcttctccttctgttcttctgaacttcaaatgctgaactatgtggagtctccttctcgcgcttacattctgcttgtgaagatggccgcgaagagacgacggtcccggcaaaagaagacgaaatagaaagagccgaacatagctcttcttcacatatgtaatatcggcggcaaaggctgttctcatcccgtgcatccgtccgttcttccaattgtacaagagtctgaaccaagatgagaaaaatgacgtgtgatccaccggatgcccacacacatatgcaacggagcattcatctagcactataccggtccttctcgaggcgccgttgctgtgggtctggcattccatccttcgtttccacctagtgtccgatcgttttccacttcgtcgtcaatgtcgtcgtcctcatcgtcgtcattacacctgtcattttcaattttactcatgtaaccatctctgctgtactcacgtccatgagagcgcctagttctacctccctgcccttgtccatagttatctccatgtggataaccatcagacactgaaggttggcccagccgaatttctcttgttcggtccataagccgatcgagttttgatctgtcgacctcgaaaataatcccatcgtggccaacctcgcttggtaagaggtatcggaccacccaaaaaatccatcctagacccttgattgatcccgatcccgatctcggagagagtgactgcaagttacggcgccatccaagatcccaagggttgattacttcagaagatgagacgggtctccgttcggctcgtgtcagcaggtggttcggtcgccaacggaggtgactcgtctgcgtgggtgaatcagggagcacaactgccggcggcgtgcgcgagatctccattgattctaacgttgtttggttcagcctgtgtacaaagccattggcgccggtcaacatgacataaactctcttcatcacccccagatacatatcactcacaacgcaagatacacatggtagcatgcgaatcctcctatactgagcccaaacgtcgtgcccatcatgatcagaataaaatgtgagacgaaagtgaatccgaattcagtctgtttgggggcaaaagacacccggttcatcaaacatggtgataaactatgagtcaacatgacgcgaatgggagaaggttgagtctatcttcaaattggagaacccaccatcgcgtcactctctcggacgaaaccgacgagcgtttgaatagattcgaccgcaacaaagacacagtagagcatggtatagaccagaaacagcacaaacgatcgatagttctttgcgccaatgctatttgtcaaacgaattgagttcaacggggttgttggagaatccaagcgccaatatcaagttcactcaccacgtgcctgtatggacgatcaggagcaattcaacccatattcagaaccatatcacaacgtcaaggcatcttcagggaatacctcaacctagagacgccattacatcggtgaacaacacttaccgagccagagacaatgatgatccattttgagctatcataaccgcataaatcgatcagtcaatcgattcctctggcaaaagcagcggtccatctgaagcgccaggacatacaatacaccttccacaagttgagcaatgatgacatctgtcgaagggaaacagcgagaaagtggtcaaatccagcgcaatggtgtatcaaagtttgactaaacaaatcgaacaaatatacgaacgtacctgtccggtttaccaaccccacattttcgacagaatctaggtcctccactcgaactctttgccatcactcccagcgcatcgttctccatcgcccttcctgtcggtccgtctcttacgaactcggtcaggccaatctctccctctcgttcttcgtcccgagtgtggttgtccagtagagcgtactctcctgttgggccacccactccaggtggtgatcctggcagagtagaccatgtgatatagtatgaccataacgatatccctgatagcccgtggaatatagtagcctgaaagatagcatatatgggtcggttctcgattccatatgtggtgcaccagcagagaaggtacacaaagggtatataaggatacatcatcaaacatatcacgactattgttgtgataaacaacacacaccacaaagcagaatatcatgagttctgagcaagttttctctcttggtgggtttatatatcagcgatcagaaacactcacgtccgatcggagcatatgtcttgaaggctttcaatttagaccggcgcttgaggtttgccaaatgggtaggtgtcatcccatacgaagggggcgttataggtgggaggcctgcgtagctatgagaaggcaaagttagtggacaagcgagaccagtggtcaaggtgcaggctcaattccttactagtctggatcaagtgccatgttgttgcagaaaaaaaacggtacaaggaatatcgtgtcgagcaaagaacttggctgggtctacaatgaaggactcggctttgcaccaggcctaggaaacgctattttatatattagacctctcagctagttagcgttatccctctgaatcccacgggctcaacgaaagcaacgacgaccagaagagggacaacaacgatgatgatggcgatgatggttatgacagaatctgagtgacaaccgtcaagattgtctttgtgtccgacgggcccccacgaaaatgaacctttggctttcgacacctttcgattcttgaccctcacctatcgacgtcgctgtctatcgcttccctttcgttctgatcattaaggatctcgtttagcctaacttctctctcttatggaagctattcgacggatgcatcctccgtaccgacttggacctcggcttatcactgcaagctccctccgaacgtgttccctttcgatatcaagaaacagagcatgcatcgttccttcctcctttcggcctcttttgcctcacaacgcgctctctgtccggtacgcccattcagagccaaagttgaaagctgatcctatcaccgagcttggaaagacttttggagaaacccagccgaggtttcctgtcagaggggacgagatcgaggtgctcagtgaacctgaacagttctataaggctttgctggtccgtttttctgtcttctttcttttatgctctcccctcagaagctgacaaatacgtgtccgtgtcgtatgtttgatgattcagggtcttatcaaacgagccaagagacggttggtgatcagtagcttgtatatcggtacagagcaagatgaactggttagacaactctctcttcatgtctttctgatctcgcttcagttcctcttgagtctatcctgactggcccagtatctcttctcgtggctgatcatcgttttgattcgtgttctcaatccagctagctgctattcggactgctctcaatacatctccttccctcaaagtgacattcctgctggatcataatcgatgtactcgagaaccttggcctaccaagtcgaccgcatcaatcttgtatcccctcgtccgtgatttccccggcagggctgaagcttggttttatcgaagcccaaagttgagcggagtgatggaatggttggttcccagacgctttgatgaaggatggggcacatggcacgcaaagatatacggtggtgacgaggaggtcatcatcagcgtaagttcttcattcaacgtctcttattcacagtttgccttagggatactcatgtatgctattccctcttgactccttctatcagggtgccaatttgtccaaagattacttctccaccagacaagaccgatacttctattttcgaaattcgctacacttgaccacctatctttcaaacctcctccgcctgtacaccggctactcatacctgctcacccctactacttttaccgcagcatccgcctctacttccactctcaaatcgtcctcttcatcctcttcgtcaccttcctcagctcttaccgcatcggcttctacagaacctcaaccctacgctctctactggcctcatactacagtcgatccgcgtgacttccatgcgcacgcctttgccaccctttcagcctttcaagcgagttggtcccgtaagacccgagattgggaaggaaaacgtgtcgacgctgatacgagtgtctggccggtccttcaagcaggggtccttggtatcaaagaggaagaacgtgcgatgagcgcggtttggaaggcggttgataagtttaaggaagagggaagggcattggttgatctgacgagtggatactttagtttgtatgatatgtacaagaaagccgttatcgagagcaaggcggacgtcaggatcatcgcggccgcaccgaaggtttgtgctttttgtaccatgtctagttttctctctatttctcctcgcttgaactttcgaactcaagactctttcttcttacgtccgatcatatttggacgatcaaagtccaatgggtttttcgggtctaaaggtatttctggattgatacctgaaggatataccctgctcgaacgagactttgagagagaagtctcacggcgaggaaggtcgtggactgtcactccttctcagacagattcctcttcctcctccctagtcaccaccacgaaatctataccggatgagaaatcggaaaaacctaccgggacctcaggcttgaccgggagtcatctaggctcatcccccgggaccggtcatggtgttgagttgacagagtggcagagagacggttggacatatcactctaaaggtttgtcttcttaacccctctctagattgacgttgaactcgaatggtaagaagaaagataccacttgcttatgttccaccttcgcttggtttctttggagaaactgtacaataggaatttgggtatccccaccgtctagcaaattgccttctcttactctcattggctcttccaacctttccacccgctcatgcgctcttgatgttgaaacctccttcttcatcagcacaagttcacccgaacttcgtcgtgcactcaaaaaagaagttgatagactcagagtgcatagtcaaccgtatgtcattggagcgcatacttggaaagagccaagcagacaggtcagttggcagacctgggtactggtcaaagtattaggagtgaaaaacatgctataatgagccttctggttcagagcattaggaagtataagagaggggtggtactattattccttctctctttcttgatatgttctctgtcgttgcttatgcatagattatgagggtgtgcaaggggatgggtgggtgaagacaggaacagaagattcgcatcaatcgttatagaagatcattagatagagttcatacaaccagatcagaccatggatacagaaaaacgatggcatgggatgaagggagagaatcaaagtctagctttgacatcttgtgaatctctcacatgaacaataactttgccccatgtttttctggattcaatatctgccagtccagtacctatcttgtctagcccacttttgacacggaaagttgaatttgtacgcgtggaatagataatagcatcaattcaggtcacattgtttcgtcgcatcgccgtgtatgttgattataaaaaaaaactggactgacttatatacccggtcataaaccacaggccgataggctccattatgaagacccttgaagagctctccccatataacaggtggctgggaaggttctttctctgtacatgcgtgccatataatgaaagagacgatcatgtcaaatggccgaatacaaaagagagaagaccgagatgtatatggggcttactgtagtatgctccgagatgtagtccgacgacgctaacattcttgaggaggattaagttagccggaatctatcacgtacgaaaagaaaaaaagatgaacatgtatcaattttacaatcgtctataatgttttgcctaactatcgggatgtcgctcaagagcagaagagactaggtaacgtactttctcgatagcgcctgcagcgaaaccgacgacaataagtcgacatttccaagcagcaacttttagactgggtatcaacagaccttttttcaatttttaatacatcgtattatcagaaatgaatcaagatgaaaaagtaagatgaaagctgatacaagaatagagaatgtgacataccgacagggtcaaacacaacgtcgacccctttacctcctgtgatttctaagacctccttctgccagctatccttcgagtagtcaattccaaaatcggctccaccgtgtttcttgcaaatttcgagcttatcagctgaggaagcagtagcgatcactttacatccgagggacttggcgatttgaatggcaggcaggccttccgatgtgagaatcacaaggcgccaaagagagagcaagttatggcttcgagtcgagtcagaaatcagaagctcgtgtgaaagaagagaactaagacagagacgaaccgactccacctgcacccgcatgaacgagaacccaatcccccttcttagcttgtcctcgttcgacgattccctcccaactagtctgtatcatatcatcatcccagtaggcagacaactccatcaaaatgagttttccgctagcgcttcaagatctcatcggtcataaaacttattacaactcacaggccaggtaatacaaagcccggcttgatagagcaacagtcatgaaggaacactcagtatatatacacatcacttaataatcaagatgaacctaccggcttcatcaaaggtaattccgggtggtacgggaagcaactgggtgtgatggacagcgacttgctctgcaaaggaacctatagaaaagcagaggccgatgagcagatacagcttttagtgaaattttttgaagagaaacctgattcagtggttttaccttgggccgctccaaaaaccttgtctatttcatcgcgaggtttcacactgtcagtcgtcagcttgacgcgcttgtttcgttatgtcagatacggagggttgatgctgccactgaccgccagccttgaagacagatccagttgggatgaccgcatctttcgaaacgactcctgcgaactctgtcccgagaacaaaaggtaagggcggttgaactgataccgaggcgaccgatcagtccgttgccagcgatatgccaattttatgtcagctggacgaacgttgatatttgttttgagcttgaagcaccttgatgatttttagagatccagatttaaacgcaaaaagcaaatatctttcagtccagataccgtcgcaacatcgaatttagcaatcctcggcaaagagacaatcttacatcgaagaagttcaacctgtagttagaaaacccgtggatatatcagtgaggatctgcgcgcatcaaagattttcgaaaacgaagaacgccaacgaacccgcaactgtacacgtcgactagaatctctcctttcttggccaccggtgcaggagaatgatgagagctaatccgtaagactagttagccctatgacccactaccaggatgatcctggcgaagagtgatagactcacacagagatcttggtaggatgtgcgtgtttttcgacgacaaaggctctgatgccacgaaattggtcacaagtttatcaaatcagtcaacataaactacaagacgagcgatactatttactgacttcattttgagataggtaatcgatgttgatggtgaacaagatataagttgaaatctccaccacaggtatttctgttgcccggctatatctactgagttaaccgagaaccggcatactgtaaccatgtgatgtatcctaaacgaccactggttacggttcccttcctcatcgtcatcaccgactggctttttcaatcttgcattctttgttggttgtatatcgacaacatcaatgaccatgtttagtcctcagtacaatcagccgtttacaatcgagtgagctgctcttatctgtctagatctagaatttatcacattaaaactgaaaactgactttccagctttcctcaacttcaccagagaggcattcgctctcgaccctcctatcatcaccgaaggtaagacagatagacccactcgacctacactcctgaattatatcccttcagatggaaccgatcgttttacctaatcgatcatcgtcaattctcttacatcctctgtcagaaatctcaagactccaaaattcaatccaacatctcgaacgatcaaacttggatctggtcacgttcctcgcgtcggaaactgatccggatgtagccctgttcgtgcgttcctctgttctcttagaaaccctcaattcaacaattgatcatgtcgttaacgtatctcattatgggtctactttctgtttgatctgaggatttgagtagtgcattacaagataacaagatcacgatcgctactcaatctgagcgaatccagatccttcagatcgcgcttggatctaaactagggatcagggtgtccgactctcattatgcaccgaactccatacagagcttaaattcatctgccgatccgtctagaccaacgaacggagcgagtacagtaccggaagtggtcacgagctcggtcccttctatagtatccgtagagacatccacaacggcgggctcagaatcgcgagcgaatggtacatcctctagtcgagacaatcaggatgactcagaagaaggtgtctatctctaggatatatgaaaatcactagtgataggtataagcataagattcgatacatctgtagttagaactggatccgttgggaccttaacatatggcatgacaacaaagctttcatcgaatcatgaccgagacgacagaaagagtgtatatgaagcgaaaagggagacaaaaggtatgcatgtacagaatagagaattggtgtttttggctagattggagttggatgataagagagataaaggaggggaaagtggacactggacataagcgcaacagaagagagaacgagataggggaccaaggggaaaaccatgcgaaggtgtttgtgtaatctcttctaaaggaagaacgaaggggaatagaaaagagaggaagtgtcaaggaatagtagtttgtgatggtgtgaaaccaagacatgtgttgaaggagtgagtgaaggggaccgagcgaaacgtctgaaagaatttactttcgaaaaaaaaaaaacgttaacaaaatgggagagaagagaagaaacaaaaaaaaacagaaacatggatgtagatggacagaagtgaagatatatctcgaagagcaccaacgacgtcgatatcaacgtgcaagtcctaaattatcccgtcaagggaagaagtgagtgtaaattcgactggtgggatggacctccatctcttccaacttgaactggttcaagaaagctttgatctcttgggcgagctggggagtaagcctgttacatgtcgccggttctgaacgccgatcgtattcgcttccatggaacgtatggtacaccgcacagttcggcgcccaaattaactcccttttcttctccggctgtacggagaccgaccgatgagttcccatcatcatcggcggcgtgttgaataacgagagtgtgggcgcggatgagttctgggcatgattactgtacggaaagctttgtcggtcaacaggatctattcggttggtcaaatcctcgaacggcgcgaacgggggggaagacaggatattcttcccgctcttgtcggtagaaacagcttgtgattgagtacggtcgatgagatcagagcttggagtagggagttgattaaacgaagaagaagaagaaaggcctccagaataggtcatgttgtctgaagagtttgatcgtgatcggttccatgccgggcctgagttttctttcgtagagtcgggctgagccggtatgactgacaaaaagataaacaagacgagcccggtcattagcatcgacagcgtcacaattagatgattgaggaatccatcgctaaccttttagaatcgacttaggaggcgttctatccagagaaaccggctgtacgtcccaagttaaaacctcttcgtcatcgtcaactagaatagattgacccagtttgtcaaccacctcatcgacatctttagcgccgacctctccttccaagtctgtaagacttccaaccgaactatgatcgtcgtctctgtctccatccataaaaggttctacgagaccaagtgaaccaactggctcgattccccctagctgtggtcgatcggcacttctggagacagtattgctctcccaagtggttggtacgtcgatcgacaacctatgtccatcctcgttgacggtcgcagcccatcggtttgagagagcgtcgtcctctgcacgagatcgcagggtgtgctgtcgagcgagcttagcagccgggctaagaatagcgctgtcggtagctgcgactcggtcggtttccacactgaaatgggtgacggttggggacgggacatcacacttccgactccggaacggactgccttttttcttgtctttaggtgaatcggaaccgtcaaggtccttgtttttcttgtccttgtccttaaacatatttgagataccaatgagactatattgtcgagaaatcacatgtatgcattcggatacaataggcatgtcagcgccgaaaaataggaaatggttcaggagatcaagaacgatgataatgtggaaatttccggactgacctgttctttgaggccagcttcccgaacgatccgattttcttcatcatcatacttgtggtactcgcagcagaagcgattgagatattatctgtactggcgttcctcatgttgaagagcgatctcgaccgtttgattgctggtggtctggagtcgtcatctgggagggttgtggatgtgcctccgtcgggtttggcggcctgtattccggaggatgacactgaccggccttgcaaagcgggcttgctaggagaaaccatcgttgccgacactcggggctgagcttctgtcgcaggagcggacgctttgccttttcccttgaacttgctcatcaggcctttactcttttccttcttctcgacgaccgctgtcggtgcgggagatgttctggaaggcggagaagagcctgatgtggaaacggttgtgagtgaagatgtggccgaggtttctctggctcgctcgacaagaggaacatcctgggctcgagacaaaggcgatggtttcggaggacctgatttgacgactactggagcgccgagaggagaaacagtcttaaagggcgcacgcggaaccgtattgggtggactcgagacaggcgacgatttactgggggattgagtagagctagatccgtttgagagtgaagatgggtttttgggtggtcctccgatcacagatgaagatccagagccggtggatgagttcccagtggaagaagacaccgagacgtttcgcgcatgcgcctctcgatattcattctctcgttctctttccctctctactcgacgtttgtgatctgacttgatgctcgagcccacggacgtttgggaagacgttgcctcggttcggatataaggtcttgaaggagcgatcagttcctgggcgttagatgcatccgatacttcttcagtgggtaccgctttccgattcggtcgacgatatgagtggaacccgcctggcggtggaactgcgctggagttggtttgggaggcctcagatgaagcaagaggagcggcagaagacggagtttgagcggggttgtgttgagagtatgaggattgtcgggaatggctcgggggcgtcggattattggagtgatacgacgtatcgagcgatgggcgtgggttatgttggagaccattagaatttgtccgtcgacgttgaggatcaacaaaggaggaagacgaagcttgaaagtcgttcaggttcggattggagtaaggagagcttggagggaaaggtccaaccggaggagttgacccgttgatcatcatctgtgtcacacggcaagtgtgaattgttagtgaatagataaatgaatacatctttttggaaggcgaagagacagaaagtatagctttgaaaaagacgtacatgctgataagccgctgcccatgctgccaattgctgttgttgttggtaaaactgctgatgattgttcattggtgatggaaatggcatcccaggaaacccagggttccagccattgggtgcgttgtagtgctgctgaggtggcggctgctgttgatgctgatgttgatgttggtgttgttgatgctgctgctgctgcggcggcggttgggttgagccccggatgccgtaagcggatacgccgatttgttgggaagacgacgacgacgacgccgacggacgatggctaaacggaggagtagacttgcttcgaggtgggagatcgagactggttcccgagtttgcgttgttgattgacggtcgactctgatgttggctcgcggaggacatgtgggcggatatgtgggaggggcgatccaaagagatcatgtagaaaggtttgagcgatagtagtggtaggaaacccaggggtctatttttgttgtaaaggagaaggaccgaaagaaccagaagccaggtcaggtaaattcatgacaaacagacatagttgattgccctgaagacaagtgacggctagttgtctgaaatcgacgtaatgaatctgacgtactaagcggagaacagagagtagtatattctgtataaaggacccatgttcggtttcaagaaggacgtgtgagtttatagttcgacttgtgctgcatagaatgagctgtatggatgaagtgtgtcctaagactcgggtagagatgattggagggaattgaaaacaggggatagcaggataatttcgtcgaaacgagaatttcttgcccttgaattctaccatggttgtatgccgtctccatctcaaaggtctagagaagtatatttctctggaaaatcttaaaatctaattcatcactcacctcagctaaaccgagaacgcttcttgaatgacgagagcactcgacaaagctcggaaaagacgttttgttcgaacgaaggataggatcaaggaaagaaaggtagagaaagatgtattgccgattcttcggcactagccgatgtgaaaccgccgagcgagttcgatagagagaaaaagcttaattccgacggaatgactgcctgggaaagatgttgaggaagcaaagaaggcggtggtcccaaaaagctagagctagagcttgaagggagtttgtttcaaagatccggtggaccgttcctttttgagaatgatccggctggggtgtgatttctcagagggtaaaagttgtctgtctggggatcccgcaagtgtcagagaacacgaaagagagaaacggcaaagcttgaatggcaggtaagaacaaagatttgagaacaagaagagtgtcgacaacacaagacaaagctgaatctctccagaaacaacgagcaggacacaaagaagaagaagaagaagaaagaaggagatccaaagaagagggaagagtggtcacccaattaagctgaggcgtgtactggggaatctgtgatagtagatctctgaccgcgcgtatgaccacaactcattctcttacgatctttgcttccttctatttctctctggccttctatctccctctggtcgacaacttgttgagcgacactctggatgaacaagctcaatagacgtacctagaaagaactgaccaaacgagacagtgtgagtgtgtgagtgtgtgtgagaagcaataaaggagaaagaaaggacgggaagaaagaaatcaaccgggctcggtatcgcgcaaatagaaatttcccaatcggtttttcttactcttcttgtcacatttcgtccgttctttgggtagtcacaactgagctttagatcgatcttcttacacgtcatatccatcgcaccgcttcgtcggatatatgataccatgttctctcttcttccgagcttatttctatagatatcttggtacacacacacatatacatatacactttagaagcaagtagagcacgatatacagcaaagatcttatctggtgaaagggatttctgactggcagcaaaatcaaaacagactaaaataaagctgatatgtcatcctcgcttgttgctcgtcaccactatacaaagaatcccatatatttatcacacaacttgaggagaagatgtctatcgtccttgttacaatcatgcgtgcgacccaaggattttacattttgaggtctaccagccatcctcctcgtcatcctgctcgttcttcgtaggctgatatttcgccgtccagtccaaccaagagcctgtgtagtttcggacgctatcaaggtttcattaattgagatgagaatgagtgtttagccaatggactggatagttcaccgatgacctgttaatgtgtagtacaagttgaggcaactcacttggtgaaagcatgtccagcgattggtgtggcctgcaaggtctccaatgcgctctgacttcgccttccacttcggcagtaaacaacaataggttgatccggctctggcttcttgtaggcgtactttgactggaacacatccggctccatagcgagagcatctttaagctctgacagggggagaggaagagagcttgggatgttaccctgcttgatctcatctcgctctcgaacatccaacaagagaacctcctagattgggcgaaagatcattcgcaatcaatacaaaaaaaacaccccgcaatgagttttggattccgttattggattaaattgagctgatacccggcttgatataaaaatatgataaaaaaggagaactcaccccagggttcttggaaagctcccttacttcctcaaactcgaccggtcccttgtcggcccaatcgtgcctccccctcggaacttctatcgagtacagccgtcgagccgagttgataggagcaatgactgcgggaatgacgtgttgatgagaggcagctatagcaggagtagacatgggcaagatggactttgagaggacgactgaagacgtgaccagtgatcgacgaaacattgttttattggttcttcttttctgtctttccttcttatttctttcttctttgaaactgatagagcttgagagacgatgagtagatatgccgatagttctatgtagaagaagcacggaatgtagaggtagcgttttaggtgatggatgaatggtagaagaggataaagtagaccacagattggtaggccggcttttgctttcttcgttttcctctcatattcgcacagatcacgtaataggcatcgtcggtctcagccttagcccaggctcacttattcgctgcgaccaccttcaatatagtagataaagaaagaccacattcggaatggatatatttcataactcaattaaatacaaaaagtcgagaggacggaggagatagagaaaaagaatgaaacaagaaacaacacatctagtcatcttttcgacatcatacccgcttccggctacttagcattcccaactccagttgcttcccggaggtccctcaaggctgccctcctgaatggcagtcaccctggcgtggaggccagtggcgataggcccaagtccggtgggtccgatagggatatggatgtccttgacggcttttgattctgatccggtggggagaccgattctagataaataagacgattttgatgttcaacaatgatgaagaaaaccaaggttattcagtgagactttcgaattggcccgagaacgccatggagcttacctctcgacagagcagacgacttgatcatccagtaccgacgaagaaaagaacaaaaagatttaggaaatcaacataagaaccacgacgaaacatatcaaggagagcatgagagcaaagactcaccagcagcagttccagcaccgaaagcctccctcaaagcgtccttctcgctccaagccctcaggtcgctcaagccaaactcgcgctcctcgatgacaaacttggatttctctggcagaccaggaagagttatctcgcccttctgatgtgatcgagcgagggcgagaagagatgctcgagtgattccaggcagaatcagaccgttgagaggaggagtgataagatgggttactgttgagcagaagaagactggatcagacgatgtacaaggcggctggtgtgaagagataaagacgcgcaaagagagaatcttgtcacaaacctccctcatcatcctcataagagacgaacaagttcatctgaccacatctaaaacacgtcaacgacaccgttaatgcaactgaacccgagaagaccaaacacacgatcaagaagaaactaactccgtgatttgatctccaaggcaccacaaattctgatcgtatcccagcgacttagctttctcttgaggtcggaagcaaggagcataattcaaggccagcttgtactgtccagttcctagaatagagcaacggctctcaggtcagcatcgcaagagatgcccaacaacggttgggcgtcgatgagattttgtttggcaagaaatcatacatacctccaggccatgatctgacggcatcagtagtagcgagcagggacacaggcttgaagcctttggggaagaacggtccgacaggacacatgatgacatagagcatacactcgtccgaagcgccgactccgagagcaggtcgagtaccgatcatggttggtcggatgtagagcgaataaggtggtggaggaatcaaatgttcgtcctccttgacgagcgtcttgatgagagagatcacagcctcctggttgaaaggctggttgcaaaaaagtaagggagcagatgaacttcaactttgtctagcatacgatgatagcatcatatggaaacggacgaacaggaagggcgacccggtcggcagaccggctcattcgggccatattctcatccggtcggaacaacctaggggttttaccctcttgtttgtaggccttcatacctatgagaccgcgattggaaaaagaaaagaaaaatcaaatcagcctcggaatcacaagacgagggagagttcgcgataaatgtttcctcgattctttctcattgcacaagaggatggtgagaataaagaaacgtaccttcgaacaaactgggagcatagtggaacttgatatgagaggaagaagaacacgaagaaaaagaagaagaaaaaggaaaagaaataaatttggaactctgtaaacgattacggtgttctccgaacagagtgaacccaagagactcggaggcatgaaacacgtacgacggctgaagcaggactgagctcaaggggtccgtaaggcttgatgaccggagcttgccatcctttcctgatacaggttgaacatatgtatagaagaagtggatgataccataaacaatcgatacaagacgctgggctgaaagtgagtcgatagatttagggtcacatacccggctacgtgcttgatgataagcatgtggtcagaaaagttggctccgaacaacatctgttccggcagagcagacttgacgggattccgctcaatggtaagcaaggaaggctggtgtggtttttgttttgtttacatgaaaaaagtttgagcaagaggacacaaagcacagctcaaccatcagtccttccacaagagttctaactgagagaaggattgtatgatttcgggaaagatgaaaactatagacatacgtcgatatccgtccaagcaggagcctcagtggggatggtcatgatagaaggtaagatgtgttgaaggagtgtatgtgtggataacagaagagaagaagaaaaggagcaaagaaagagaaagactaggttctttatttaaaaaacggagatggaagaagaggaatcaagagaaaaagaacgaaagcggaggaaaaagaaatttagttaaatacggaagtgacgattacgcgcgagacgagtcatcgtgaaatgattgtgaaatagccgcgactaagattagagaatgtactacaggtctatctacaaaacgactacagcacgcgctatcacatgaattttccgagtggcgattacgagacctattaggacggaagctacagaactctccggaaaactctatatggaacggaaaacagtatatacaacagaaacacgataaagactacaatctctgcccggctttatctagaaggctttggagaaaaaaccaggaacagttcacccaaaatagcccttgtcgcctccctctcttcttccgcctgtgccgtacgcccactcgcttacgcccacgcatcgtcgtctttttaaccttcaaccagtataatcatccaggtcgaattctacccaaaccctttctgtttcgtgttcccttttgtgtttctctttcttttctttcttaacctttaatcatccatctcctctttgatcggctcttccaaagtctcgtcctcagcagtttctcgtcaaaacggtggttttctggcgttgatcggctgacgtggtgagtgatttaactttcttctcagggccactcgtcctgcaccggatccataatcgcccagaggtcgactctccatctttgttctctttgtacgatcctggaacatcgtttatggatctttgtcgtccgacatacctcgagtgaggatctcgaccaatctctttcgacattcatcttctctctttctggatctctcgcttatcattcttgtgtgcatacgttgttgatcctggcctttctatctttctgtcctattcagaagagtcccggtacttttcgccatagctagactgctgaactagcctcgcttcgtgcattggacagccgcatataccccttgccactttaagctttcgatactgttccttctgatcgctcgtctgtcctcatccaacggggtcgaccgaataaagcctcatgtctgatattcccaatctctcgccagacgtacctcctttggacgaaccgataggcagtgacgagcgtcttttgggctcgccttctgtacctcgtccgatccctcagcactcgaactcgtttaattcttatactcgtccccggctctctcagacatcctcctctaataattcgttctccccggcaccttctgatgcagactccaatagctccccttcgtccaactcgaactcgcctcggtcggttgcatccggactgccggtaaccaggtccatcctcggtcgtcagtctccggcgaagaaaacgaccgggctgccgccgtccggcgacaggtctgaaaagattctcgaccatggaaaggatcagtctgtcagcggtgcccaatctctcgaggcccttgtctccccaacgtctgcttcgacattgaatgcctccctcggactttccctcccttcaaacgtcatcctcccacccggtccatccaagcgcacttttgacacgacaccgtcgtttccctctcctctggcacgggcatccattgttcctagattcgacgattccgatgaagaagacccgaatgcagatatcgaggcaaccagtctggagggagtccctcattccgggttcttattcggtcccgatgggtccaaaaaggctcgtccgaggagaacgtccaccaatcttctccgctcaggtagagcagcctctcccagcacgatgcttcacataatggcaaacgctaggcagacgtcttccggcataccgagctcccctggctcagaagctagcagtcacgccagtcctacgtcgatgggagatccaatctcgcccgggttgacaataagagacagagacccgagtcggcggagcagacaaacgtcagaaggaggttcctttcgacgcgctgggttccctgatggaggctcatctcccagtagatcgtgagtatctcgatcgaaccatcgacctgttgttcccattgtttttatattattttttaaacttctgcttacttcttgctttttcgttgcgtttgcctcagccccactcgttctcgccgaagatcagatatggtcatggccagctctcctgataaaagttccaacctgagacacccaatcactatctctcgacctcttccgatcgcctctctgaccattccaacgccttccagcacagtttccccactaaatgcccttcctgtgccctggggtaattccccaacatcatccgccccgtcctcaccaacagaaagcaactttacgggcgctatccgcttgcagcgagtccctacttctgttaggctcgcttcagacctgatgggatcctctcctcatagtctgagcccacttagctcagcggcgttccttcgaaggggaagcttagggaatccggacgcattgaacatgggagcccttgcctcttcctttggatcgacaacagagagagaccctcttgctggtacgagtaatattgtgaacccacacacgatcaagactcccaacccatcgccagaagaaggccatctgtccttgccgagtgtgacagtcactccactttctaccccgctggtcgaacagaacgatcctatgggcacctcgccgtgggctcccggagcatctacctctctcggcgcattttcaggtagaagcccgttggtgtacgcaagaccctcaagatctcccattcctgctccttcggcattcgagccactggttgcagcaagcccggcatccctgaaaccttctggactacatcacaaatatcgaacgtcggtccacgagacatcttccctcggtcctctattaggaaatgcaactcccacggacatactgtatggtgaaaacttgggagactctaagaaggaagactatgatccaacagaggtggcgaggactataatgaactcgagatcggccaaggtatcaaagtggaagcggaaaagtcaggtacgtatgacacgttggcaattcagacactctgatatactctcgatactcggtcattcatatactgagacgttctttctctcatttcatcgtgttgtccatcatatagacctcggcttcgtctgacatgcccgactcctcgtcgattcttccgagaacacctgcgcagtggatgcctcccaaagagccaagtatatcaatcaaagattcagagtcaaaaagccctcatcttttgggtgaaccactctctcgatcttcaactgttcctcggaggttgaacgaacgagacgttaccgacacgccaacggacgatgtggaatctggacaattcgtcttggatcgtccagaaacaatttccggtccgagctcacagcactatatcgagtgggttgattggttggacgagtataagcagttcaaagaggccaagatccgtgcagagcttcagaatttcaccatgcctacgacgagccatcctgaacctcgaaagggagaaggcattgaatcagaatcctcgatgtattctgatcgtcccagtcgtcaagcttctgcagaatcaagctctgatataggtgatgtccgcctagagacactttcacctcaaatctcatcaagagaaagagtagttttgacagcttcgtctctgatggaaggaaacgagggaaagagagcacctcatcgacgtacgctctccgggatctcggccggagggcagaacctccaggacaaccatatccaccgggttccttctcaacgactggccaatgtctttgataggccacgaaatttctccagctcgactactgattctagagagagtacagatagttggaaaccgaaacgcaacgttggaaataaactcgaggggtggtggaagactgtcaagagcacgctcgctttatccgatcatcctcactcaaagcatacaaaaataacctcgaaaccatctgaggcttcaaatcaaccttccacaagatctcttcaatcaaattacccatccgccatccgtatcgaaccaggcgccccatcttcatctccaattactgtccctgccccaccttctgctgttatcggattcttcccatcaacagggcaatctcctcgtcaaccactgaaacaccgaacatctgcttatgactctctacggagcttaccatcccgggaagcattggcgcccgccgtctctctcgtttcttctcttcgaccaaataaagcggctgaatcttcagaacaagatgcccttgtgcctcctctccttcgggccttgtcttccaaaagcgacaagacaatggatcgtcaaccttctgccgagctcagcctcgaagctcgccgaagacaacctccactgtctctaaaattcgataagcctcaacttcgacccacccccacccattcaagctcgggacatggctctgtctccagcactgaccgccctctccatcggacgcttcagtcccgtacttcttcatttggaacggattttgatagctcttcttcttacaacaaaaacgctatatgggctcaaacgcccagtccgttgtacgctcttcttccggacgacactcgaaacgctactgatgcaacaacgcccggaatgtcgtcacaatcgttcaacacggcagctatacagcgagaaatcaggcatcggttgaccactcagaaggaagtttgtaacaaggagctgaataagataatacatttgattactctctttgtagaggagaagctcgatgaggtcaacgaggcagatcttcaggcggatatcgatatggataatctgggcatgtattctgcaatggacagtcagagcgactttggtggagatgaatcggatcgggcagagtatgtaccggcgagaagaagtaggtttcttaaaatttcttggtcatgctgttcaaactctcgagttgctcactgatcgatgtgttcggttttctctgatatcaggagtatctcgaccatcttctcgcagaccttctatttcgcttgccagtagccctgcgaaacgtcgagactcgttacgtccaactgatgtggggggtcttccagcaccacgtcgtcgatctcgaactcaagagcagcgcttcaatcagactttgtcaagctcgttcaaacctacatcttcaaactcctcatctcgatccacttctcgttcacgatctccatacctgccacaaagttctctcaatccggatgacaacaccggtctttcttctcccttcttggctacgttgcaggaaatcatcggtattgccactgaagtcttggatatgtccatttcggcaatgactgctcgcccggggatttgtccagaatacgtgcagaaagttcaacaagttgggacaacttgggacaagcatccggattggcctggccgagggtggtgagtatatctatgactgttgtctgactctgtcagacattttcagtaggctctgctgtcatcaagatgggagggaatgctaatcattctgttattggtttatcaatcataggtacgtgcagcttctgctagctgtagcaggcttaagccgagtgatcgagtggtgggaggccgaaaaaggattttggaattttgccgatcacgataaagaagatgagcctctatcgtttgtgataaagccgacaggcagaatcggttcccccgtcatctctccttatgctcgacacgaagctttgccatcctctatgggtctcggttttggagggaaattcgagccacgctcatcgcagttttcttctatcgggctcaggatggacgattcggaccttcagtttgaaggagataaaccgagtaccgtgcccaagcttgatattggtccacctagggaggacttaaagctacaagtcgagcaggcaaaaacagtcaatctcgtgctcgagctgagtctggatggagatattgtcgagtggatcaatccagcgtggcaggaagttgttgggtacgtgtcttcatttcttggtcgtttgttctactctgattcttagggttctgtcttttggcctgggtctgttcttcgtttgcgctttgttaggtcggatcctggagatgtcataggacggcctattcatgaatacctcgctcctgcggacgtctctgtctttttggatgccagtcgagaactcttgaaagatgactcgcacactgttgaggctcgatttcgattacaagtgggttcaaaattgtttcttcgcttccacagtcttgtctgttgaccctcgccatatctctatatctgtaggttctaccagaagctagcgacgaagagtcagatgttcgcgagccaggtccagtctttatcgagatggatggaagcggaatgcttatgcgcgaccggttcaatggcgaaccctcccacagtatgtgggtgatcaagccagtcgctcttccagcgggtgccgaagttgaacgggccaacaaccctctgcttcctctcaccctcaatttcggtgttggctctcaacgtcgagctcctattcattctgtctctccgtttcctcatggaaaacccatctcgacagttgattttttatgtcggatttgcgagcgacaagtgccagcttggttcttcgagaagcataacgaaacctgtcatgaagttcatcgcttagaggccgatatcggcgagcggaatgaacgaattggagaatatcttcagcaagccgccgatctcgccaacgtgttggatcgaagtcagccgtcttccccactggcttatcgaggagtctctgtgtcgtatttccctgcaccctcatcaagcccgagcaagacctcttcttctcgaccccttggatccaattctatagatcaccaacgatcgatagttcatcaagttgttgatatccttcaagtctgtctgaacgtctccaccccctccatcaaagaggacgctaccgatgtcccgatcgaggagcagtgtcttctttctcctcgctcagaagacaatatgacgttgatgaatacctggatccagccgacctgtaacgaccccgccctcaggatgttggttgaagacacgatctctattgtcagaagcaaattgaatgctgtcaatcgattgcgaaacactattgtgtactcggaaagagtgcgttgcgaatgggaggacaaggtagagaaggcgctgtgcgctttgtctgatgggagcgacactgatctctcttcggatacgccatcggatgaagacgtgccggtcgaacgttcggaaactggtttccaaggcttctcagactctcctttggatatatcgatggcttctataggacccttggaccaatccctctctcccccgactgcatcttcgctgccttcatcttctccgggtagctcacagcatcgaagttcaattcatactgccagtagagccccaacccttccctcaatcttatcgacaaacgagatacccatggagagggccacgctgagtgttccatcacagcatatatcgattcctcaaaccgagtcactctactcgtcttctcccaggtctccactcgctcagagtatcgaacgttcgcctactagatctcggcggctttcgataacccgaaaaggacgattctcagtgggctcggatgctccactatctcccagacttccttcaactacccccacatctagatccacttcggtctccattaaagattttgagatcatcaagccgatcagtaaaggagcctttggagcggtctatctggccaagaagaccaccacgggagactactttgcgatcaagatgctcaaaaaggctgatatgatctcgaaaaatcaaatcaccaacgtgaaggctgaaagaaagattcttatgaaccaagctgagtccccttatgtcgtgaggctgttctacacctttcaaaacaagcactctctttatctcgtcatggaataccttcccggtggtgatcttggggggcttgtcaagaaactgggaacacttggtgaagactggacgaagcactttgttgcagagatcattcttgggttggaatcgctacatgacaagggcatagttcatcggtaagactgaatctcctttctctacttgagtatctgggacaatctctgatagagtaaaaatgttgtcttttctcttcgatgttttaaccccagtgatgtcaaaccagacaatcttcttatcgatgctaagggccacttgaagctcaccgatttcggtctttcaaggattggtctgctgggtcggcaagccggaggatctcgcttcccattctcatccaaatcatccttccggggcccactagatcatcgttcggcttggtccagagaccattccatagattcctcagattctaacaacttctccccaaagggcccaataccagctggagcttcaagtctaagccaatcatatttcggttcgcttctcgacaacgatggtcgaacctccgctgatgagtccagtagagtagagagtgggtcaggaggaggtcttatcactcctggaacacccgctgtgttcggggtgaaaccatcgggctcggataatgctcccatatcggatacccataagtttgtcggaaccgtggattatgtagcgcctgagagtattctgggactcgggggtgacaatgcagctgttgattgggtaagtcgaactatcaaattcttgatacaaaatcccttatttgctaatatgtgaaacttctgttctgtttccgatccctatacagtgggcactgggagtcatgatgtacgagctcctctatggttgccctccattcaatgatgagaccccagagaaggtattcgacaacatcatatctcgccgaatcgtgtggccagaccctgaagatgacgaggcctcccctgaggcacgcgatcttatggaacgactaatgtgcactgatccagatcaacgtctaggcgcgcacggcgcggacgaaatcaagcgacatcccttctttgacgatatcaactgggatacaatttctagcgaggaaggctgcttcattcctcaagtgagcgagaatatctccacggactatttcgacgctcgaggtttggtagagcttcctgaagagttagactctagcaaccttgccgtggatccttcagctctcaacacagaatctgctcgcgatgccgatgatttcggaaccttcagcttccgaaatctgtgggccagtaaggctgccaatgaccaggttgttcaagatatgagtaagcctgtttcgtctaattggttttcgttcgtacatggatctaatctcattcttgcaacatttgacttgtgttccttcagaggctcaagcggaggcagatgccctattgcctccctctatcgaatcttcccaaggctccttcagaggggatcggaggaggagtatcgttacttcacgcaagcgagctaaaggtccactgtactggaatgaaaaccaaaaggtttgttgttttcttctcctctcttccgcgatgcaaaccctgtgcaagactctcaaaccgaaaattatcctttgtaaaacacagccgaatgtgccttccacttctgcaaacaactcttcggccaatccaccatctccatccgcctcgtcttcctctggaggatccttcggatttgttccatacccagttgggcataatcgtcgaacaagcgatctagacagagttcaagctgacagtgatctcagccgaaaaagcagcttgccaagtcgcttacgggctagctcaacatcacaggcgtcgaacgacaccaacccttcctctttatctcctccatcttcgttatcttcgccgcaaacatcaaatatgattgccacagccagtcaaggtcgggtgcaggtgcttttggcagaggataacccgttagtatatttcttgatttctttgttatatgctgggactctaatctggtgtttttgtgtatgtactgcagtgtctctctcaaagttgcttgcaatattcttacaaaacttggtatcgaatgcgccacggtctccagcggatcagacgcgctagctgtggctacgacatgtggtcagtgatttctctccccgaaaaagatttgaatgaccatctgttttaacatcctttgaatctcttgtttcactctagcctttgatgttctgttcttggacgttcgtttgcctcatcttgatggcgatggtgttgctcggtatttgaaatcagtcgccggtcccaattctgttagtcccaaatttcaacctacatggatttagatcaagcctgagctaatctttgtgtacacgtatttgatctaggaaacacctagtaagcttatgatcacttgggtaaatagaatcctaagtacaatacactgacctccaattttatggacacatcaaacagtcgtcgctgtcaccgctgtcgcggaagatgactcaacaaccctctccgaacatggcactctcttctcggcagtcgttagcaaacctatcaccagggagaacgttctggcggtaggtcctacatcttaatacagtccttgttattgttgtctcggtggaactgacgtgagaatatatgtcaactctcacaggtccttctcaagcttggcttcaaagtcgaaaactctgccaactgattgaaatagctactcgatgtgatttctctcgtatccttcttcatcttcttattgcattttctcttctcgaatcgccaatcatgtgtaaaattatgcgccaatcatcacgtctcgtctgcttttctttttctttttctttccatattttggcctttctcaaatcatagcatctttcttcgttctgcgcatttctcttggatgggacatagcaacgacctcatttcatcgtttacatatttgccccttccttcgatttctattcgttccgacgtctccttgatcccaagtctatcaagtttagttttctttggctcttgtttctttttgtcaagctcccggatatctctgatcgacatcaggtttcttctttttttcctcttaatcttgatggcttcactctatctatcagtccgagatcatgttttgggtcggttactctgtcttctgattgcgaactgcgaactgcacgtacatcttttgaagcgcggccatgatgtaaacaatcattttatggccctacagtatctac

SEQ ID NO: 451 - DNA, 14289 bp, Xanthophyllomyces dendrorhous
ctacaatacaaatgtgaacaggcatcctgaaggggggcaagttgagtgtacaatgaattctcaagaagatgggaaagatgggtgagtatacgaagaagatagagagaaaggaggggcagatgaacgccagaagagacatcaaaccaaaccaagaacgactgtagctcgtaaactgtgcattcttctactcgtatctaccacacctgtccaacctagaactccatcgtccggcgaatcctccttattgtctggaaggacagatagatactcttctgatcttagggacgagctcttccatcctggtgatcggaaaaaaattaacaatagtgaaggtagaggaataagtcaagttgtttgtagatgatcaggaagaatagacacgtaccccatgattgagagctgaacagaattcagagtcggttatgttagttatagatcataagaggagaataggttgaacttgtaaaaaatcacgtacactgtaaagtaatctggcgccgatgagaactgtgcgtatacatggtaatcaggatgagtctcatcgaaatcgtattttataatgaaagtagactttgctcactctggtaagagctgttcctaaggccgaaggacacgaaatactaaaatacgtcttgactaccttgcgagctatagacatcccaatacgtgttcaagcacatgactgttagctattcgaatgtacatagaacactctagagcgtacttacgatctttgaaggtttctgtaggagttttcgacaaaggggcgcctaaagtcacctgattatccatgttgttaggtagcgcccttgaagaatttgatccgtttgagctcaatgatgacggtcctgctcctaagctggatggtcttctttgcatagatggtgtcgaaggtagggattggcctggaccagtgatggatctgacgagagggatgtgaacatcatgattgagcataagatgggaagcagaggcggaggcatgaatatttgtatatgtgttattgctaggagccgaagatgagaagttgatagttcgagacgaggggggagagaccacagtagaaagctgataagatggctgcgagggtgtaagcagagaaggaggggaaggagaaacaggaggcgcggatggggtgggcactacgtaaataatgagatcaactcgtcagcacactgatggagaagaattgacaagcaggataaggataagtcttacgaggttccagcatcgattgtctatgcaagtagatccctaattgaatctgtcggtccttttttcgaatcgtctgcacgtatacattaaagtctatgtccgtccgaaatataggaacacaactattcgataaacaaggttcatctaacgtgagtagttatggagaaaagaacctacaactcccagcataaaacaccgtccgactgtattctctctgtttctccttcagcccatccacaccccagaactcaaccgagaacctaaatggttcgtattttgtccatctcgcctcatcctctgcattatcctgatctccagtcccagtcgcatccgagtactttctcctagcatctacgatatccctgcccgtcctttgactagacccaattccaaaaaagtcttcctctctcatcggtgcgcctccggctataccatccttcttggctctagccgcgaaagaagcatccgtcatagacagtggaggccccatatctggtacggctcctgataacgtgaatgataaagctggaccttcgagcggtatgaacccaccatactcgcccaatctctgggtatcatcctgtggaaccggataatatgtgatgacttcttgagataataatggggttttaccaggaaacgatgttggactcgtgcttagtccgtaagagattgaagatccagacataggtgtcgacggctgacgttgagaacccatacttaatatggctgggaccctcaacccgaaacttgtatcaagaggatctacctgggccagcggggaatttcccttaaaaacaggtgaggaagtagtacctgatctcgagcgggtttctgatcggcttcgtctcctctgacgtctagtttccttctcaactagtcgagtaagctgacgtgcaatgttcttagtgatgagactgattcctaattcagcatctgcctgctcggttgagctagggttggatgtggatgcagttgcagttgcagtggtagaagcgacgggagacagagcgcctgcttgagccgaaggggaagaaaggattttagatttgagttcttgatgctcccaaagggacgtttggagaacagagagaggcgcataagggagttgagtgaagggacagatatcggaagagatatacgagagctcctcgaacgtctataagaagtaattgttcagaatgaagatgaagtcagttctcgcgctcataatcgatcgtctatatgactgggtgaattcgtgaaaagatggtgaacgcaaaaggacataccatatgcgtataatatataccctcgaaggtcttttcaaattcgacttcctcatcatcttcctcccaaccaacctcactcccctcgctatctctgtcttgctcttgatcatcactccttcttctatcgccactcttggccagcgctctttgggtctttctaagtgtgtacacctttttagccacatgataccgatctatctccgatggaacgaagaatgcgtccgatgcaatgactgctcgaacccaggaaggaggaagaccagaaatagaccacactggaggaaacggctggttcggcttgttaccagtagtgttcggtcctgtcgttgttgatattctcgggaagtccgtgtaatagactggaaatcttgtatgagaagacgtgtttggtgtgtgtttttttcctgtagagctccaggaagcatcccccaacgacattccctccaactgacgattgatttcaggactatgatcctcctctattcttgagtaccagatcttctcttcgacatccagaatgtcaactccccacctggttaaccaacaggcgcagccttctccgattttgctgctcgtcaacccataaaagtaggatggctcttcctcgctttcctcttcgtaatcatgcccatcgtacccatctccaatactatgagtatttcttctgaaaggatgtttaccttcaccaggatcctccctgagccctgatatttgagatgatgcaatggaggagctcatggaaagtgctggggaagcactacgcgaacgggtgcctgaagggctcggtcgcgaaccggaaggcttggagtcccttctttctacttctacacctgccgctcgttcctgcgctacagcaggattttcagcttgtttgcctctttcgtcgtcttcgaaggatggaatcggtcttcctaaatcttctagcccagtagctccaacaccaatgatcccatcttcctccgagtcttcccaatcttctccttgataaccccctatgccttttccgattgaaaacccaaggaagacattgacgctccaggggcttattgatcccagaatcaagcccaacaccccactcgaaattccagggacccctagaaaaattgaggtcgcaagcaaagagagaaggaatcgaggggtggcgatttgagagcctgaaggtggaggagaggaaggtgggacatagaatgggaacgagcgcgtcaacggatgagaaggtgtcggatgggtcgtaggcggcagatggagagagggtccggctgagtataaccgtgcgatgatgatcctgagcgtgagaacaagcagaaaggtgggacaaccacgacatcaatactataactttttctccaaggacgcccccaggtgacactggctctcttactcaaatgcggcccggctgatatttggatcatccaatctcaggttgatcttcatcctaccattcttcaaagttgaactatgcacatccggtgccgtttctaacagtataggtcttactagagcttctcttagtcgagaagacgcgtcttgctcttcgtcttgaccttcatagaaatcgcctgtgaataaagaatggaaaaacccctggaaaaataggtacaaccaccacatcgtgagcggcgttcataagaacaagagatatgtcagcttcgaaattcactctattgttgtgaatgtcgttcttgaatcattactcacagcctgagcgagtacgaccctgtgaagtctatacacctttccccatctgtcgaccctaacgttcacgtctgagcagagccccttgagaaacgcgtgtctcagatgattatgcaatatctgaggaccaagaaccgggtctaggatgatccctggatgagctggaacctgaggtggatctattgtagtagtatctgcagagttgaatgtggtcatctatgaacggggatgtcttctatgacgagaacgacgaggaggatgggtcgaacaagcgagaagtatgtgcttgaatgttccgctttcctttcgcccgggccccaggccgggaacccggctaaggccgaactctacgcttggctacaccttaccaatcaaaatagacaaatggtcttgagttccttcgtttgtcactctcgttctttgttccaacccattgacataacatgcaccacaaacatatcttgatatctcttgaagcctctcagagatatcaagacatagtgaaaagttactcatggatcataagaaaaagaacatacaacacttgatacataaccgaaacattagctaaggattcacctataagagagaaaaaggatactattaaatgagaacacactctccccttctccttgtcactctatcgatctgttgttcagactgcagacttttccgagatcgccggcccaagtggtttgatccctgttttctgcccatctatctggctcaaaggtggaaagagtcctctctctaggtccccaagctcatctcgtccggaactcgatgactcgatctttcgtcctcgatcttgtccttgtgctttttcggaaaagtcctcgccttgaacctcgtccgtatttccaaaagtagactcttcctcggtttgatcttgtttccaactgggttcgtcgctggacgtcgttgatgagacttgctcaattcctagggctgttcggagtctgttctctacggtgtctaccttctttgtgcgttgtcctcctttccatatgatgacggcagcgcctaacaagaacagaggtggcagatcgaaagaagagaccgttcggttagtaaaagagaaagaacagctgtctgttgtaagctcgaatgccgaaagggacaaaccaattccacagaggaaagaacaaggaattagacaaccctgatacatagtaaacgttccatcacatccggagaaaacgatattgttcatcagctgcacgaatgagagtactagagagggactttagatgatcttcccaaggaaaatcctgaggaacacgaaccgtggtccaggatggtcttgaatgagttgtgcccatatggagcaggatacgatccccactataagcgcttaggatccacatgcagcaacataacatgatttgaaacaacgagttccacacctttttatttgaagttttgatgcaagaaagaggataggagagaaatgggaaatgcgtcaagtgatgagttgggaagaagaagacggcaatcggatctggacaaaccatcagtattgtgttccatagagccaggcgcaccgagaatgcccagtgagtatctgtctcgtacggtcggtaccatgtctttgtaggatgagagaaagagaaggggaaaagagaatcaaaaccaggctctccttacaagaatttgacatcggtcttgtttcatttacctgggatcgagaaaatttcttctgatgatgatccagtgtcgctctctgcttctttgtaagaacctatagagagtttgataaagacccatgaagaacatctggctcgtcagttcaaatccgattctggaaacaaaaaacaaggttaaaatggatccaagcgcattggagtcaagtgcgtttggacaaagaacgagaagacgaaccgacataaagtacgaaggatcctgcgcgggatcagggaacagatccggatgatctaccaacacccacccaaataggagcccgtctcgcatttgtcagcaatccatcatatctgtctcctttgtgtcttatccggtaagaggtactcaccaggatggtagagacctcgtttctttagtttcttcattgccagattttttaatcgccagatcgtgagaatgcctaaaatctcaagagaatgcgggtcagctgtttgtgacgacccgtggagatacgattatgaaggaaggccacggacggtacgcatccaaacatctttggggaaacagccctacaccggtcacagtgaatgctccgttgatgatctgagatgatatctctatcagcgtatacatgtgaaagtcagagacggttagcacgtgaagttaatacctagacttgattaccaagggagaggacgagaggtacgtagagaaccatctcaagactgaccgacccaataatcattcttgtacttgttatgaaagttaatgaacctggccaaaaagaacactacatgcgatcgaccgagagcgacgaattaagttgggaaagaatgagaatcagactatcctccaaatgttctctataaagtaatgaaaagcttaccgagagcggctccccagaatctgaaagcatatgaaacccaagggtgagaacggaacggatttcgatgaagaaggatgaacatacacaacgaccagaccgtagagcgcgacaaagattcctaacggtgtcatcaagaaatgaccaagacctttgagaccacgctttatcttctgcttctttgttagacaatccgcaacgtgcctatccagcggatcatcatggtcgatcaccgcctcatactcgatcttattcccagctctactgacggtccgttttgctactgacatagcagagggtctggcgacgttggaaggccgagttctgttagccgggcgagattcggggtcggtacggggtagatctggaagggcaatgacaggttttgagacgaggtagcctgggagaacgataccggaggtgatattctgaaagtgagacataagagataccgttggatctgtttggatggagtatgaaaaggcctaaacatgttcagaagaagcactagagcaaaccgagaacaataaagagaactgaagatcgaggcggaacgtaccgacgatatctagatgatctactaccgcatcatgatgttcctcgccgagttctgcatgatgttcactctgctcgctcgtgctcatcctctgttcctcggacagaatctctcctgccactgatctgcgccgagagccactcctggatcgagcatctacctggttctctctcttcgtcgccgccgttgcctcttgcgctaccgccgattctctctgctgttcttcttcctcttcttcctcgttcaacatggtttgaactctgcctaccctattaagattcgactcatccaccggtactttgatcacaacttgggtgttccctccggaatgaatagacgaaacggacgatctccgagcgttcgtcgtaccgactgtaccttgccgtctgataggacttccagcacctacgcttccacgcctgcccaccgtgttggtaggacttcctccaggagcgaacgactgatagtcaaatattgactgaatcgtctttgatcgagctctcgtacggtacgccttctgttgaccttccgggccggacggttcaggtgaggacgtcaaccgggcgtcatccgtaggtctcgacgtgactgtgttgaaatggtccgaccgtatggagtcatcgatagggttggtcgtgcctaatgccgatgctggacttctgagtggacgggcggagagtgaaccggaccgaacacgttggtcaaacactacatgggcaggatgttctgtggacgattcgaccggcgggttgagaatagtcgcccttcgggccgtcggttgacgtccgtatgggatttgatcaccgacgtttgcaggaaacggattggactgacggcgtctatcggttcgaaccaatgattgaacggagaaatcgttaggaacagggaaaagagagtcatagatagcgaagagagagagaactggatagtgacccaactggacgcgacggcaagtgagtaggaggcttcggagtaaagaaacttacactctaactgcctgagacatgtccgcggcctacactatttgtacaagagaccgaagaagcaagagacgaaggagaagagaacaacggaagagatggaaggttgtccggatgtgtagaatggaatggatgttgcgcactaagataaccaaacgcgaacttcttggggttcttcaacggatgcatccgaaacatgcttacgcctagatgtccgatcacgtggtttagccggagagaggaactatcttgggacacgcatcaaacgcttgatgactgcttagtttcagcgcggacataattctatcagtgcgcgcttctgtctggatgaggacagatgatctgcagtccataaggcaagtcgagagagtatctcactcgatacttcagacccaatacccggaaaaaacaataggaaagaaggccaatcagacaatcacccactcagattttctggccatgtttccattgtttcttccgatatatcgctgctctgtatgtgtatgtctatgcgcgtgtgtatatgtgtgtttctaactccaatccacagaatccataatgatcgaaccatggctgaatcattctctcctggtcatttaggtctctctatttcacttgtatcatctttatgtccgtatagatgacaaaaacaaagcgactatttcccgcaaccctaaccaccgagggaatgcacagcagttgtaacacgtgcacgggtgtaagtcgtaaccctaacatattaccactggaatgtggattgcctttgaaacgaaagtcctgaacgctacgaagtttgggtccattcgatttactcctttgtttagtgcgagccgggatgcctaaggatacgacatcttccaagaagaaaaactctgcaggagccgggagtcgtccgagtacgggatcgggaaacggagagagcataccgaaggatagctcgagctcgttcgacatcgactctatctttgcgtccaaaccgaagccaagtccggcggtgactgcacctgccactggctccgggtcgaaagaccaatccgcttcccagccgacggacgacaaggacaagaagaagaaaaagaaaaagacaaagacgataacggcagtagggacggacgaatcaaagacaattctcgatccaagtctcggtgtcggatccaagccggacggacagggtgggaaggagaaggagaaagggaaaggtaagggtgacggaggggataaggagttggaggctttcatggattccagaggtcaacgttcgtccctcttcctccttcttatgtgctagacctctgtgtgtgagctacgctcttggctatgcgaattacgagactgaactctcgaacctcctccacacaggatcgaccggtagaaagacagacgaaggatggtctatctataaggaagatcatctagggatcaaccccgaggctggtggttcgtcgtttttgtttttgtttcttcttattctttcagtgacaaaccgtgggtttactcacatcctgaaaatccttcctgtgcttcttattcggattgtcttctctcctcctctccggcgcggtttccctctttgaacattcttgctcctgtcgacatcatgggcttgttgaatgatgtgcggagagcagataccgaactctgtccgttcgactgtgaatgctgtatgtccctcctcttcttcgccatgcgttgtgcccatgagatcaaagacgcacactaggacttactccctttcccttcttgggtttcctctttcgttttcatcccttttcggatcaatctatcgataggttactgagcagacaccggtacctcggccttaaccttcaaagcaagcctaatctaaaataaaaaaggagcttcagagctcaaaacttgacctagggtcttaacttaaaaacacacgatctggtaaagaatgaaatgcacaataatatacccaccaaaaggagcgatgacacctactctatacaagtcggcgtttgacagatcagagtagaaaagcaaggacaaagaaagagggagatagagagaaggggatataaatcattataggacctcggtataaagagctgatgaggctgaaggagcgatataaagaggatgcgagggacaattggattgaagaagcgtatggggcatacacacaatgcggaagaagaaccaaggggcaaaggggtggatagcatggttgcttgggcgtaggaagcgaaggaagatgaagggacataactatgggatgataggcgtaacgggtgttttgcttaagaaagagaggaaaaaaagacaatgagaagaatagaaagataaataggaagggcccgaaatacaatacgaaaaagagagaaagcacgactggttgattacatacacgaggacaacgttctcgagcttctaagggtagaggacacgaagagaaggcaaaaaggcaaaaaggaaagaagaagaagaagaagaaaaaagacagaagctatggattgatagatgtacgcaaagagacacttaatttcctcctttctcaaacagacgtttctcgaacacgttccgtctcgaaggaccaagctctgcttgtgctcgcacttctatttctgtaggaaacgccaagctcaagatcctgctctttttgcgggttgaccgaccggggatcgacggtgacgaatgagtcgacccagtcaaagtcgtcgagggcgtggaggtctatatcccaagtgtctgccagaccagacccaatcttgacgacgagccaaaatctatcgtagcgcgatgtgtgtgtgggcgggagggagaaagaggagataggaagacagatcaggcgcgcggagagagcaattcagattgatcaagcaagaaggaaggaaagtgatcagatgattgcaaagatactagaggcacagaaagcacaaggtgatagacctacccgtagtaagcaaagccaagacaggcgagaccgaccatgacccagaagcaatgcttgtaggcatcactccagaagccaaagatccagagaccgagatagtagtacaccgtacctgccgcccagagtgcgatggagccgaggatgaagaacgtgagacagggaatgaggatgtgaaatgcggtgtggacgagtttgagtgagagcggtaaccggggggcaaagtgggaagacggagagcggtacgaccaatgtcggcggtgatgatgatggtggtgatggtgatgataggaccgaacagacgacaagtgcgacggagagagggcagaaagagagacgttctcttttggaagaatgtcgccgtgaaggagaggattcgagagcgcgtacgtcaattgactgctaagcagtggttccagggaaagagacggcggatgagacggcggctggggtggtggtgatgagggcgaggagagcccagaagatgagagtgagggaacctccgagacgacgcagactggcgggcaaggcgagagagtatcttgatcttggtcttcgagagacgttctcgagtcgagcgaggaacgtgccgagtaagtggtaaccgaatctgttccacttcgactatcatcatcatcatcatcatcgtccagagtagaggaaggagcgtttgttgggaaggagtcgaggccaaacaggcgttgactttgccagagtgaggttgaaccattcgggccatattgtgccggatgaagtctgtcccccagcggattcattcgatgggtggaagaactgggcctgtccgcaggcgattctacggcgaacgcacctaacgggcaatctggcgaccaaggaggcgttattggctcttgggtctgactggaagtctttgtggagctgtgttgatggtgttggctggatggttgccagccaaggaagttggacgagctgccaagagagtgggtagagttcgtcgactgggagctacctctacggatgtctggcggtgccaacggtgaggtcgacctcggaggcgtcggcaggtcgtaggaggaaccggccgaggaactgccggaggaagaggtgtgtgatgaggacgagctgtccgaggagaaagatgaatgccgcatgtagaatgttatgttgcgccgaaagcgattggctggctggctggcaaaagaagggcgatgatgggaaaagcacgagggagagagaaaaaaaaatcacaaaagaaggttgaccctgaaggcgaataatacctgtcagtgagagtggattcttaacaggaaagaaaagacaaccgtgatggaagcctgaagagaatgaaggatggagagatgtatgctgatgggatgtaacagaacgaggacaaagagtctgagcctctgtttgtggaaccgagatagagggatgatgatctgtgtgaccgacccaagagaccgatgaaaaacccttggcaggcgagagtggagtacaagtaggagaatggatagacattatagagttcaaaagtaatataacttaagtactgaccgaaaggaagcgatgtaaggatgatccttgggacactgaccgaggacacacggacacggcctcactctcactaacgctgatactgccactaccactcacagacccaactgtaggtagaatgagctcgaaggaacgagggatgaggaaggattcaggccaatggtaagtcctactagcagaagcgtctaataatagtagtgttggcaacaataataaagccatgtgaagaaaaggaaaagattatgggcaaggcgaataagcagtgtacgataggagccttcgtagtgggcctcgagtcgcgtcgtagtcggttaatatcgatgcgctcatcagtttactgcggaaagtatggatgtacactgcggaaagtgcatccggattcttggttcctgccgcgggcacagagtatcaacatcaggaaaaggggcaggtgcatcgatgacgaaggatgttctgaacagagtcgggtttcatcaaatctcgccctgccctgctcattctcgcagctccggaaacgccgagctgccggtgtcatgccgatccgcagcggacctgatgctgtaaccggtctgtaaccagatcggtctagatagttaaaccgtccgccactatgtttgctgcgcactgacgatcctgataaacaagatccgccaaacaagcttgaggtttattcttgtctctcctttcagcgccgccgtgggccgccagccatgtgtttctctttggttcctctgggttctctctccgcgtgttccctccggattctgttctctagtatcattcacccactcgtccagctcactcgctcacttgctcacatactttatctcttctcttgtcttttttcggacatgtttatctccttcttgtactctgatctactctgatctgatctgatttgaactttgatcgatcatgttgactgacctattcgcctaatagcctctggacatcttattactttgtgtgcaggtgtgagactgatgtctgggcgttgctctcctcgtgctaactttactcgctctactcaccctcgtcgtttgcccacgttgtcttaccgggttcatctttgttcttcttttgccttcctcggtcgtcagacagacagacagacagacagacagacagacacagacacagacacagacacagacacacacaagacaaaatgttttatatcttttttccttctttgccttcattccattccttacatcgtctccatccccttccctctattctctcattcctttcctccatctcttaatccttcccttcccttctcccttctgctcttcagcatccactctcttaattctgctcttcagcgttcttcctttcccttcgcccttgtacccccggtccgttcgttcttgaccatttaccttctaaatcagccctcttctctcacccatccacccacccacctccagtcctaccttcacctttaatccccttcctcctccctcatggccccaccggcaagttccaaatggggaagctacatcgtcggccaaaactcggctcacgtcgctgtagcacccacagcacccactaacccacccgccagcaaactctcgttcggcaggcataagaagggt

SEQ ID NO: 452 - DNA, 696 bp, Xanthophyllomyces dendrorhous
ggcataagaagggtgactcaaaatcaaagcctgacgtatctcatccaaaggtagagccagagaaggccttggaagcttcagatacctcaatcactccggtcattcctgccgcccaggtcatccagatcaccccggtcgccccggtcaccccaacccagttgacactcgaggagagaaaacaggccaggacggaacaacaccgtcaaaagattaaggagcgaatggaagcagaggccgcagaagaagccagaagggccgaagatcagagacgaaagatcgaagagatcaacgagagagagtaccttgaggacctcgcctggcaggaagaacaggaagaactcaagctaagaatggaagaacgcatcagagcgggttaccactcgaacggtctctcctcagaagctagttctgatcacgccctcttcatctctcccgggtcacatcaaccccaggagcaatctcagcctcagcctgtaccgcccacggtgttggtcaccagtccgccccacgagagctcgtcccccgtcaccaatgtctcttcgaccccgaagacagtcgctcgggctgatcggtccgagattgcgtcccccacgaactcggtcttggcctcgaccatctcttattcagactcaccttccactgtcgtcgatgccgccatcgttgctacgcctgcctctgcccctacccctaccccta

SEQ ID NO: 453 - DNA, 16596 bp, Xanthophyllomyces dendrorhous
  misc_feature (2491)..(2500): n is a, c, g, or t
ctcttacacacctcaaggtctgttcagcaaactgaagtcaaagccaaagccgctcgtccagaattcaaccgagacatcgaccgtcgcggctcacctcagaccgacgacatcccggttaccctacgccatcgttcctattgcgacaccccgagttgcacccgtccctaccggggtcatcggtttcgaggaggaagaacaggacgaggatggattctcaagccaagatcgaagacatcatcaacccgggaactactatcttgggactccttctttgagatcgcctgcgtcatcgccagagccagacctcgtccggcaccagagaaactcggcatcccctctgcctgtcgtgtttgccagtagcgatgagaaggccgatagaacgctcggtcatcagaaatcgatctcctccgtcaagacgatgaacgacagtctccagaaacatggattggagaaatccgccgtacctactttggctttcgcctcttctccctcctcctcggccgatgtcgagaaaggaggaaggatcagacagatcgataccggttatccctccgagccagaagaactgacgatagagagatcgttggctcatctgttgatcgttctgccctacgcaatgttgggattcctcgtcaggtatggtctgacggaattaggaacgtacgctgggtcctccgtcgcttccctcgtctggtcgcagggagtgtcttgtgtgatctttggtctggttatgggtaaacgaagagatctcgtcgcgttgtatgcatgctctctttacattttatgtatcatcttgtctcagcctcctctcctaatcaaacactcatttcattcatacctacaggtacccccctctttggacgggtgtatgcgtcgggttcgcaggttccgtcaacagtttcgccggctggttgcttcaggccttccttagctttgcaaacttcgatggctatgctcgaaactcctggcagtctgtatgtcctctttcctttcctttcctccgcgcctggtccttggggatgtcaatcgactgacaagctcgtccttaatttaacctccaggccatggatggaattggacagatcctgctcaccctactcgtcgcctctgctgcgctttccctcggacttcacctagccaatatcatccctgccatccctgtcggctcactctccaaaccgactcgaaccccatggacggacagattgacggcattgatctctctcggcctgtacgccgttgccgttgtcggttacttcctcttcggatcggtctactggagaagacagttgattctccccttggtgtttgctcctgccggtgccgtactgagatacgtactcggattcctcaacccccgggatcgacggtctcccaaacaggcgactacacgcaagggtctcagtccaatgcgggtggacaggtcgatgaccgttccggtagggacgttcctagcaaacatgttcggaaccgtcggccttgcagtttgttttgccatgagccaattggacaaaatcactccctttgctccttttacttgcgctgttcgtcatgttttcttctctcgctcttgtcctctctgaaaacagactaatccgatagatatcttcactctccccatacacaatacaggccgtccttgccatcggtacaggtctcgctggtagtatgacctccctccccggcttgatctttgagatcaaatacggtttccgatcaacgatcgccaggtggatatatctattcagcagtgtcatcgtcgggatgggaatcgtcgtcggggtcgttggcggtatctggtggaagggcccagggttcgatggggtttgtcgatttgtctagattcggtattttcttctctgcgccctttgcggcgtgtcctcctctctttgtccatctctcggggttctcgtctttctttcgttcattcttcctatacatccacacattagtgtacacttatcacattaatcttgctcatctcgctgccttgaatcttgcgcgtggcctctgatttagtcagttctatcgttcagttcgttgtttgccgattttcacttattcttttcttcccgcgagaccactcgcgtctattagatgaatgatccttcctcaccttgtaagagccgagagacaacagtaggactagcgttgggacgtttgagcttttgacgagcggaggaacgcacatgtccggggacagagccatggccaatcaaatcctcccaaaagaagaagaaaaaaagaaaaaggggattccaaggaaagaaacgttctgtgaaattctcagggacccaacccagctcaacagacgcccgatcgttcgtttctttgcccggttcgcgttctggcgatcacagagaggattttcgtcttggacacccatgagattagcttacaacagatctgattcaacgacaagaccttgggcgcaggggattatgtacacaacacaagctgacacaacaaagaaaacacacacacacacacnnnnnnnnnncatacacaccacaagaggcaggcacaacagagagaaagcccagaagaggaaagagaagaagaataaaacggaaaaagaaggagaagaagaggagagaagagttcgggaccccgtttaatgtttgatggccgtgttatagtttttgtcctgtgtgtccccatgattcagatggaagagtccgcccgacaacccagtcaaagagtgaaaaaaaataaaacacatttgaataatcttgtcccttttctagttgtacttcctggaacagacagttgcctccccatcccatctaattctattacgccttgtagcgttttttgttttgtttctttggttccaattccttctctataattttcgtggatgtggatgtgggggtatatgtatgcagagagaatagaaagagaaagtaaaaaaagatcaagctctgtaaagaggacctacccgacctcgaagtctagtgatctctgtcgctccgttgaccctgggaatctctggcacccaacctttggagacttcctcatccttcatgactctgacgagctcgataaagtcctcgacagcctgggggtcgagttggtagtggcataccaatcgggcaccattgaatgcgatcgggttcggcagagcagcagctcgggcgatgacggcgttcatcgggaggttcaaaggaaggaagttgacaaagacctatgaaaacacgcgtcagaaaaagacatgatctgaagaaacagcagaagaaaaagaaaagagtagcgaagcgaagagacataccatgcaagtctctgcctcgtacaagatctgaacacccaactctttgagtccagcagagagtcgcttggcgagcttgtgactatccctcaatcgctcaaagttgtgggtgagcgcgaaatcggcggcagcggcgatagcaccactctgcctgattcctccaccgaagagctttcggaagtgaatagccttcttgatgagtgcggccggtccgacgaggacgctatgaatcagaagaaagagcaacatgcgattagggtcggtttgagatatatatatgagaacacaatacgtagaggaggcttacgatccgataggcgcgcccaatcccttggacaaacagaccgaaaccgagtcgaacggatcacagagttccttcattctgttaaatcccgaggcatgaagaacaaaaaacatgatcagacgagcacgagaaatttcctcacacgtgtgcgcaaagaatgcaaacttacacctcgggaagagtctccattgtagcacccttttcagcggcgacgttccaaagtctaattgaggatgaacatcaaaaatgatggaaaaaattaagccctcgatcatgatattaagcttgagagtcatgatccgacgaaccgagctccatcacagtgcatgatctgtatgcaataacaagggcttagtataacagacgcgtcgaaagaagtacaatcatgatgggtacgtacaagaccctcttccttagccttcttagaaattttgacgatctcgtccttaaaaaaaagttacaacaacgattgtttgagcatacgtggaccgacggcaccaacgcggatgagatagaggagataaatcggatcttacttgggggaagatggtaccgttcaaagtgttctgccattgccagtcaaagagcaaaagaagagtctcagttgtagaaagttaacagagaaaagtaaaggcgatttggaaccgacctccaagcagataatcttggtcgaggcgcagtgaatgttatctcccaagatcaagtcatcagcgatatcatcatcccacgtaaggtgatggccattccagggcttcaacggaagtgggctagcctgggagtggaaagcgaggccaccggctagataagagatattgagagaagaagagacacggcgttatcaatacctcaagaaatgattgcgcccattatcaatgaccctctccacataccctcgtactggaagacatgtgatcggaagtccaatctgtgaataagaagatcaggaacggggatgaccgatgagcgccgcatatctcttgagtcacatgcagttatcaagacagataaattaacagcgacacgtacagaacagagtggggaggctgggtcaaccaagccctaagaccgagttctagaaataacaagtataaaaatgaaggataagcatggccaattgtattgggaacaagacaaaagctgactcacggttgctcatagtgccgctaacgacgaaaagaccagcttccttgccgcaaagcttagcgactcgagcctctagggcggcagtagtggcacactcgttgtagactatgggacgcgatgaacgttgaatttagggcgcgatgcttgagttacatgtagtaaacagtgaagctcttaccatcgtcacctcgagtcgcctgcataccaactgataaggagaagcatcagagacaagatgtcaccatcgattcggagttgagcgactatagaagactcatccgataacgtgaatggtatcaaaaggactcaccttgaagcatggcatcgctattgatgtacagcggagaccggaaacgaatcaagaaaggaaaggaaaaaattggttataaaaataaatcaatatcaaatacgacaagaaacctgatgacccatccgacggaatgcttgccggaacggaactctgagcgcaccttggaatagtaatcgtgtcggctggaaagtggaacggaaacagatgagagagcggaagaagagaaaagaatcaataccgttttcaaatacaaaggaagaacagaatctcaagaagaagttctaagaaaacagagacaagaaggaagactaactcctaaaatcgcgctgaacggctttgagcttctcgacgtttgcctgacctcccacattggcggtgatagcgtaaggatccataatcatgttgaagatatctgcgctacgggagaagggtcttgatgagaagactgagctggcaagagcactagagcgactcgatcgaagcagagaagagaatttggtggtggtggtaaaagagtgaatcatgactctccgaatccccaagctgatgttctttcttgcaaaaaagagagaaattagttggaggagtcagccgtaggacaaattcgatttgaggctgatgtcaacctgagacaattgtgcctgggctcttaactgcgcctttgtgccttgatctaatgatgattatgtctctttgaggtgcaccgaggaaaacgcatgtatcccatccttaacaagccattcatcgattcttgccagtactaaacagaatatcatgagattcctacacccttgacgattaatcagagcgagagagaggacgtccttggtgcaaagatccgtccagagatcgggattgaacagtcaagtacaataaagatgaacatgcagtcagagtctggtcactacaatcggctatgtacaaacacaggtacagcagaacgcaacatatcgcatcgtaacacagagacacaagtcatgtcggtatcagagtgaacaagtgatctgtaggagatgaatcacagatcacctgttgttttaagaataccctgacagtatccgcaccgggatagaccgcatggccactgtttctgcactcgatccaacatcaccgtgcttcccgataggaaaggatacatgacagaccgaaccagaaagaccagccgaagtaatgggtgcgtggagaaattttctccttttgggatgcgatgccagatggaaacacaagacgtaagttgggaatacataccggtggggtgagctgggatgttgtgaatgctcaatatgtcgaataccatcatggttagttttcggatgatcagaacaacatacacaattagttgaagaacacagagatcaaagcagtaagaatattagtgtatcgactgaatcgatgagaaatacacatgtatgtatcctcggcatggatgtgttgtgtgtatgcaggtatacgcgtagatggttaggcggacacatacacaatgcatctctacatagagacggttgctatgagtcgatttgttggttagtaactttggtggcctgtacccaacagaatcgcggcccaagcgcaaaagttcccaaagtccagtagccgtgctgaaacctctcgtctcaataccacccttcctcaagcatctcaaggttcgtctatttttcttcatgtgctcgttcataccatgtttgaaaccagacagacgtatagcatacacatacatacatacagacatgtcgttttgatggatgactgacttgagggaactttgaatatacgacttttgttttgtgcacgcaaaaaaaatctttgccaattcttcggactctgaacttttggtcgccgccttctcgcctctcgaatcgcaaatttacttttcctccgaactacgttcatccatcgacgttgatcattcacagaaatgggtttcggaaagaacaacggtgagattctacgtttttgttgagctgtgttttgacgccgtggttcgtacatagacgggaaactgattttgtttcttttttttctcttctcttatcgcttagtgctccacgctaaccacttccgaaaggattggcaggttcgcatcagcattttattgtatgccgaaggggaagtcttgaaagtatttgagctggaaaactgatcagacaatgcatcccttgtatttatcttcgtcaaaattatcgacttctgccctcctgaaccccaaaaatttcccttgacaattcctgtccctccctacaaaactatcaattcaacatcttgtgttttcatgaatcttccatccaacgcaccttatccctcctctatttcccaccctctcaaattctaaacaatccagagccgagtgaagacctggtttgaccagcctggacgaaagacccgccgaagacaggctcgatccaccaaggctaccgctttgggagctcgacccgtcaagtccctccgacctgccgtccgatgccccaccgttcgatacaacaccaaggtccgagagggcaagggtttcaccctccaggagttgaagctcgccggtgtcggtaagaaggaggcccgaggactcggtatctccgtcgaccaccgacgacgaggtggagccgtcgttggccaggaggctaacgtcgagcgacttaaggcttaccgagcccggttagtttgcttcccggtctttcaacctcagtcctttgttgtctggagagtgttttttgagtggcttagaaagctggaggtggaagagaagacttttagtgacagctggaaaagaagatactggggctatttactggcataatgaagggagaacggatcaacaggcttgagggaaggggtggccagacaacacaaggacccatccaggacgacatgaaattacaggcaaacttgactaaaccaatctcctttcttatgtttcgttcataacagactcatcgtcttcccccgaaaggctggaaagcccaagtctggagactctgccgaggccgatctttctgccgagactacccgagcccccatccctctccccaccctttacgaggctgagaagccccgagctatcaccgctgaggagaaggagttcaacgctttccgagctctccgagacgcccgagccactggccgaaacgccggtaaggtcaaggcccgagccgagaagaaggctgctgaggaggctgccgccaagaagtaaacggggttctctctctctcgttttagttctaggaggttttctatcatgcacgttccaacatcttgatatgttttccttgaaacaaagacacccctctgttctacttgcaggatcgggccttttgtttcccgacccactgagttctccaaatgaagaccagtcacaagcacatacttcgaaatctaacctcagtcgaaagcaacagaaaagcagttatgacaggtgacatcagatacgcggtttttcttgtcggaagtctgctcatcatacacacttagcagccttaggcttggtgagagtaacctcaactgacgatggctggcatatgtcccttttggacttgactgtcctcagaccacaaaccactacgtggtcaggcatgtgacctacgacgtacagattccttaccacgactcctactcgttttgcgatgcattaaccttcaattatataatcgtagaacggatttagtcctggcgcattctatgatctcttcttttatgtaattcttttgcgcagtatatcttcttggaggaatcgcctgtgtgcagtatctctgtaatctagggatcagatataagatgggcttcgtttgccatctttagcgtagtctctcaagcccgggttctttgttaatccccagttatccttgtccccagtccatgcgcttgtatggtcacattgaagatccataatcctaatcccgattgcaagccaaagtacatcctccctatcaccctccttcgatcggtccaaaggaagaagcgaaagaactatattttcgagtttccgccggcaagatgaccacggttcatccgagacaacagcgcatgtttgatgtcatctgtcatggctgccttttgtccaagattatgatcgtacaccacacactcactgtcgtttcagaaggaaaaaagatgtttgcgcgtacacatagaacgtcaggtacctgtctgcttaatgagatgaccacatagggaaagaagtagagaacaaaagaaggggatgaacgaacgtctcgcaggtggcgaccaatttttccgttttcaaactccatgctgcgatctcgatatggaagctcgacggcatagagaccgatttcggtcgagcgaggacgatgagagagtctgggtgtgtgatcggggcctgaagttgatgtcatccgagtagagaaagaagcgcacagggaagagagaagacgaagttggctcgtgatgaatatcaaaatcatgatcagaggagtatcaagaggaggcaacagaagagaacggaccttgtacacgatattgtgagatttgatgacgaaaccagtattctgaccttccaataaatctgtcaccttcgaggccggtatgtgtgaagaaagactttgtataaagcctagccgagcggtttcaaagtacctcaagtaatggacctgttgacgtccgggcaagcagaccatgatacacgaaacaggcgtatattgtgtaagcaagtggtcccaaagcttggtagggcgacacatacacacgtacattattcagatgtctggaatagatgattttgggaagacaacgatctcacaaaccgtcagcgatgatgacgacgacgacaacaactacaaggtctctcgatcacatacctaaacttgtcgacatgaccccatgcgatcggaagctcaaacgcggctcgctcgacatcccagccttctctgaccgctctctccaggatagtctttctgttctccatccacgtctctgagtacgtcgtatccggccatccagtcagaggccggtcgtacttgatcagtggtggttcggaggaaacgatgttggctgtaggcggtatatgagccaaagaggtagaggcggaagcattcgtcggcagaggaatcgtataatttggggtaatgtctccttcatcagctgggccacaagtccctggaggaaggtacataggagagtgcgggttcttgaattgctctaacagatccttagttttttaatatcatgacgatcaaggagggttccaaagcaataggagattggtagaatgagcgaccgatatagagaccatcaaccagctgaaggaaacccatcgagatactgaccataacggaaggctctgaagacggcatccttcttgctgctactgtttgtttgatggcagaacggctggcgataaacagtctatgtatgcttggtgagatgtgcatccagatcagtagagaggaatggataactggagagaaaggtgcatagccgaggtgtgagtagtgccaggcttacggtctgcaggcatggttacgaaattcatctatctactcctactcgaatctggacccttaggtaactcgctttttggcctcgactagacaactctagcactttctttctttcgctttctcgcactccttccatcaaaccctcttctcctctataccattagcatcatgcaaggccagggtagacttccgtacatggtaagcttgtcgtttgtttggtcgtgtgaggagtgaatgtgtcttgtttggaggtcatttgaaagttgaccggttgattataaattcgatggatctctcttctatctagcaacccactgtggttctcctccgaggtttgttcttctcttcttttcttcttcgtcatctttcatgtctttattaaccgtctcaagaaactgctctgacgcttggtatcgcctcttctcatgatatgaattgtcggcgtctgcttccatcgaaacagagggtaccgattcctcccagggtgttcctcagcttctctccaacatctctgcttgtttatcagtagccagcgtggtctcaaccacgcttggtcctcgaggaatggacaagcttattgtcgacgccagtgtatgtactccttctttttaaggtctcctcccgttagtagctctacgactgatcaaagtagccgttcctgacaacgaaacacgatcctcgattatcttccttttgtctccggggtttttcttattcggctgacagggaaacgcaactatctcaaatgacggagccaccattctcaagcttcttgacatcgttcaccccgccgccaagaccctcgtcgatatcgctcgagctcaggacgccgaggttggagatggaacaacctctgttgttctgcttgctggagagatcttgaaagagatccgaccctttgtcgaggatggtgttggtgtgtggatcatccagaagggtttgagaacaggttgccagttggtaagcatacatcctacttgttctttttcttagatttggtcgagaccttttgcattacgctgtgttaaagaatactgagctaaccatttattgttctgatttcataggcccttgacaagatcaaggagatcgctgtacccatcgacaagtccaaccccgagttcgtatatttctcatccctctttattcactgctgaacccctgaatttcacgagtaccgagctaaaacctcaaatgaaacaactttaaaggcaattccgaaaacatcttcaccttctcgcctctacctccatgtcttccaaactcattcactctcagaaacctttcttttcgaaaatggtggtcgacgctgtgctctgcttggatcaggatgatcttgatgaaaacttgattggtgtgaaaaaagtggccggaggtggaatgcaggtaggtcgttaaccatggtgctgcttgtccctccaggatgaattgactaatatctaggttgtgtcgtgatggatctattgcattattcaggattccttgttggtccagggtgttgctttcaagaagacgttctcctacgccggtttcgagcagcagcctaagagcttcaaggaccccaaggttctttgcttgaacgtcgaattggagttgaaggccgagaaggataacgctgaggtccgagtcaaccaagtttcggtacgtcgactctctcttgaatacttgtgcgatctagtttggtgtaccaataacaaataactgatcactcgaattccatcccgggttatcaacaggaataccaagccatcgtcgatgccgagtggacgatcatctacaacaagctcgaggctatcgtggccactggagcaaaggtcgttctctccaagcttcctattggtgatcttgccactcagtactttgccgaccgagatatcttctgcgctggtcgagtcagcccggatgaccttcgccgagtggtccaggctgtcggtggatccgtccagtcgacatgctctgatattgatgacaagcaccttggttcgtgtggaaagttcgaagagaagcagatcggaggcgagcgattcaacatctttgaggattgcccgcaggcaaagacgtgcacacttgtgttgaggggtggagccgatcaattcattgccgaagtcgagagaagtttgcatgattcgattatgatcgtcaagcgggctatcaaaaactcacatgtcgtggccggtggaggagctaccgaggttagtcttcacattttacctttgttgacgggtcgatctgtttgaactgagagccatcgttcttttccttctcttctcttcctctcccccgcaaatccttgacacagatggagatctctgcctacctccgaaaccactcccgaactattcagggcaagcagcagctcatcatcggtgcgctcgccaaggctctcgaaatcatccctcgacaaatctgtgacaatgccgggtttgacgcaaccgacgtgttgaacaagcttcgaatgagccacgccaagggagacatttgggctggtgtggatatcgacagcgagggtgtgaaggacaacatggagaaggttcgtttgtttccttttttgagaacgaatagagtcaatacaaaaaatcaactagctaaccatagaggtcactggcgtcctgatagtttgtttgggagcccagtttggtcaagacgaatgcgctcagctcggcggtcgaggctgcctgcctgattcttagtattgacgagactgtccgaaaccctcagagcgagcaggtacgtgcatctattctgtcttctgtcgatatcgttgtcaaatcattagacttatatcattacttcttcaattctactttcgacttaatcagccccaggctggacctcctatgcctcggggtgcacagggtgcgatccgaggacgaggacgaggaatgcccagacgttaagacacgtggtgagaacgatgaaaggaaaagaaagaacgaaagtgaaagagaaaagacacgatgtaacggttcgcttcgtcgaacaggggctccctttgtgttataacatagaatatggttatcttcttggccttctttcctgtctttgaaatctctccgttgtacatgaactcgactgtgtaagagacgaacaagcaaggccaacggtgataatgtgtagcacaaacgcgcagcacaaacgagatctaatcagtgtccaaagcacactctttcccatcgtcccactgataatcatcaaccaacagaagatatagaaggatctctcagctacttcctcttctctccagcctgttcctctccggtttgagactgggatcgacctctgcccgtcaaaatctggacttggtggttgggaaggtgatacttagtcttcgaaccctctaccattgcggtcgtcatctctgattagaaaggaaggtaaaaaaaagagtaggacaaatgtctttcttgccctcgttcgcgtcctctctgacctcatcactgaaggtcgcccaggaggatagcccacctcccaagctacttgtcactgtgacgcctcttcggccgtctgtgtttgcgggtgaactctttcaggcgaaaatctcgctctcgtgcgttccgtttacttcagcatctgctgttggtacggctacgccgaccgggtcaacaggtatagctacagcttcatcttcagcagtccatcttccgcaacccaactcgccttatatacctccgtctcctgccattcctccgtataccccaaagaaaccggtccatcgggcggtccaaagtttgagtacaccggcgaatagatccttccgggaacaagtcccccctcgaacgggagattcgccttacgcacacctccaatctgaagtattttccctcgaaaagtacagctcggatgacctcccacctaggcgtggactagttggtcggagaagaaagtcaacagatgcaacttccaaacagttgaaggtcttgccatcatcgtcatcatcatcgttgccgtcagaaattcaaccgaaaggtcattgcaggcgatcgtcgtctgggtcggagcttgccggtttggtcaaggagttagctctcgagaagcagccagatacagacgaaccttccacgaccgcttactcggcagaggatccgatccagataggagagagtccgaaaacagaagataagaaggggaaggggaggacgaacagactacaattcggaagatctcagtcagtttcaacaattcctgcgatggcctcattagtttctactgctgaggagtcgtcaaccattcaacgttagtctctctataccctcctttctttctctatctgcttgctccttaagtttgatatcggataattttaacgaactatctcctttcgttggttgtgcggtctgcgctctcggttttagcatcaccgttacaaacacctccacggaccaacactctccgaccgacgtacacatccccctccactcgaaatatttctgcctttccaccttcccatcctcatgctcgaaagccatcacacattcctgcctcactgtttcaatcacctctatcaacaaccaagcccggaggaggatcaagatcagtttctagcgcgtcgacttcatcaaatctgtctatgccttccattcttgaaaccgaaccatctcatcaatctgagatcgaatctgaagactatacaatcaatccgatggatgaaatgaaaggaaaaggtcttgctctagatctctcgacatcgacaggatcgctagactcgcccatccaagaggaatcatcatccgtctcaaattcaacggctgcaacagatgaggacgatgccttttcttctcctttacgtccgccgacctcgactcgtccatctggagcgggtcatcgatcccgaccgtcatattcatccaatttaggacttggcgttccttctcctcagactcctcgagcaagttctcttaccagacctcccgagagcgcacttccacctctatcaccatcatcgtcgccatcaccatcgttgccaccgtcgccgtcctctacaaacggattaaaaatcacctggtcgtacgtccatctagtcgccaacctaacgccttccccacagtatcttccagcagaatctcttctcccgctgcgacatgccttattagaaacttcctctgttggatctgggatgttacctaccccggattcaccaaagcctggcgaatctagtttcacaggctctctctcgctgatgagtccagggtcgttaaaccccgcttcgtggttctcacttccgccaccggcccttcacgccaagccgcccagtttaacaagctcgttgtttgggatcgcgagaggcgtatggacaggtgtaggcgttcaagcgacagggtctatggaggctgaaaggaggaaacaatgggagaggacggtgagggaggttccggtattggagacgctaaaaagcgtgctgggggtcggattagagttgaaacctacagtggaacagacagaatcaggtctgatctcttcagattgtgagtgatttattcttttcttgcttcgactatcttagcgctctgtaggcaacaaaagacttacaaacacggctgacctgtgggatttatctcgacacgtattcctttgctgttaatgacatgatatagatatgtattctctccctattccagcaacattaccgcccagttttagagggcgagcgctcaagatctcgtactcccttgtcatcgggatcgagatcgaatactcacttcctgcccttcgaccaggttttgacaatccaaacgcgttccgtcggaagaaaacgctgagtcaggttatcaaagtccctcttcgagtctggggaggggttgatagtctggccaggaaagacggatacgacctgatgaaaccggtgatacagaggaaagaagaggcgtctctccaaaagttagagccaacactagtcgggaaaggaaatcggacgagctcaaagaagaggaaagaacgcaaagaggaagcagattttaatcgtgagttcttatcgtttgagacgttcctctctctgcgccgttcctaagattccacatggtgtaacgtatactcatcgtacataaaaaaacatagccgctccttcgaccgagtcttctttccggtcctatgtcgcccatctgctctccactattcctctgcaagagcc

SEQ ID NO: 454 - DNA, 1345 bp, Xanthophyllomyces dendrorhous
ctcccctccctccagatgcaccccctccaaacccacagcttggccctgatgcaatgacccctaaacacaagcacacccgaagtcaggcactcagccctacgactcattcaatcatgctgcctaaacttcagataaacggagaaacctcgacggaggttgattcggtggacaacgaaccgggcgcgaacaggaagaaatctagagccttgttggagactagtagatcggacgaagatgagatacagtgcgaggagatcttggaggggctgttgagaagtagtcggaaaggttagttgaccggattttctctcttccttcggatcctccgtcaccatgagcctgatgtcgtttgtcctctctctgctttgggcgatgccttggcttagcttcatatgatattgaaaaggatgggcagatcgtcgctgtatttactctcgtcaaatccgctttcagattaggcgagactgtccaaggtgttgtggaatttaacgaacccaatgcaacccgaaaagttctcaaggttggtttcccttccctttatgttcaatataaagactcccaaggggagctaggtctgttatactcgatgctaatctcgcccgacattgatgattgtcctctcagttttccgcgcaactgcaagcacatgagatcatcccctcctccctccatccaccccactcgtcttccctccaatcactcatccgaacacacgccgatttccacaactcgctcacgatacatacatctcgacttccgttctcgcttgatatcccctctccgggaacagcaggcggcagctcggtctcaccttctttcgtccttcgcgccgagcctgaatcagccgagactcctcgacggttctcatcttcccgtagtagcagtcataccgggatcaacaatggcgccaccagcggtggtacgaaccgaaccggtcaaaccccacgttcccatcctggaggactcgaatggaagatcaaactgtcattcctagtctcggtaccgatgaaagctcgtcagggacaggatccgtcgactatctctctgccctcacacctgttaccgatggttcctgatccccagtatcaagagtttgatgatcctaggcaccatgcgttcctaccaggtccatccatcgcacctgttgtctctatgcccgcttctccttcttcttcttcggcaacggcatcggtagggaaggctcaagacgaaggagtggtatgggcggagatgaggacagaagtcgtagaatgtgatgtgcccatcgtcgtttatccaccttcgagattaggcatcggtgttaccggggccggtggagggatgggtcgaggagacggaagtgagc

SEQ ID NO: 455 - DNA, 12879 bp, Xanthophyllomyces dendrorhous
tctatcttttttctttttctttttacctttacatggtagatataaacggagatagagagttgtagcatgaaacattgagatagttagagaagcatcgtgttacgacaggcaggatgagaaagaaaggaagaaagatgattggaagcctcttgagcaaagtcaaccaagaaagcggaggctgcatgtgtaccagacagacaacataaaggctaatattacagaagatgataaggagagagacaagaagaagaagaaaaaagaagagggacagagaaagatgagagaatgtagaggaaaggataggtggttcgtgttttctccacaccttcccttctccctttcccgacccccctaaaagaatgtatcgtcttttccgacgttctttcccccgcgattccgtgcatcctgcatgttgtataagattgttcgctttgttggtgttttttttgttcgaatcagagtgagatgtggagatgtgaattgtgtacgtagataaacagaacagacatcgacaaacaaaaaaaaacccacaaggagatgacgaagagtgaaggaagaagacaacattgggttagaaagagaggaaagaaaaaagagaggcatcacaagtaactttggaggatctcgcccgtgtctacacgtctagacgggtctccttacatctagaagaaaataaaataggataaagaagaagagggaaggaaaggaaaggaaaaaagttggtcaaggtagggattccttaggccggtccatcttgagggagaccgttcagtccgccgaggcaagccatccagatcctcgtcttaaatgtgcggaacatctctcgtacctgtagagatatcatatgcaagacaaagagggacgaaggaggaagaagaaacaggaacgatcaacaaggacagtcctatggtctctaagatcatcgttcttacccgcatggtctcgatcgagcgaagaagaagaatgaatgacgtacaagctctctaaagtctatccttctctcggcaacaaagtagaaggtgagcttccgacggtccctagagaaaagaacaagtcagggacaaaacacaatcagaaaaggataggcgaaaggattgggatcatagacgaaaatgataaaaactaaccattggtactcggcatcgacaacttccataggcaacttcttttgctttactttctgctggcagagccctgtggttgaagagaaaatgatcttcttcaataagagctctccaatgagccgcacatggaggaaatgacttacaaagagctttagcctcgtcctgcatcttggtggcaagcagtctgatgagaggagaacgtcaagtaagaaacaccccaaacatctcatctttaaattagaaacgaacggagagacactgactgtgcgtctaacggctgagccttggagtatatcctcttcggcatgatctccttcgcaagccctctaaccgtgacccctccctgtccacttgcgcttgggccacctcctccaccaccaccaccaccgctaccgctgccgccgccctggttacccaaaccggcctgttgagccaagaacgcaagctcggcttgatgctcctggaactgcttgacctcctccagtgagatactatcatttatgatctttcccaggtcttttcctctatcagcttcgacgatgacaaggtcccctttggcaagtggctgggtcggatcgatcgcgtaaaacagatcggttcggccggctttgaactcgacgatataaagcttggtagccgtagggacggcatgaagaggaagccctttacctagatcgagtagagcagaactattcgagaccgcggcggcgggaatggtagtcgaggaaggcggggaggacgaggaggaggactgacggtaatgatgaggtccctgtgggtagagcgcagagggaacactgtgctgagatccctgttgaagttgtagctgctgctgctgttgttgttgttgttgttgtaactgttgctggggtggttgttggtgcgactgctgttgcaatgactgagacgacagttgctgaggctgtgatagctgtggctgctgctggaaaggagaccgttggatagaaggcacgaaccctcgctgagggcccccgaaaggggtctggtaagccgtaggttgaagaccaccaggtgcgttcgaaggagggtacattctgcccaaacttgccgaaggtgcaaagctcgatgtagtctgtccaaagtccgtacgagccgagaggccctgtggctgggactgggacgaaccgaaaggttggaagccaccgacggacgattggacaggtaggtaggtcgactgcctgccgacagccggggaaaacccggactgaccaccttgagacggagacaagggtggagggagttggaccgcatgggttgacgacgatcgaccgtatccgatcggggatgtgggcgagcctcggaaagatggcgaatctaaccgtcttccggtagacaatcctatggaagagggcatcgagtgatctctctccctggcaccttctccgggggcgagactgaatccgcctcgacctctggggtaagagatttcctcatccggctgttcatccctattcaacatggcactcagaccgccccaagtagacgttcctccgccactgccgttgccgttgaagcttgcacttctcgacttcgttcccggtctttccagctgtcggccctcggcaggtaatggacgcaagaacgacgcggccgacaatgagttttggtagacacttcctccaaaggacgacggagacgaaggcgcgagaatcggaagggaggcagggtgctggaacgtgtttgtcgacgaaggcacgtggtagtgcttgttggtcgagtgttggcctgaagcgagagcgagcagatcgtcgtcctcgttcacgtctaacttcttcaaactgctgataaattcatcgtcggtgaaacccccgccgccgttccgggaagaattgtttgcaccggggtaaataaacgagggatagctcgtaggggccctggacgattgaatatcagatcggaagccgccttgtaagatctgatttccagcctgattggcgaacccggtcgattctattaagctcatttcgagtaacccactggaacctcggtcgaagcctcgtcggttgacaacactgacgctatgtcgtctgctggtcgcgccacttcctcctgcgccaccgccaagaggaggtgacgtgccttccaggccaagaaccccgcctccgtgttcatcgagaccgtatccggcaagagcacctcggccgaaaccgaactcatcggtgagttggttgggagacttgagaggctcgaagagagagccgttgttggaacgcatgatatcctgaaagtcgcgggagaacggagactgtcacacaggtcgagactgtgagtacatgcgcgtcaaaggaaaagaaagaagcttgtctgcatacacagagaatgaagaaggtgggggatcgactgaccatgttgcttgcgtctcccaagccggagctgggcatatcccttcgatcgaacccaatggctgatgactttgtcttgtcgatcggctgatcgaatctccttcctcctgggaatctctcatcctcctcgtcgtcttcgaaaacgtcggtcgagtctggctgattcgagctaacccaattgttgcctagggtgagcggaccgacggaaaagtgggtcataccggtcatcgctggtcggtctgtttgcctgtgagtgccgtaaccaggtgcgaacgattgagatcgagaccgagacgtgccgggtggcgcatggggcggcgaatgtgtgcgagaaggggggaaatgattgatctgtagacgaggtgagggtgtgctatcataatcttcatcgcgtgtgctgaacggttcgccgttgttgttgttgttgtcgtcactgctgttgttattgctattattgaagaatgaagtggaacttgcttctaaggttgacacaggattctcaggttggaaggaggcccgttgcgggaaacccggtgagggcgacgtcgaattccgaggtctagagcccgatcgatctctattgtgagcggaggacgaggacgacgtggtggtggacaaagagactgggttgagcgagctgggttgatacgatggtgattgaccccaaggtccaccttcggtcacccttccaccggccgagggtgagcgggacaatctacgttcgtagctggacgcgggagatcctgagggtgccatccaagcagggtagtttgagaggagcgtcggctttgggagagatggttgaactctctgagaggacgcagcaggaaaggacgcgttcgaaggagcgtaagacgaagggatcgacactgggtgggaggaagacgggatggatgaggacgatgatgaaggcggggagagagaaggaggtggatgaggggaggacggtcttgattcctgtgggatccagaagggcgtgttgaaagagggaaataagaaatcagtaatgcttttaattttggttttaatcttattcagaggggtgtgatgtcaggatggaagtatccatgatctgttgacagatgacctccgtcttcggatttatcctgacggatggagaacgagagaccggaagacgcgggaaaattgaaacatggagaggagagagactcacccagagatcgcttggtaggagatcaaaggaatttatcattcacgataattgtttctcttgcagagagaaaagagtaggtgtttgtatagagaagatggccaagagagtagagagaaaatagaatagtctatttagatcgagggatggagagaacgaggaacgggacgaagcgatgaagcgatggatggatgagtggatggatgagtggatgggtgagtggatgggtgagtggatgggtgagtggatgggtgagtgggtggatgggtggatgagtagatggagggacggataagtaggcgaatgagttatcgtatgagctctgtgagtgtgagtgtgtacacgatcaatcgaaagacgatgtttcaggacaatgaaccgatcaaccagatgctaagccacgaggtcgacagaagcaagagtccgaaaaaagaaaaggtcagcagatggagaaggagaagaggaaaataaaacggacagagccaaaacaaccaggagaagcgaccgaaagaaagaatgggagaaggggagaagggaaggaagcaagaacacaagaacacaagacagcaagaaagcaagaaagcgagacagcaagaaagatgggaacaagcaagagaacgacgaaagactctgtgttgcatgatgtgagatgtccactgcatgcatcccctatgtggatggaaacagacgtcgaacgatggacacatacacacagatacacatacatacacacatacacaagatggtgtatcctgtgtttcatctgtctgtgtggtcgtccgtcatgcatctcacccgatcagccggtcatcgtcccgtcccgtttccggctgggacctctcttcttatggtcgttctcttcgacggtcagagctgccatcttccggttctctttctggatagcatgtgacagaccgagaggacagagtagacaggagaatgagggggaaagcggataaacagatttaagcatcagaaacttaccggacaagaacgtaagggatattttatcgtttagtatcctctatgtgtcttcttcttcttcttcctctgacgttgtcaatatcgtcttcgtcttcttcgtcgtcgtcttcgtcgtcgtttttgttgttgtggaagatgggatggacgagcggagatcgattggtcggaatgtcggcacaagcgaaatcccctggccttttttcttcctttcctttccccatctctctttctttcgctcgcttcccttcttcctagttctctccttctttccttatttcttcctctcttcttgctcttcccctctctatctctctccttgacctataccgttttcttgctctgtgtctgttctctgtaccgtctatgaaaaaattccatgtatgctctctgcaaggcctcccacacgccccctctttcgggcgctctcccatctcacacatccctcgattgcctccatcgggttgtctcggctctttttcccggggaagggtaaccctaggttacaacttacaacacatggttacgccatcatcattcggctaacaatcctcctcaccgctggaatgcaccctagaaccggtcgcttacagtgccaatcatcatcatcatcatcgccagcatacagatgcctcctatcaaacggatcaggatcgcacagccaaagtcagatccgatcactacaggcagaggatggcttttgtcaaagattgacgagctagaggcttccctcaaagactatgtgatcgcgagcgggttagtccttcggtaccatgccgatctactacagcaacaacagacaaagtgagtggtctcgttgcggatcagtagactcttggcgtgtttgggacaacctcggatcttgcctgttatcttgtgttgctcatatgttttctactgctttcctttttgtttgagggggaaaagaaacgaactctccgctcagttagctcaaccacccaaagaactcttggacagacttcaacagaataactatgcctggatacgagcagagctcgacgagtatcttgtctgttcttcctttctattctattctcctcttcttctccatctttttctctgctttctttgagcgataaacgcttctttcaccgggtagaccttctgaccgtccttctctcttcccttttcccccttcctcgtggctgcttgtctgtacagcgcctcgcacagacacccgaacaagcgcctgaggattctaccttggcgaacactgacgatcagatcaattcctcctctttggtaccgtcaacagcatctgcaaccacatcagccgcgtccacatcaacagcacaaccagtcccagagcccgtttctcgtcaacctatcgtagtcaaaaaccaactgacgggcgaacatgccatttctgctcagccttcactcggacaggctgatcctttcaaacctgctggtcaaagctctacgccttccctctcatctacgactccttctgtgcctgcacccgtacctgcatccgcacctccacctctcaccgtcgctgccgccgtcgccgccgcgtcatccacgaatgaccacatcaacactatcaacgatagagacaacgacgggaaattaaacccggctctctctttcaatcctcagaacccccactttcccaggtcagcatcaacccttccaggatcctcgatgatgatgacgacgacggaagaacagccgtctcctgtgccattcgtgaccaaacctcgactgaaacctaaacctcggatgaaacctttgctgggtacgatggagaccgagaccgaggatgagatgagaacgtcaggggtggggggtacaaggatgagctcgatcgtcgatccgttgttgggcgtggtggatgatagtttggtacaacccaatatgatcattacacccggtggagggacgaccaggcctgatgggtcgttagcgtctcacccgtccactttcttccctcccccaccaccatcgccgccgttagcggcaccgccagtgccgacaccggcgacatcgctgacgacaacaccatcatcccttctacaaccactaccaactgcatcgtcctcatccgcgcaaacgcagatgcagatgcaactaccgatccagatgcaagggttcccacagacgttgacggcagcagagatcgactcgatgacatccgagcaggctcaggctataatggatcaactcaacgctgctgtttctgcctctgcatccgcatccgcgcctgtacttccatccgcacccgtgtctgtcagtcagtcacaatcccagtcccaatcccagcctcagaaaccgtcgatgtcgataccgatcccaccgatggacggcgtcatcgatctcactgatgaatcagacgaactcaacatggcaagcacggccatgaataccaacaccaacaccaacgtcagcgccaacgccgatgccggcgccgggacgataaacatcgaaacaggagacatgacagatctgtcagagtttcttaatgacgtggacggagagaattggcagcagatcttgaaccagttcggccaatcttgagacctctgcctaggggccgaaagagaaggaagtgcttgctatggatgcagtttcatcgtgttttcttttctttcttctcctcccttcaactctctgtatcaaccttgtgaactatcttgagtatcgtaacaaaagaagagaacccaaaggatacagaatgtatgcgattgatttatttttggttcgttttgcttgttcatactgagagagaaaattgagtggggggatcaagtcatgatacatccatcccaccttcgtccctttcctgtttcattcttccgacctgaacgaccgcatcgctcaccctatccgatccgacgtcttgtctgacgtcaggaccgtgctgcttgttcttcccacccagccttccgttcctcgatcgagtcgacacccctcctatacttcctgccgtcccgggtcgatctagatcgaaagattcgtcttcaccttcttcttcctcgtcttcctcctctcttccttcacctccgtcgccaccttcccgttctgcttccgcttcctcgtcgtcgtcttcttcttcttcttcttcatcctcctcggcctcggcttcctcgacatcgtcattctcagtcccattactcgaaccggcacctccgtcaacctcgacatccgcctcgtcctcctcccgctcacaatggtcaacgtcgaattctaacaagtcgatgtgacgggtgtcgatcggatagatcggatcagagttcgagttcgaataggtgtggccggactgggaaagcggcagggcaacgggaagggatcgaccggtggtgcggagagagtgtatttctttcttaagatgctcgatgaactacaaaggggtttttttttgggtcgaatgtgcgcgaagggggagaaaaaaaagaagaaagataaagtttttgggatttttttttaaagttaaatattagtttggtaagtttaatttctgggggaaaggaaaatcaacaattcggtaaaccgatcaaagagcaaaaagaaaagacgaacatcatctcgtctactgattcgagaattcaacgtcccaatgtgttggttcgaacatctcagtagcgcaactttgctcacacctagacacatgcgcatatgatcatctatccgtcagcttttctctttggctcgatgagtaatcatcagaaaaaggaaaggaaaaagaaaggaaaaaagaaaataggtcctacctcgattaggattcgaatctggcacactcctggccggcaatctcggcatactagcaccagcaatcagttcacctgtatccgggtcgacacaatccacattgataggcggcaggaggagccggagttcgtcgaatcctgctttgagggaatcccttcgacgctgttcggctactttgtgagatgtctttttgatcacgtcggggagctttcctccggccggtgggaccggtggggcggcgggtttggtggcaggcgctttcgctttcgatttacctagaagagtgaaaccaaatcacgacatcaaccataatgttcgccatgtgacacacacacacacacacacacacatatgtatacgcaaaagaaaacaaaccttttttcccactagacgtagccttctcctttcctttcgtaggcaccaacagaggtgacttgatgatggtgacgtccatcgagagtttactcagcgagctcttcctcttcactcctgtcgatcctttcttcccggcttcccctccgtctttagcagtcgcagccgaggcggaagaaggattcgagtggtcatcactcgtggcggaccttcgtttggttctctgattctttccgggtggcgatccagagaaagacgacctcctggaggatgatccggtgcgcgctcctgggccatgtacgttctttcctcttccgctctcgaccgtctcgatcgatccgatggcgatgggcggggagccatccaagctgaaggccataggtgaagtagagctttcctccgaggcgttcatcgctgtgaccaaaggagaagccctgaccggtctgctggcgccagacccgccacccatccgaacggtaggagatccaaaggcggaaggagagtcagaaaaggtggacgaggaggatgagcctctgccactgggaccggatgggttggctgtcgcacgcatcgttggacttccgctggtagtgttcaagttcggtctggtcgacaagttcaaaaacgtggccggtgtctgaggagctaacggtccacctgggggaatagcaagcccaacaccgatcggaccggccacgggtgaggacgaagcggaggaagagtttattcggtgttggatgtgcgcgggaagaggaggtggcggcatggccgatggattgaaatcgatgggcgagggcgacgaatgtatgcttgttaattggttcattccgtctatcatgtttgacgggatggctgatgagagtgaagacggagagaatctcatggattgttgttgttgttgttgctgctgttgctgttgttgccgctggtatagagctgcctctgtatcttccgagagagagatctccatttcttcgatcccttcgagtggtatctggggacttgcgagtagagctggagaaccaatgagagcactcgaatccctgttcgctttcgatcctcctccggactttcttccattgacgggtttcatcaacggactcggtcgagtctttgcgtttctgccttctccgttcgagccggccgagccggcttctcgactacttcgactgcttcttgacgagcgtccttctttggaactgttgccggctatcgttcctgttcctaccgatccatcggtactaccgttcccgggttgagcgagcagacggggcgacatgctcgctccgggctggtatctatcggcagaagagggaggttggcgaggaaatacgttcggtccgagcgccggggatgtcaaaggagagaaaaactcgtgtgatgggaaggaagaggccggagtggttgaatgagagaacgggttgacactctggaaggcagagcctggagtggtcatgcatgaatgggtggacatgactggagatattaatggtgtgaacaagagcttcattgttgttatcattggttcaagaacataagagaaggtcggatgagcaaatgtagggcacggaaggaggcaaaagagagacaagaaaaacgcacatttccgtcctggtcgtagttggcattgtctctgtaagctcccgccgaggttgacatgtttcctgagttcatcaactcgtgatgtagggaagagagggtatcggagttggggactggatctcaagaaagaaaggtgggagtaagaagagaagggaaggagaagagagagagagaacgcgctctatttgagcagaaggtggatagttcgtttttactcaccctgcgtaggaagaccttgacgtaagagatgagcggcgttgacgagactgttgtaatttggcaattgagattgaggttgagattggcgttgttgttgtgcgaccagaaaaggcgagctctgttgttgaggagcgaggaagggtgaaggatgctgctgctgctgcgactgcagttgatgggatcgataggcctgttcgacggcttgacgggatataaggttgagctgaagcaatggcggagatatacggaactatgtcaacttggatgaaagggagagaatgactctgacggagagtatgaggaaacaaaaggcttacttgttcttggatgaaagcagtctggaactgttgtagttgctgcagttgctgaactttttggaaagcagaagcggtatctatccagtctggttggccacccgggttggaagcgctctcacttgaagtggccgaggtggcctgatccagatgagggaccatcaggtcgattgcctgaagaaacgcgttcaagttgattggtcccgagtccgcaccgccgagagggctactcccattgccgttattgcctcctgctccgccggactctccagaagctgactgggaaccattcgggaggacaccatcgagaagtcttctgaattcgtcatcattcataggggacgttgcggccgaggcttgctgagagctacctatcggactcggtcggggtgaattcgagggctgacccagatagagaggactcatgctagcgttagcatttgtgttcagtgagtgatggccataatggttcatgtcggaggatggctgacggagatgctgttgatgagaggaggaagagaacgaggatgggctggcattgtcggcgtagactggcccggacgagctggatgagacggaagaagtcgaggcggaagccgaaggaggaaaattgtctgtgtgcggtgggtcgaatgccatctggttgattgatagtgagaacggggagtgttgttggtgactactataatggtgactgtctttgttctgtcctccctgttgatgatgctggtgttgttgctgctgctgatgttgatgaataccaggagaaggatgcataccggccgaaaaggacgatgcttctaacgaaaactcattcatactatcatcctgaggagacttaacgaaatccgagatgtcgaacgtcggtgtggtggagatgaccgtagtcgagtccgacggaggatgcatccgagtcgaacgaatcttccttggtgatcctgatggttatctgatcgatcgaccgagtgaactcagatatcagcgagtgatctggatgtgag

SEQ ID NO: 456 - DNA, 1830 bp, Xanthophyllomyces dendrorhous
gatctggatgtgagcaagcgacaaaaggctaaaaaaaattataataaaaaagaatgatgagtgagaatgagaatgaatgaatgaatgaacccaaaaaaaaagaagagagaagaaaaaaaggctatcgaacgttggtgctcaaggccgacggattagaacgtgaatctaataaacaccgaggcgatagaaaaagctgtgaggcgagcgtgaactatctccgggtaagatctttacatgtactagtccttttttccgtggacacccggtctgaccgactgcttgagatccagttgatggtctgaaggaggatgtgagtgagagaatattttttacgtggatgtatgtgagtgtctgtgagtgttggagacagacatagacatcgacagagacccaaagaagattgaaaaaaaaataaaaaaataaaaaaatatatataaaaaatcgttctgggtcgaaacccaagtgatgtccgaaaaggcgcttcggtttggacaaccggacgaagggaaaagagtcggcaagggaaaatccgcaaggcagccgagggaaattcggctggcgctaccgaacggctgaattcaatttgtgggcgcagcggttgatcgcatcatgcaaagccacacgtaacttgatgtttgaaggactcaagttccggtaatcgattctcagctgtgccttgtcctgatcgttgtgcccgagacgttcagggctcacccatttaggtttaatcgtctcccagttgatcgaatggaggatcggatgaatggtttgggagtgtggtggccacattcatggagactcacgtgtatatgcagtgtcacgtgactacacacagcatatcacttttatctattccttctttcctacgcgtctccttccgtactttctcactttctttccttctttccttctttctcactttcttcccttctttctctctttcttgctggccttcgccgcgttcacacacatatctataaacaaactccccgcgtcaccatgtctgatcctgcccggcagctggcccaactgagagcaagcttccaggcagaaggcaagcttgaaccggagtcatactcgttcgattcagaagcttctttcttgcacaccctcaagtcgtcatccagaccgtcgcgcgcaagacaactcgtcacggtttccggatgggaacctgattcatcagcggtgccctcggcccggtcgttcgaagatctagtccgaggtcagtctgtgtttctttgtcctcctctttctcggtcagaccaaatgaacggccctcattcctacgcgcttctcagtgagcgacctgcgctcgctcagactgaacgagaagcacaccggcaaatacatcctcctccgcgttcttccctcgtcgactatcggacagctttcagatccactccatctgacgatcacactacctgtatgctccccctccggatgcgctaccctgcttcgaattcgatatttcccactccgaccgtcgagcctgggcgtgccgactgcgtccgatgttcgtgcagtctttcccgacggccagatcttggccgttaaggaacctcgagtaggaagagacctattggacgccggtcgggtcgctctctgggtcgactccaagagtgacttggcgttcattgaaaaagatgatcctttagggacgggagtggattgggtagagaatggacgaccgtgggagaaaccaaaggaggcggagagaccgctcgatgaatggaaaaacctcggaaacaaggtatttctttttcactctcgttccactcatggccctcgcgttgactattacattctattgtcttttttttttttttcttt

SEQ ID NO: 457 - DNA, 38072 bp, Xanthophyllomyces dendrorhous
ttttttttttttctttttttctttttttgctcttcccactccctcttatgttcgataggagtttgcatcaaaaaattacctggcggccctccgagcttatacaaccggcctcaaccaacacccctgctctccctctagacaccttgtcctcctcaaccgagcgcaccttaacaatactctcgaacgacacactcctgcgttagccgacctggccgtcgtccttgaaaccctatcctctcctgcttgttcttccgcctcagacacaaagaccctcatggaaaaggcgctaagcaggcaggcagccgcattctgttcgctcagacgttggtctcatgctctggaaacattttcaactctagcaaacctgtctcctgaactgcctgaaggcccggcaggcatcgcccagtccgaggctcggctgaacgagtcttcagagggagcgtttgacattcgatcgctctaccagacctctctgaacggaccgaaagacggcatccagcgaatcaaacatgtcgcagactacatctctccctcggccatcgtcggaccgatcaaaggcaaaggacgagggttgatagcgacgaaagaaattcaacccggagaaatcatcctggccgtccgttcgctcgcgctcgtcagctcacacgagatccctagtaaacccgagttggtcaggtttgatctcgaacaggatgtcatcgaccgatcatccagtgaggtctacaccaggaatgtgctctggaggctggcggaccaacccgaactggcaacaaaggtctcacaggcttatctcggaccaaactcggatttcgagatgccgcccgatttcgagttgcattcccctctcccgcctccattccctgctctcaaacagaaagacatcccgaatagagccggtctcttgtcatttcctaccgagaacgagaacggcgaggagaatggagaggcgcgagcggtcagaccgaaagacatctctcgagcggtgttctacaatgcttctactcctttcagactcttgccagtccctgtacagggggatagcatagcctacgcggccgaggaagctcccggagcgttgttctccgagtctgctttaatcaaccactcttgtgcttggaacgcctaccacgtatgttttatctgctctcattctcatttgcccatctctcctcctatgcttacttgacatctgttcctttggctggtgcatccagtgcttcttcggagactttcaaattacacgggcgactcaactgatccctgctcacaccgagatcctcgcctcatacgttcctgatctccccctgcagttccgatcatcccgactggaaaagtactttgggaaatgcacatgcaccctgtgtgagaccgacagactcgatccaggtttagacgagcgtcctggttgggtcgtcaaggctatgagagaatcagcggatgacgaagaccttttccctccttcttcctcgacgacgggatccaaaggactgagcatgacccagttgacggcgctcgtcaagaaacgtgaggaaatcactcggtcgatcgacaagacctatcttcaaacccggcggatccccagggttgatagatatttcggtcaccaagccttgagaacccctcttcgagcgatcatcaaccgacgactcgaaggggctaccggagccaccggcacaggtacgggcgcaacaggtgggaagataaaaataaaagaactcgcagcttgcatgaggaacgaagtctccgctctggattccctaggtgtccggattaaacccgactcgttcgctttcttgggtcttccctcacactcgtccaacggtactgatccgaacacggccgaggacgtgagcacccatgacgaggccgagatcaaaggaatgaaagatctaccgatatcgactcctccgatgttcagacactcagaagccacccgaacgctcctcgccatggcttctctcgtccgtcttcgatctcaagctctcgagggtgagaccgagtcgatagggttaggaacccaggtcaaagcttggttggatgccgctgtttgggtcgaggacgtgaccgtcggtggtggtctgggtttgttcaaagagaggtggcaggccgtcttggagaatgccgggttaatagatttgatcgagtgatcgttagatgtgtttttcttgctttctcactttttcttttttctttgtcacatgcacgcgtgtgtatatcttatcgttcactcttggaatcgtacaatgatacaatgactgatggggactacaatgagggaattaaaaagaaaaagaaaagaagatgaagtggggatttttataacacatccttcaagtttgttttgcccgaccctctctctagcggcttcggctgagagtccgccggcttccatcccatctgttgcaagcaggtcaggttcataagtaagacgagtacaagaagtgtgaaaacttcggtctctgtccagatggcatcagatacaagaaggacataccagaaagatcacctcgaacgtcgctggaatgtttgtcgtttgaccgttttctgaggggaccccatgtaaagctaagtttggaacccacacatcatcaccattattgtcagcatcgttgaatatcaaccaatccaagaagcttggaagagaaccaaaggacagaacagatagtcaatgtccgaaccttcatatatggcagaggcagagatcaacgtatcccgcttgaggaacgttctccgtccgaggatcgcgttaccttcgcccatatctctcagatcctcgacaagctcatacatcgatggataaccgaatccgatatcctcgacgtcaacggtaagcagagtgaagcccgctcgttggagaaggttcgaagcatcttttggatctgtcgtggtccaatgacttgacattgagcatgcactttcacagagagtcaaataggacaaaaaaaaggtcactaaccggccataggggagatgtgcggagagattcctccttcccgttcttggtccgccagttgaagagacgtcctaaaacaggcagaccaagcagatggagacagacgattagcttgagcagacagattaagaaatgcgttggggcggaatgttaatttcttgcgaacctgagctcgaacaaagattccccaccgatcatggcgcctaggaagaacccatcaggtttaagggccttttgaatttgtgtaagaacacctaagggttgttgagatttaataatattgttccaatcagcaccatgatacctgtttagaaagaagagcagcataacaagaaacataccagggagatcattgacccagtgtaagcccatgcatgtcacgatagcatcttgcgagttttcagggatatgcgtcaacagatcttcttcatctagctgcgtccgagtgattgactcaactgatgaggtccagtgtgagcgtgatcagaaccgtggggccagtatacatggaacagttcgaccaaacggttatagaaagaacaacaatagaactgaccatcgaattcagaatccggatctctatgaagggaggcttcttttaaaccggaaacgagcacaagcagtcaaggtaaacaaacgcgctacatcagaagtccgagtggctgatttaaacgaactgctcatatcaatcaactcgatcgaatcgactttatcaggatcaagaagctgagagaatattcctgagccggagcttaattctagcactcttttcggtgaattcttgacgtcctataggatggatatgtttcgatgacgggcaacagatcgagacgtcataacatgttaacatcatcaacatcagcagtcggtgagatcagcgtgtgcgcgaagaatcaaacagcatcgaaagtaagaaacaaggaagcaaacatacctcgaaccgctcaagtactctctcagagatttctcttctaaggtaatccaccagcttgcttctcgccccatcctctctcgagaccgccctgtccttctgaagagcctttgcccgacggtcaaacacctggtaaggcgagactggcgagttcggagacaaagcagcgtaagttctgaaagagaatggagagcccattgaacgggcgagggatctgtttcgaagcatcccaaacagtaggcgatagagtgacgacttggaggacagatcgccatcgggaccagcacggagagatcagagagatgacggaggcgaacgaaaacggatgtgattacctaagcaagaatggaccggtaccatttatctggttacaacgggagagaggcgaaaaccccttctcggttcagattgagatcccttgcttgtcagagtcgatctcttgatgagctcaagtggtgcgcgagaacagagacagtacctgtgtgaaggagatgaccgtggaaagagcataaatcaaatttatttgagcattcaaagtgaatgactatttcttcttcatcgatctggagtttactatgattgactaagaaagatgagtgttggccgagaggtaagctttgaaacgtatcagaacctcttggactcaacgatacagaacgtccggatacgaggtgaaggagcgcatcaacaaacagcattgtgttgtgtgtgtttggttgagcggtctgtcagctcctatgtttaagtagctctgaaggggcttcaaatctatcgtctttctgcctttatttattcggtctgtgtggccttgaaagatcatatgagctttatctacatcatacgatgacaacgagttcccatcaaccaaagaggttctcggtacgcatgaccaccatcgcgggcgcaaggatgaggatgaccatgaaagctgggtgccagtcgatggctcccgggtaaaagaaggattaattacgtaaggcgatcgcccgaaagggccgacaagcaatatttctgaaaactccgactttccaactcgacaacgaccctcctgtgctccgcttgagcttcctctatccttttctcttcttctctttcctttgactcttccccctctcctggacagatgttgctgttgaacattgtcgaggacagaccgacgcctcctcagatctagtaagtcagcttttattcgctgtttaaaggagccgccttgccgtcgctccgcttgtccttcttcgtattttttctctgtgcttaatttctgttcattttgtccgcaacagtaattacaaggtctacctgaccgctctatgcatcagttggggagcatgtttgtttggatatgactcttcttacatcggcactactatcgtccttccttccttccaaacggcgtttggactaagcaagctatccacacatgagctcgctgtgagtcattccttcctcccttcttctcgcgcctttcttctcgtccatctcaaatataaatgtaccgaccaaccaaacctcttcacctttgcagaacgtttcagccaacatcgtttccactttccaactaggagctttcggaggagctggtacgtgttgccaagcgcatcaatttttaaactagtttccgtttgtccattaggcgacaagaggtctaactctggtctatcctcgtagctctcggatttcctttaatggaaaagtatggccgaaagattgcgcttatcatagccactgctgtgttcatcattggagccatcgtacagacggtcgccactcaccagctttcatacgtctactcgggtagattccttgtcggtcttggagttggatcgatgtgagtctccttgtcctcttctgttcgtgtgtgcgcagttgttgacccgccgctgtatgtacttgtcctctggtcagtacgagtgctgctcccgtgtttttagcagagatcagtcctcctgctatccgaggtcgattggtcggattgtgtgagtgatcatgttttgtttggtagattgcactcgaactaaattcgtactcaccgcctgatattttctcatggtatcatacgaatgtgcgcagacgaaatctcataccagtaagcgcatgtcacgattgtcttgtattcctactctcttcttctgtattcttaaacgagacttctctcggaacacacatcacgatcacagagtgggagccgtcgtcggattcttcatcaactatggaatcaagcagcaccaaaacactaaggccgccgagtcatggagaattcccactgctcttcaactcgttccggccggaatgctgatgctcggattggtcagtcccctttcctcatccgttatttaaaaaaatcgtcatgaggtctaaatagacagtgtttgtgctctatcaggtctttgttcgagagactcctcgattcctcttcaagcaagcccgagatgccgaagcaacgagaaacttgtgtattcttcgagatctctctccagatcacccatacatcctggatgagatagcctcgatccggactcagatttcggacgtcactgtgctacacgcaaaggaagagactgaaggcagagtagcttggttcaagtcctactggagaggtattgcaaagtactgtctggctaaaggaattcgaaataggatggcgatcgggttcatgatgatgttgttccagaacatggtgggaaccaatgcgatcaactactacaggttcgtcaccttgtctatcagtctgcgccctctattgctataaacttatctaaatgtgaatgcttgaaacttccgtcttagtccgaccatattcaagtctatcggtgtctcgtaagtttcccttccgctcaagagcacttgatagctcgtgagtcatatttcatcgttccacatccgatagcacgctgaggtcaccttgttcttcttcttttctcactctatagaaacacctcgttgtacacgggaatcttcggagctctcaaggctgccgcgtctgttgttttcttgggattcctggtcgatcgacttggtcgaaggctgcctttgctcgttggaggaattacttgctgtatctgcatgttctatatcgtatgttcaattcctttctcgtgttcatcgattatcggtcgtcggtcattgtgattgatctaaaaacaccttttctccatctacacagggtgcatacatcaaggttgcacatccggcctcatatgctagtgcttcgctgatgagttcttcgactcaggctggggccaaagctgccacagctgctatctttatctttggaatgagttttgctgcttcctggaacggactcgcttggattattgtgagtctctctcttctttcaccctggccaccctcactctcttttatcgagactgattgtcaaccttctgttgatctcgccactcagtgttccgagatatacccactcaagatcagaggcttctgtgcagcctacacagcgatggcccaatggctctggcaatttgtcatcgctagaagtacaccttatgcagccgcttccctcggatacggcttgttcttcttgttcggatctttctgtgcatgtgcagttgtgtttgcctactttttcatccctggtaagtcattgtcggtttgatggaaagaaaaaaaaacgcaagggagggttgatgggctatagaaacgcacatgtcgtgatggaactgaagatcatttaacctactgtttcttattcttctgaaactcaacagaaatcaaagggctcacgttggagcagatggatcaagtgttcggttacgtagactttgacgtgagtcgccctatctatgtatgtgcctgtcgtttgctcaagttgttaatctgatcataatgtctttccgttttgccaaacaggccaatcctcttctacaggatagacaactatcgaacgacgagatcgaaaagcagactgtttgaaacatctgtcatccatttctttggcttttgcgcccaattcttttcctctatttcttttggtctttttgcaagaacaacacaaaacaaaacgattatatgctctctccatcgatcatgtaagtccttccttcttctccggattgatcacatcgctccttccagctcatattcgccatccgttatgaccatttcttgatcagtgccccaaaaattgaaaaatagttccctttcgaggaaacgatgtacaactatactccaaagagtaaaaaagaacaatttcgatcttggattgaaacatatatcttgattcttcttccctcttctttcatttctctctgatcgtgtctttcttcaggttgcaacttcaattctaattttaaaaaaagtcagatattcagatatttgttgtaatatcttccttgtagattcctcattgctttctagttctattttgtccaacctcaatcgatgttggattcttcttcaacggcatctacgaactctctcatcttgtgaacgagagaagacagaagaaaacatcccaacaagtgatagagtcaaaacctctcttctttctgcttctcgttcccagcaacacatgaacaaactagtgaaagaatacagaaagcgcaacgaactagtttctgccgttttatggctaatctttgaccgagaggcgtctggttccacgagccaacagaccagttgttatttgacttgttatagaaaatagaaaagaagcacctagacacgcaccttcagagaagactcgtcgatcttgaacaacctatcatggaattgctgtatagcagatcctccaggaattgtatgctcgatctcagaacggacatgtagtgggcggttgacggccgctgaatatgccgcgcatctcaggatacctgctcaacccaaacagaaccgagaaaaacaaacgagcgaggagaagcgtcgaaagagggatcaggcgcaaaacataaagcgatcgcggggaaacagtacgaaccaaaccctccgatagcatccaatcgatctgcatcctgcacacatttcaactcccaacatctctctctccatccatcttcccattctcccagttttctcagtttctgttctttagaccaagaggtgttgtcaacgatccgacaaataacagatccctgactagaggaggatatgaaggggtcaggcaatatggatctagtgatcgggtgattgaagaagtcatccaagatagacagagtagtcgtcggagacgcctggattgtgtatttcgctagaaaagcaaggaacggaacgaacaaaatacaatcaaggtatcatggtcatgaacggtaacaaatacagtgaacaagagagaggtgagcggtcctaccatcagtgagatcatgaaacaacgctgctagctctagattcaaccggagagaccgtgcctgtaagtttctttgtcattctactgagggtaaaagacagaacacaaagctcaccaacgacgagaaggtcaaccggctcttccaaagatcgtgctaatgacaatgcagtattcctgactcggtttacttgtgagtatcataaacgaattcttttttatgaatccagcgtatcctcgatatcgaaaagcaagagatgttgagacaaaccgtgataccagtcatgagacggatcgtagtcagccatgtgtcttttgaccaactcctctgccaagtcgacacatctttggttggcttgcatctctgaatggagaagggtactttaagctactggtgagtgagagttacgagttgatttgactccgtcagcacgacatgatacaacacaaagttcagtatccaataagtttggccttatttcatgagaacaataccaaggaggtagagcggaaagaagctcaagagatcagccaggttgaagttgtcaagatacagaaacttactagatgttatgtggatgttgtcgactttctcaatcaacgcaacgtctccttactcaataatttcaacagtttcagccatcagccggtgggctccctccaaaacgctcttttcttcagccacggctatctccgatctgtctattgcccttgagccattggatgttctcagacccgctcggtagaccatacgatagaaacgtcgggcatgccgagttgattaaactttatgatgtcaaaaacgaaattggtgtctgtagatagggacatgtggttgtcattcaatgaatggatgggcaagatcatagttgagtttcatccttccaaaaagactacatctgactaacatacactaaagggtcaagatcaattgaagattcacacaagctatataaagacattcttatagtgtatacatatatgacatcgcatattctaaggtctctagaggtcaaacaaacccggatctttgaattcgtgctggcagagtaagaaagaacatagcagaggagcaaatgccttccgtcaggccacgcacaacagaagtgatagtagatgtagaagagaaggacaggtctcaccagagcacgagtatcccaatattgtcctccaaactcccagctctccccatccggaccggcctcaaaccagagaggcttccacttctcgcctcgttcatccctagctctattccgagctcgttgtctggtctctagtatgagctttgtctcttcggcagcatcaacgttaccttcttcgagataccgttgggatggattgaaccgagagtctgttcttggaagcagggactacgagataggatagaatgagtttaccgaactaaagctaagtagaaagaaacacgataaggtacatggagacgactcacctcaaaagacggatcgagttggttaagagacatcgtaaagtatccccactacaaccgagaacatgcgtagacaatttaacaagagacttcccagacaagcacagtctcatggcgagagaagaccgaaacggaagagacgtacgccatagtatttctctgcgtcagacggccattgcctggcctgccaaagcatatgagctggatcttttgcacttccatatctcacgtcaagtctcgagtcccactttccttctatccaagctgctttcgatccagaggccaagacatacccactgatcgaacggtttgatcgagttcagtacgtgaacgagattttaccttttgagtgatgattgacttacgaaacgacatttcgtccacttcccccccaacctccttctttgaaattcagatggcaaacatccccagtcgtcagattataaatttccatcggacctatggtctcgacgtattttgtacccgctactaggtttcgaatgtaggacggtggtttggtcctagcaacgtcgagggtccgagatcatcagtagtcaagagatattagtagacaaatcggacaccatacgaggccagaggagagaggtttttttcgctcaccagctgaaagtctcaccactcttttctagataaactgtagtcggtcctttgggagaaatttccaaggacatacctaccaatcattgatttgacccggtgttagcgcttgaagcagatgagacaatgacagacacaacgggaaacgaagattgatcttctctcttaccagacagtttattctttgccgaactcgtctgtttcatatgccatccttccccggtagcatgactgacgatgatgggaggatgatgcgaaaccttctcagccacgaacttgagtcctgtgatttagatacagaaactggtcagaccacctggtctttcacaagggaagcgtatttcaaacataaaaaaataacgcgtaccctgttgaacatattcaaatgtttctccctgtgtgtaagaagagaaaaggaagtattacgttgacctttagcaaaagtccagtctttatgatatgatctcaaccttcaaagaatggaaacgaagaacaaacaagcattggattgctaatcaaagagggaaagaagtcaaacagaaagatcttagacaattttcggactgaagggttcggagatgacgacacaagatccctgaacaggaaaacacatacaacggttttcgagaatttcgaagctttgtcgacgcataaccagagattgcaaaagcggcaacatgggccagccgttcgactggatcaattgagttgacggccatagataagagtgggaaatattcgacgtcttctgccgctctgatagatataagagatctcagcacatgcatccgctgatggagaaaactctactctttgtgcatctcgtggacttgaagagtaaacttaccgttgaagcagagaaagtggctcgttgaacgtcaccggcattgaaatctgggacatatccttcccgacgcttttcctcagcaccgagatcaatgatccttcatccctcggtgtctgagctggcagactcgtccgcagctgacatattgggatgggcgtttctaagctcttcactggcactggtaccgtcgtcgtcgcttctactgtctctgattgcaccttggccggccgggttgtctcaaccgatgctctcagatccgctcctgctgctgatgatgatgatgatgttgacaacaaggacgaagaagattttgaggattgtatggccgttgacatcgatttggaatcatcgaaccctgacggacccatcaaggtagacgtcgagtttgatgatgggaagcttgtccctgagtctgaagaaggagaggtaacatcctccacgtcctcgaactcttccacatcatcactacttccttcggacgagttgtcgctatcctcttcttcccgcttcgttggttcattgtcttcgtcctcttcttcaaagacttgttcggcatcataccagacagataacacattggacaccatgctcgacgttgaactcgatcggacatgcgctctttctctctgtcgagcgaatcgagcagcagcatcttcagccgctgcgcgttccaattcttgttgttggttcgcggataacgtcgaggaaggagtgagcttggcggagagcgagctgtgaagttgtctgaggttgaacaaactcagactgagttgtgagatcgcaggggaagactcagacagaagtgaattcgagccgatggacgatggtcgatatgcgactgctcttggtgtcgttggagttgacgaagagtgagaggagaactgatgagaaggtgacggagaattctgaaggttgctataaggagaactaggaagcaggagcggacttcctttggaagagttcgggaacgtagaaggttgcgatggtgatggagaggaagagagaacataaggaggaacggtccgcgatgcagaagaagctgtcgttgtttttgttccgtattgttttgaaatatatcaatgaatcaagaagaatcagtaaggtcttggatcaagtagagcttcattcaaggaatcaaatgactgtttctataaactgacatcttctaaagatccctttgattcctttgtgatggtgatgcgattttgttgatccgaccgtcccgtgagtagtgaccagaaccgagggcatgggtgacccactggggaagagatgctcgttctggatcgctctggtctctgctccaccaccgtagtggcccgaggcaagggtagtcgatgaagatataagaccgctcacgccgggtgcttgaggcatgatagttgtgattgaggggtctgaacgatggcgcaacggtacaggcgaggctatcggtcacacgagcgtactcagacaagtggattagctggacttcgcttagactaaagatatgggagcaaagcgagaaatgcttacctgtggaaactgacgcagacttacttctgtctctctttgagcttcctttgtctttctccttatctttgtgcccaccgtgacttttctccttctccttcgtcttgaccttcgcgtccttctttttcttgtgtgcgttctgtttcttggcatgagatttcatactgaaattctctgccagtgcccggagttcaggtttgatcacaaccatcgcaatttccatctcggtgatcgcctgtttatcctcattggattccaggaaacgaaagggatcggatgatccggacgcataaagaaagtacatacgcgacaggtgtcgaggaaaccaaaagcaagataccagatgagatcagtacaaggttcattgttctacttgatctgccgtatccgtcttctctaatctacccttttcttggtaagacgaaggacagaaagaacatctggaaacaccttgcttcatcccaattcactatccagtgcctcatatcttagaacacaccgaccgatcggatgacagatcaaaggcgaaacataccttatccatctccctaaggatattccattctgaagctgtcattctcgcctgcttttgtctttctcagatatataacttggtcttctaacacggctatgtttgattggggtgaaacagtgaaggaagaaaataggatggaggatggaaacggcctaaatcgtgaaaagataggtgacgatctgttcatgcacaaatgatattgtgatgatcaagatggtgttaatgttagggttgtgagagtcaatgttctgcctatatttttctcctttgttccgacatcaaagtcttgacaagaagagatgccaggaagtttgagagcgagaagagatagatcagattggacattctgtttgtttgtttgtttgtttgtttgtttgtttatttgtttttctcaagtttatatctcatcccagtccgacacagttataatcatcttttgatgagcgccgaataaacgggagcgtgtatgcgcaaatcataataccgaggctggatacgacgagtaaatggaaagccaggaaattatgcgaaggtgcaaaacgaggaacaaaagatgaaatatgtccatgtaaagagtgtggtgtgtggcaaatacgatgtgttgtccaggctggctagctatcagacaaggaggcgaataaaaacagaaaccagaacaaatgaatagggaaaaaagtttagggcaaaagaagagatacaccagattacaaggtgaggaagctatcgaaaagcgtcagcccgatcgaatttagaccggctacttaaaggatagcaagacctcctacgataccgacgacggtagcagaaaggaaatatccgactgctccgctcaagatagacatacttcgttcggccccgctgacagcagcggatgaggaagctgaagccgctgccgaaacagcgccagtgactctgccagcactagcagcagcagaggccgatgacgaccgagcactcgctgctgaggtcgatgcggagatggaggcggaagaagtgatacttgagctagtagcggaggcgctcgaggcggatctggaagcggaggaagcggcagtcgtgggaacgacgagaagagcggtatcgattccgttggagatggtcgagaacgtctggcagttggaagtagcaggggtcgagtaaggtccggcaggggttacagtctgaccgacagtctgtttcaatgtttacattaagagaaaaaaggaggttggagcacaggttgagggagtggagagtaaaataggcaagaaagaagaagagaccaacccatccctcaagtgtgtgagaccagaactgcctgaaagttgacgttgagccgtcaggttgagggtagagtccaggaggcacagcgggctctccgtcacatgaggtgaacgagttgttggtgtagtctccaggcatgacgaactggcaacccatgacgtcgagctcgtgctcgcacattagggcagccgggacgtcaggtgtctctgagatacagactcgaagacagaattggttatacgacatgaagctcatccactcttcatagaagacgtcctgtccagaaacgttggaagttacatttcctccaatcgggtttccaaggttctcggcaccatgcggatcaagctctcctccgtcgtcaccgtaaggaatgttgatttttgttccgtcgaaaactgattgacgatcacattcgacaaaaacaggaaggagcatgtctgaatgagctatgatacaaggctagtcagacacggaaagggcgtgatacatacatccttgaatctgaacgtaggcagctgaaagatgtggcaaacatatatacacgatgcacgcatggtaagtaaacggacgtctctcatgtgctttgaattaactttctgggtcactaacaagtcttgatgaactgttgacaaaagatcaattgaaaaaaaaaaagtttttaaaaaggagcgcatcaatgacgagcttggcatattaaaatatacactaacaagtgacagagaagaaatttaaaaaccagaagaatacgcacatgagcggactggatggttccatcagggatcaatcgagcattatttcgaggtttaaggcagtactattgaagaaaggaacagagcaagagaaatatagaacaggacagtatcagttgtacgcatcatcttcagtaagagaaaagatgtaatgatttcggtctcgtaactcacagctacaacgataggctcaacatttccgatcaaactgtctggtccagagtcgggaggtccgtagaggcaaaagtcatcgataccgttcaaggtgagcagtctagacatcgatgtctgattaatggcagctcctggttgagcaaggaagggtgcatcggggttagtctctccattgggataggcggcggtgacctgagcgtgagcgactgatgccaagggaagtgcgagtgcaagagcttgaaggaaagaagacattgcaagatgaatgcgagagagatagagagagagagacaggaagaggaaagatgggtataagaggaatacaaagttgttaggcgtttccgagtggcaaacaggaaagaagagaatcaaacggatagaagatggaccaggtttatgtaccctaataagattgcacttgttgtttcttttttctcttcttgtcgatcgaccacagcgggtctgtctgccaagggagaatgccaagcgagaatgcgaccaacgactcgtcaagataaaataacatttgccactgcgcctcttggctacattagttgcatgctgtactgtttcatgagcttaatttcagtatgtctatgtttctagatcggagatcagctttacaggtcagcatgccatggtctgagcgtgttagtgatatatacgaggcagagcagatagttactcgaacggatggctgatctggaggtgagcgagataactcgaaagccgaattgtcaatatgtatttgcataagctaccaaacgcctagtagagtttcgctgtcttttccccttgtctttcttgggagttcatagaccgaactgcgtagcgaaaaccacttttttgaatctaaatttgaatcttacctttcgacttaaccaagtgggcctcggcccgactcttatagcagacgtaggcgtgcggtgacgtcagtgcgcatcatggagatggcgcagcaagggcaagtgtcatcggcagccctcttccgccctggcgcacatagcgagcgaaaaagaggagacaagaaacccttcaaaaaagggcaaaggctcgttcggttttttcttcttcttctttcttctttccacacactcaatccatccgtttcttacagaccactcaatcaaaaaactacctgactcttaacctctcaacatgcctagcatcagtactcttctctgggactctcctcgaaacccctacctcgtcagtctataacccttgtctcttgccgtcatctcgatctgtactaatccaacccgctccatctcgcccgcttttgtttgttcttgttgccttatttcgaattcctctaggctgttggtattcccttgctcatcggtggagccacctcctacgccgtcaacggtactaagcccaacggcctgcgaaacaccggtacatccacctggtggtacaactccctcaaggctcccaagggagaggtctcgagcgaggctcacgcctacgcttggcccgccctttatgctgccgccggtttcggatcctacctgattgcccaggtttgtgtcttctctttcccttgtacatctcgccttatgacattgtatatgctgacctttttcggccccaaaagaacctcgatgtccccggagcttacggatctatcaaccctgccgcccgagccactgctatcgacgcccttaacttgtactggattgctatcggtcttaacactggtcggttccattcaattcaagtgctacttttgaatagacgttgtggctaattattgtttcccttattgctttttctctccatccagcctggtctcctctgttcttcggtctccgacagcctgcccttgccgccgttgatctccttgccttgtctggtgtcatcggagctttgaccgttaaggctcacagcttgcctaccatccacaacatccccacttcctgtacgtttcgttttctctaatctagctctgacggcatacatacacattggcttcttgaaactgaccgtttggcgactctgatcatcttttcaaaactagtgttctttgttccctacctctgctgggtctcctactccacttatcttagcgccggttactggtggaacaactacggacctggaaagcgaatctaaatgcctttcaaagtgaggataggatgattgagcggtgactggcgggtttgaaaccaagcgttttcgattgtttatcttctctgttccattagtctctctaatttgtagtcttctgtgcgccttgaacgtccatgtatctcttagcatctctttatgcacttgctcataagttcgcctggttgcatcaaagacggttgacgcaacatcacatcctgctcacccatcgaaccacagattcgtgtgctttggaatcgtagaaacggaacgattcggcgtaaaacaaacggcagacttagtttcgatagatttgacggtccatcagattaccattagatccattgtcgttttctctagcttcatgtgttgctcatgaacactcgaagagaaaggagacaaaagagaagaaaaagggatatgaagagacagcgggaatggaacgaggtggatagatgtactaaacgtaacaggagagacgagacgagaaagagataggcagaaggagaacggacgatgaagagtagaaacgtaaaagaaaaacgcttacagcgacgaaaagaagcaaacaaagggagtagaggaaggaacagactaaaggtgacatggctagagaaataagcggaaagaagaaagagaaagattatttgatattgacgagtctgaggtttccatccttcagttcaagacttgacttgatgtgtttcctcctttagaaaaagatgtacgtcattataaacacacccaagcaaagcgcggcgacaacctcaatcggtacgccctgcacgacctggggctgctgaacgtcgacggccgaacctccaatggatgaagtctccacacctcctcctcgcttcctaagaccagacacagcagtctgttccgaactctcaagcttcgccttgagagcttggatctccgcctgggccttttcgagagcggatgagccgatgtcaacggctttgtttgtcaaatcggccgcaccagctgacacggcggtggcagcattggaggcggtctgagcagcaacgttgacggccgcggtcgctggagctgggttcgaactcaggctggaaggagcagagaatgccgatgcggtcgtggccggaggaggtgtcgaaagaggcagcgatgggctgatcgttcggctagacccaccatacgccggaccaagatcatacccgaccgaggaggcgttagtcgtggtcttggcagtagcaggggaaggtgaaggcggaagattcgtggccgaatggtctaaaatggtagtatcagcctgatggaattcggatcgagctccatcgggtgaggtcgctccattgaccagaacgttaggctaggtttaagtatcgccagacgatagatcgaataagaaaactaactgccagggaggtcactatcatacgtgaagatgaatgaacgtaccgaaccgtcgatcaagacagattgatctccctcgtcaactgtggtgttagcaacatctccggtgctatcgacatacgcgcatcggatcttctgttcatgaatcttggacttggcttctttctcaatgtacgcccactgttgacaaagatcgacatgacggtaagagaagagttctacgagttttcgagagcgactcggtgatcggaacgtaaaaaagagcaacgttgatgaggaggcttacaatttcgggcaaggataggatctccttctcctgggggatagcagccgactgcacgagaaatttatctcggcatttaacaccctgtgggggctcaaccttcatgggctgaagaaggactgaaaaaagtttaggaggtaatggagaagacgaagagagagaaggaagagaacatcagtaagatgatgtttgtacgaaaacacagagccaaggtatctttccggcaggtagaatactgggcaaacgaaataacgacgatgaacaagcttaccagacacctcaatcctttctccaggctcgattcgtccagaattaggtcggacgcagtactaatcaaacggattgacaaagagatccaaggttagacgaaagaatcccaggaacactctcccatccccctttatttcttcattgtgcgttctttgtcagacgaccaaggaactggattatgctgttccttcttcatcgaatacatccagccttccaagttagctggttgccttcgtgacttcctcaagacgagatcacggcccatgggcgagacatggaccgacgaagaggagtgccagggaaacaaaagaatggagagcttctgaagattctgatgacgaaatgaacggacctgtttaggggcggtagtcttgactttgaaggcaacaggctcggcattgttgttgacaactagcaatgtcctcttcaccagctgggtaaggggtcctgattcatgcagatatataaaggaaggtccagaagaatggagaaaaatacaagggagcagggatggacaaggtagaagaacacgttagcgaccaccgagcagaggagatgggaagggacgtcatcgagcgacagggtggcaaggctttgagaaaaaaaggaccggacgaacgctcaaagacaagctgctgagaaggctggagatctacgctcatagttcgtaagaaagggaggagaagggagaaagagagatggtaaaggagatagctgaagaacggagagaagcaggaaagagtggataggatggaagacgatggagcgaagggacgtcgtaaggagagaagacgaggggttggtgaaaaaagaaaagcaatacagggagtgtcagacggactagagaatttgttgtagtctctgattagaagaagggactagtcagttattaggaaacggacgtaatgaaaaatgtggagaccattaggaaagataacacaaaagaggatgagctcatcacagctgcttacctaatgagattactaatctcaatcctcatctacatctcgctctcgatgataatgaatccttttgtcttgtcttgtcctgtcccatccatcctctgcgtcacttggtctcctctgtttcttcctgttgtcctttaagcctacgcagatgtgaagagaaggaggagcgctacagaaggaacctagatatgaccctctttagctcaacagagctcaatgcgtttgattccttcctcaccgatctcgtggccaccgatcagtccgttttgcatccatccccttcgttgtcaggtaccactccttgttcaaccactaccgccaccactgccgccgtcagcaacgacagttccgatgcgcctccagaccaatatatgttctcctcaccaaatacgtcgatctgggccgaccgacaatatccttggacttatcgggctagatctcacctcgcggatcggccgagcttgatggagaaatcaaaggtctgtcttaccaaaagatcactttatctgccagagacttgattcaagtcccaacttctcactcgtcttaaaatccctgtcttgctcacttgtcataatggtgatgattttcgcctcttgtctgtctcgtttgccttccttgtaccaagtctccctcaatcccatacgatacctttcgatcgtacacttcctcggactttgactgcgcgccgcatctgcctgaatacgctcacattatggatgttacccggtggacgatagatgcaggaacggatcagctttcggcaaggttagaaaccaaggagacggaaagattagaggctaacttggtcagtctgtttaccggttatggttgcgagctcggaagaacgttgcaagcttattttccattccgcccatctctgataccaccaacttaactcaatcaatagaccaacctttcgactcctgctgcctatctagttccgtcctctccgccagtcccaccgcctcctccggtcgaaccgtatatcgactctgccttatcttcatcatcccaaccgacatctgcgcatatacccgcctatgcattccccctcgtaggtcggcaggattccccctcgcgcgattcacctcgccaccaacaactctcagggattccgattgggcacttgaacgacactcattcttcaaaaccgatacccgcccaacctaaccttgagccttctcacgtgtcatcctactcctcctcatcctcgtccttatcctcatcttcttcttcaggcccatcatccaatcgtcagacaccttgtctggggataacaaacaaacttgaagacatggtcgggcgccggcagagtccggcctacccaggacttctgacggccactcagaagagggcaaaccatatacactccgagaagaagcgaagggagacgatcaagaaacgaacggaagcgctctgcgggatcgtgcctggtttaagagcgttatgtttcatcaaagaagaacaggaagaagaagcggctggagcagcagcggcagcgatggtgcaggaaagtctcagagacgatgataatcaaacgacgggcaagaaaagaaagaagaaccaaaagatggttggacggagaggtaggcggtcggaggaagacagagaacggctgagtttcaagatcggaggcccaaagagtgaaaagataattctcatcaagagtaggtctctttacctatagtttttggtgtggagagtgtttgatccgggtctaactttttttcttccagcgatcgaacatctaaggacactccaagccaatcgacgagggctactcacccggttaaatcacctacgccaacaaggtctctcccgtacgtctctttgtattgtgtcttcacccctatcgatatactgtcgcatgctcatatactctggagactctctcacatctattttgtattgtcatcaggtggtctgccgacggatgtactaggaacagatcgttcatcagaatgggactttccttggaagatggccgagcgggaagatagagaggacgtattagaagaagcggcctaacggggtggaggatttgggctcagaaacgagaaaggaaatgtggtctgggcggtcaagatgacgtatatatgtgattcattcttcatttaatctttctctccttttcctcgtagagttctttgtttcatttaggttatatcctgctctatacaaatatatttctctcgctgtcgttctctcgtttgcctcgttttcccaatctgtctattcttcgtcgtaccatatgcatatgtatcgttgttactaaagacaaaggtcgagggaaagaagagaggatatagaaggagaataaagagtgaagaaagaaggaaagaaatctgaggacttgggaggcgaagacaaccttgccaggtcctcgtatcaccgaaacgccaggcactccaaggcgagaaaaggattgtacacgaggcaccattctggttttcagtttgtgattccgtttcatttaaaacacagtttgtattctattctcaactaatgagcaccaaggggtatccgttacatctacagtacgaagtctgagtttcatttcacatcttcccccctccaggtttcttattcaacagggtttgagcgactcgccggttttctatcgaacattcctgtcgttaccacgatacaatcaagtttacgatgaataaaattgacatcaagaaccacacttcagcacagatccaaagagccagaaggaggcaagaaggcgcaaatgaacggacctttgaacgattgattgaacttcacatcttgcgctttctcggatgcttgaatttgagtgataagttggttgaccgacggatctttgaattgaaacaggatgaatcagttttatttcccgataaagaaagcgagagagaaaagaagggacagggccaaacctgatttatcgagggtttccaagaggtttcttgctttgacgatgcttcctgatgatttgagcgcgctcgctttccggaacgaagcctttgcattgtctggatttttcttcagtgcctgttcgtggtgatattcagtggaaaaaaaaggaacagcacccagatgagccgatgtcaggagaggcggcaagacgtcgagagaaagaagaaatcaacagacatcatcagcacaggcgatcgctcgaatccagttctctcttttcaggtgaacggcagccatatttgagtatacgactgagagctcaaggttggcctaatttggacacaattctcagtacagcacatcagactaagactcaaaatgatcagcgtagagccacagtggaggacagacctgatgaacaagctgcttgatctcttgctcgtcaactccagagtttccgttctgagcctgagcctgggtgataaccgaccggtccagcccattcagattcaggacggcctgaaatgagatgtagaacaagttaaatctaggtttgatcgatcatggcgatatctgcaatatagaaagggagggaaaacggacaaggtgataagatttgagagctattgataggagcgcagagatcgggcttgtcaggtttcttttctttacttttgtagccgagacggatcatgtccatgagcaaggaagaatacttacctatcgggaagtctttctgttgtgcagagccaagatgaagagagttccgggaattatattctatgagtcttttgtcgtccacgtatatgagagagaacaggagaacagatcatggagactgacgttttggaaagcctcattgccttgaagcttatactctatcccggtctgtgtcttttctctggagaatgtcgacaaaaaaaataagattgtgatgagtttatggatgtccaaaatgataggaaagaagtgagagagaaagagagagaaagaaagacggtcgcacagaacctccttctttgtggtcatgatagttcgaatgcaagtatgtgtcagtgtattgagttgacgaacaggaggtaatgtatagatgggaaggaccggaaacagagaggcaagcgtgatgcacgtgatgtcgaccgggatgagcgagctgtgccaagtcaagtttcggcccgggatgagccgaacatcaacgtcatcgtccaaggaggaaacgaacgagagagctagcaggagggacgcacattcggacctgaattcgtccacccaggctcaggcacacatccaggcacaggtaaagacacagacacgggcacgagctcaggcacgcgtacctccagatcttgagaaagattcgatcgacgttcttcctgcaacattcagatgatccccttcttatcattgccaccgctagcgctcttggctcatctgcccttacctctccttcggcattcgcgctcttacaggaatcacagcgaactttgtttcgttccctccatatacttctagtctcgcagtcactctaaatacatacacatactcacccgtgctgatcacatacatgacgacaggggataacacgaatgtacgtagatctctcggagcaggaaatactatttaaaagaaaagatggaaagacagacagagaaaaccccatcgtccatttctcatctcattcgtcacctcgtacaataacgtctccgtttatgatgcctgctaacccactgttgctacatccaaatggttcccctgcggattctcatccgtcatctcgctctcggacgcctctccctcagctgtaagtctaaaaatctctgtaacatacagagggaacgttgttcggtagtgaaactcacaaagagcccaaactcccacgttttcgtccgtcttttctctgcggctctctctgcgatctatatgtgacacagaaacttaaagactcgaaggtctccaaagtcgttctccgacgttttcattggtattcatttggaagtaaaccgatcaaaagatactggcaaagatgaaatcgtttggaacatctccgtctctgatggcttcggtatcactgggtaaaatatcgtcgtcattttattcctgtattcttctgaatctcactagttttggttctcgtcttcgacctctactcatgtttatcctggcctacgatccttaatggaatctaccttcgtatcgacacaatcttttatcaataatctctagctcggaaaacggaaaaagagaggaccttgatctttctcctggtaggaacggagtcgagatcgccgtcaaaagtttggtcagccgactgcgagcgtttgagaaaagccaaggctacaaggtgagactctccttcaatatcgccacctatcatcatctcggctgacatttgctctcgttcggtttcccatgacgtttcacgttgtctggccgtcctgaagattcaattcgttgccttggccgctcctctgcccgcctgttttgccgaacaagagcctctcttcttgccatcgatttggcaaaaactcgacgtatgtttcctgcttgaaaaacaccctttggtttttgttgtaccgctcttcaggtccatcagtgcatatgttctcttaccactctcctgtctctacataggccatcccattcttgatccctatgccttctgccatgaccggacagacgacgaataataacaccgccccaaactcaccgctctcgcccactttgtctttctttcctcccagacataatgctcgcaagaaaggcgagaagaagcatatcgacttgtccttcctcccggcctactcaaagcaacgccgggccagaggggagaactttgcccagcgcgccgtggcagaggccatcaagacactttcaccttctgtccgaagcgctacctcggccacgaacgcggatgagatggataacgaggtcgaagtcgatcgagacggcgagattcagctcgctggaatcaacgattatgcggcaaccacgtcggaagaggtatgtcagctagatacatattctcttggttccgcgctcaacagactgtttatcaaattcaatttctatatccatagctctggataactttcaatgctgtcagtgtttctctttgtctcgtttatcaagcgcatgtctttatcttacaaacccaactcgccatcacatcaaatttggtggacaaaacagctttccaatcaccttcgagggcacaacatcaagatcgccttcttttctgccactcctcagggtgcgtcttgacctgcatagtattcctagacctcctcttgagcgtacgtgccgaatgaactcttcatatgattctctcttaggcggaggcgtcgctctcatgcgacatgctctgatccgattgtggagactggttggcctctccgtccattggtatactcctgaaggttcggtttgttcttctttattggacatcgcgatttatcagcctttctcgcgctgatctctatacttgcaaacttttaggtcatcctgccgtatttgatatcactaagcgaaagtttcacaacatccttcagggtgtcaacaagccgggtacaaagcttaaggaagaggataagacgctgtttgagatgtggacggatagtacgtaatattcatattttcatttaaatactgtcaaggatcccgcattggctcaatcttatactgttttgatcaatagacaacgtggacaccttctggtcagagggtgcaatcgatgataaatccatcatcgtcatcgacgaccctcagtgtacgtctctagcagcatgtcttgattctttaatggaaactctcagaaaccgactagactgcctgattcttctctctaatcctatccagtggtagccctcatcccaaccatcaagcagcgaaaccctaatgccaagataatctatcgatcccatatccagattgacaccagcttggtgaatgatccgagcaagggcgaaggcgcgcacgcggacgtctggaactatttgttccaattcatcgagcaggcagacgtattccttgctgttagtgaatttttcttttatcgtcgttctttcaatttacaatcagctatctgatttgaagaaactttggacaatagcaccccgtgaaagcttttgtgcctcagaatgtgctggatagcaagatgccagtgttgtacatggcaccctcgaccgatcctttggacggactgaacaagagtattggtgaagccgacatggtctactaccagcactacttcggccgactctccgagcagcaatgtggcgtcagcatcgactgggtcagaccatacgttgttcaagttgcccggttcgatccttctaaaggtaaactatcggtgtctctagtctcatcctgcgcatgtctgcttggattttcattcctatgcgtatatttgatatcatctaggaatccctgaccttctcgagggttaccggctattcagacggaaacttaacaaggcagctctatcaccagccgagcaggacactccgatgctcatcatttgtggacatggtagcgtcgacgatccagacggtgagattatctttgaagagattcacgagacactttcttctaaggagtatcagttcatcaaggacgacgtctctgtcgtaagagtccgtgagttctgagtttcttcagcattgactctttgaagacttgttacattactgacggatcggcgaatgcaaacattcactccctaatagctccttgtgatcgaacgttgggagcgatcttacaaggtgcatggtgcgcaacccaggtttgtatcttctcaacctttcttcttccttgtaccggtcattcttaccattaaactcatccataaccctgaatattttaccgttagctttctactaaggagggatttgaggtcaaagtcaccgaggcgatccacaagcgtgtgccaatcatcgcttccaaagctggaggtattcctcttcaggttaaagatggcgtgaacggatggcttgttgatccaggagattccgaagctgtgtatgtaattccacgtgtgtctctattcgttctaggtttctgatctatcgatcttgatgtggtttttgccaaatgtgatatcatgaaatagctcggaacgactgcttgagctataccgagcaaagagatgtccattgacaagcattgccttgctcgaacaagatggagagaccccaaattcgatggctgataaaaccgtgtcggactatttagccaggcagccaaaaatcagcccgaccggtatcaaggatatcggaacaagcgaagacttctggagcgttggtaatgcctccaaggtccgtcttccagtttagatttcctttcatctttttttggcttccttctttcttcccgacccttcttaggagaaataacgacggctctaacaagtcacttttgaaacaaactccagtggatgctcttgtggtcccgactagccgggctcgaagttgagaacgaagccgacaggaacgttctgggaaggatgcttcctgagaacggcgccgctcgatctgatatctggaaggatatggaaggtagggatgtgtgggagatgatctctggaaagaaggatgatacgttgatcatcggttgaatacaaatgacttgtgtgaagtcacgtttgttgtgtatgtgtgtctttgtgtcttgtcttatcttttcttgtccccctcctctttcccttctgcttgttgtacaaacatctctttttttattcttgtctattgtaatttatcatcgcgtgcttgtagctgctagatctgtgcaagcagatagatcttttcagtgtatctgtttgtgttagtttctatcaatgtgattgtctgcagaaccgcttatactgagggacgagaacacttggatggaagttgatagccttctcggttattaaccattgccgaacagcaaacgacccgaaggaccttcgctctcatccgttctctttttctgttccattctttcccatccatccatctccacactgttcgacagctgcattcaagccttgaagcacgatgtgtccttccacacggacaccctcccttcggttcctgtataaccatgccgctcacttgtttctccatcgaaacccaacggtttcactctccctcctggatcagctgtttgatcgtttgccagctccgtctcaaccgtggttcgttggccctcttcttagggaacgagagaaagatatcgagggacttcgaaggaaatcgctagttctttggattagctgtttagtctgccagtttggagatctatacagagaacaatcaacggaaacgagcgagagcataggaaagagcacgagcaagccgatagatgagagagcgagagatacggaggggttggcattatttggacagataaggaaacgctgtctggacatctatcagcctagtccatcatcttcagcatcaatatcactatcaagaccatcaccgacaaagaacggtcatgcctccctagtgagctcgtcgagccatcaaaacggacctcaactaaactcgatgatgacgataaacacgactatagacacaccgttcgctcttccaccatcaatcatccatccccttctcctgagcgcccaaacactttaccttgacccatcagttctcttacaaacactcatcgaaccgtttcttcagactatcccgctcgcgctgacaaacaccctggcggcgctctccagatcgagagcgtcggcagaaggaatgcgtgcgagaagtctaggtgaagaaggttgggtaggcgacgtattggagggatatcaggatgtcatgtccgcttgggcgaggtgtttgggaggtgagagaggaaaggcagtcgttagggaggacagaatcctcggaaaagaattcaaagaggttggttcacgacttctcgttgggttgtcatcgttcgcatcgatgtgcccgctttctcttatcaaatcgcttgcgctgaatctcactcgttcttttcttctttgctcctcatctctgatcagcaaatcattgaatctttgaaccctccttcccctctccctagccctgttctgtctagattgccctccttcgaccgtacttcatccatcgacagagcatcctcacctacaccgagtgactcgtcagcttcatccataacgagcgttcaaacgacgacaccaacgtcgtatagacttcaacgtcaacatactactaaccgagataaggaatctggcaatgaagctggcaagggaaagggaaagggcagagcgaaagcagggacggtcaaaagccgttggaacggtttggactctggggtcgaaggtctaagcggggatgaatcttacgaagaagaacaaaatcttgagaaggttcacctttcaaccgcacagaaaattccattctcctctacatcttcatcggcaacaaaccctatcacggataagctcgcacatgaagaaagccgacaagatgaaggtcgaacatcttacacgtcaacctctttcggttccaaacttgttcttcttcagaagtttcttcagcctcggtcttcctcttctcctttgccagagacactacctgcctcaccgatgagacactcgctctcgaaacaatcgtcaaccgacctaatgaatccgaatagttaccttttgatctttcttcgagctatcaaatcttccttcaaagcaggtctttttctctggatcatctggcacatcatctatcgagttcgagccggttggttcagaccatcaagtgttccttcgatgacctctgcaggcggaggtgtagtcagcggggttggaagagcggaggaaatcaggcggaggttgaggagaggaatcttagctaggttctgatcagacggagttgggttccatcatccacgtttatatgatctttcttgtgttgactatgctttctttccggggttctcctttcttgtacattattttgttcatactcgggtttatattacaggtttagtgaaagcgttgcgatgttgtgtttccgttttcttctctcttcctcgaaaccgggaaagacgtgtccttagtcagcctcggcatgatggaaacaagttcatcgatcgtccatccggctcccgatagaatcgaaagagaagggaacacacaaaatcataaaaacaaaaagataacgggcggaagatattccggccaagcagaaacagatacaaacaagacgatgggttgaaaagggttgaaacaaattttgatatcagaagaaaaaaaaacatagacgaagacaaggtatttcgtgcgccaagaagcgcacaaagaaaagaaaaaagagatagcgggagtaaacgaggaaaaggtctgactcagaaagagcatccagcgttcaagccgacgccccatcggcacgaagaggtttcgaaattaatcgttcgatctgcttcgagacctcatcgttcgtacttctgattgtcactcgacaaagcttagcttccttgttaggctccaacctcaacagacaaccgactttaccagctgtggacatatgtaatactccagcagcgaccgagttgactgggtttggatcaatctgttcgagcacaccgagcttgttcccggtaatcaccttgttgttccttgccacgtccggctgtcccgaagcgtcgagcttgatcgggaagatagcctggcactccctcggaggtcctccgatcaacttccacctctcaaagaagtcagcctgtccgagtttgacaggctcgataaacttagtgaccgcgaccggcaacctaagcaccaaagtttgaagacttcccgccagatagccaacccggatggtcggtggttgagtgaataactctttgcattcaaccgagatctgctgctggacctgggtgagtggctcgatcgtcttggtcggattttgggcgagcgttgcaactagcttgccaggttctctagattcaatagcgatcgagaacgagccgagtgggactgagagtttgttcccaaagtagagctgaacccggccgaggtgaccgtgatactcagacttcagacctatctgaatctgagcgtcctcatagagcacaccctcagctgaatacgataaccgatcaaaccatttgtcgatgttggcaccatgggtaagcggagcggatgactgaggctgactgaagaaagatgaggtagtcaaaggtgaggtaggacctaggttggatggagtcgacggagcaaggagaggagcttcctgagcagagttcgatgtaagatctaacccagccaaagaatccatgatgttttcaggaatgtaggatgaggaaccaagacccatcacaggttccggtggtgacattggagtagagttcgagcgcatcattccgttagagtatgaagaagaaagtcctgaagaagtagtagtaggaccgggggcagccgcagaagaaacgggagtcgctgtagtcacagccgtaggcacctgtccatctccggttcccttcctgaagttcttgaacctcgctgcctctcgttctttgttctctccctttccaccaattacccacgttcgcttgtcgcctgtatcttttcccttcttgtgcaatcggctgatcagtgcgctctctctcgaagggaacggaggcatttcctcaaagactgcctgtagtagttcatcatcgtcacctttggtgaccaaagcgaggtattcacatgcccgctgctgaagctctgcgtcgagaacgtgtcggtatcgatccaggatgacgaccagctggtccttgatctctggaaacaagtttgcccacttgacatatgtcgacagaagcagcgctctcgtttgagccgagcagaagttgatttttgagtgaagcgcctggaactgttcaatcgggctgcttccctcgtcgtttgcgataaggtggccaaattctcctagaatgtacgcagcgggtttgacgagcttttcgtgtacactcggggcttgtaagtagtggaaggctactcgagaagcgtatggctaagataacgatttgaagaaaagaaatggacacgtttggacaaggggtttagacaaagacgatctaatgatagtagatggatattagcaacgaacctgaaggtcttcagtgttggtcacaatttgaacgactcgataccaaacctcatcggctacatggtctccagccaagctaatcaatttgagaactgacaaatcatcacaaaaaagagactaaacgttaatcccacacgtatatacttcgccaaatcgaactagcttactcttgacgatgagtgtaagaaaagaaaggaaaaggtgatgaacttacttgtatcaacataccactcgtactctgtagcaaacttctccgtcagaatagcaattttcagcaccagttcttctctgagcccataatccgcgatctgaagatatttcagtaattcttccacgataacgctcgcatttgacgtatcacacattgagtagaggagatccagagctcgtctgcgcacactaatatctctgtctctcaaactgaggataatcgttccttgatgcttcttgatcggttcgagagagtctgaacacgcggctagatgagccatcgcgtctagaccaaggtaccggacgttggtctctttggagagaatgaatctgctaagaaggacagcagctgtgctgacaacggtcgactcgggattcaaatggatcgcaagattgatggcctcaaacaagatcgcattctgggtgttgttatgctgaacgttttttggtacttccttcgagttttccatgatggccttgaggatggcatcgatcgcatttagtgtgcttggttcctctgttgaatgtcgggttaagataggcatgagaatcaactaagcggcatacttttgtattgatgagaatcacaagattacaaacctgtaggagggtaatgttgtaggagtcgaaggagcttaatttgaagccatggtatcgggactcgataatagtagtaatcagacggatggttgccatcaaagacaagctagtatgccgaagagagtggaagctagttagagcgcgaggcaaaatccacgaaacagtttccgaacatcaggatacgacatacggagtagagtcggccgaccgctcgattatagcatgattcaaactgatcaagattatcttgagccatcgtagtcaccaaacttgtcaccgccaaagctactccctgaatgtatcaagtacaacgtgacaagacaacggtttgtttggtatgagttgcttatgtctatgcatacatcatgacaatacaagaagtagctacacgtacaagattatcgtcatccataatggaaacaattcgttcggcccagtctcctgtagggatcacgtccgggtgttttctgtacagcctcagaagcgtgagcgcggctttcttctttacgaaaggaatcgaaactctggttttgtgtgtttttgtgtggagtaacagaagaaaccgcgtgggtgagacaataggcgacgacctataaacgaaggatagcggaaatgataggaaaccactcacggtgaaatgagcagtcgatggacatcaggtgacaatgcctcggccatttccttgcctccgatgttggcaatagcgtgtagagcaaggcaattgttgatctcgttttgatcatccagatcctttcggatcgagttgatgacaagtcgaactaattccgaattctcgtgcatcaacagcgtcagagctagatagccctgatgaagggttgggttaaacaggtcgacgaacgagacaccaaaccgtcagccattcggaaacggtatagaacgagcacgagtgagccctccgtcggagagaaggggagatagaggagcgcgtacgatttgtttctcgctgtatttaagactggatatcaagttgacggcttccatatgaccgacgtcaaccttgtagccgaggatataagtgaagaccactttggaaagatatttttttcgctggtatccatcgagattcccctctgtttaatgtgatgaaacggttgaaaagaagatcatagcctcgtcagccttgttgatgaagggacgaaagaaacacagtgtgttcccatctcctctcactcttaataaaaggcttgttgacggaaaggagttacctttgaacttttgacggatgtgagccatctctctgttgattctcttctcttcgagttctctgactcgacatgctcgaatatcagagatatactacgttgcacacagagaagaagccgatggaaagaaaggcagaaggacatgaaacggtaagaacgcagacacgcacgatccggatacaagccggtcctctgtacgatccttcatctagcctataaacatgtccaagagacgatggcgacgatgaaagacgacaccaaacacacgaatggatacggacctgctgaagacctctcatattggatgccatgtcggaagagagagctgatgaaaggacaagcccggttcgatggtagatgggatcagatctagatggaggacagaggaaggacagatgagagatcaaagagacgatcacgtaagaaaaagtaatagggattttttcgagaagtactagaaatttttgtaatactcactataaagagttatctctatcacctcctaaacatgaacaaccacatcctcctcgaacatttgatcgtgccgaaggatgccagatgtccgttcttgcttccttcttctgaaatcactgaccgactgaccaaggatgtttgctgatggatgtttgatctcggctgaccgttgggcggtggacagtcaccttcatctagcttctcagacggtcttgtccgctaatcagacattcagctccgaggtaagtaggtgggcgagataacccaccatcctttccgatatcgcctctgcaagcgcaagagatgaagaaaagagcaagagagtttgatcaccagcaattgttgattgattgaagatcatatttcatactcaagcgatcgttcgatcaagtaagtagaaacatttctttctagttgaacggtcggtctcctatgatatctgtcgtaattgaccattcaatcgcttcccaactgatccactagctcatatcatgtccagatcctcgtcagattctgctaccactctggttgtatctagtactccagacacggtccctggctcttccgtttcctcaacatcctcaacacctcgtatgcccagacgttcccaaacacctccaccgtctcctccgtctccttctttcccctcgttcgtctcttccgctcggtcgatacatcattcagatgcctatccatttatgctcgatcgtgaagcagtcgagcggagacgacttcgaaaagtgaaaaaattggaggaaaagttggcctgggaggaatcatgtcggaaagaacgagaggcccgaaatcggagagaggtcgaggaatgggagcgtaaacagcaggagatcaaggcagcagcagccgttactgctgttgctactactattactactatctccatcgaagctcctcctatcactcctactcctgatccccctgatgttcctgctgatgaggccatacttactcctgtggtagctatcgaatctcctggtcctgaacctactcctatacaagtccaaactgctccatccatccctccgtcaccgctgattctaccaaagagcggctcatctgaacccgttgtgaacgtcaatagaaggatcgagatcgagatcctcgatagtgatagcgatagtgatgacgagattcagataatcgagtcctgccccaagccggtcgtttcttcccgtgcgagcttacccaacacccgacttctccctattgtcggcccgtctatctcctcctcctcctcctcctcctcc

SEQ ID NO: 458 - DNA, 15929 bp, Xanthophyllomyces dendrorhous
gtcacccacccgcccttagcaaaacctctgttccgatcagtcgccggtcgaataaagcattgttcatacctccggtcaagaagatcatcaagacaccaacggtgaaaccgaagctcccatctttgccgaaaagcatgcgcgctcatctgaatggtgatccggcagaagaaagaaagaaactcgaagaccagttcgagtgggagaagactgtaatgaatagaagaagaaagaatagggctggagaacggaatcgatacgcagaagagaacgagagagtaaaagggaaagggagaagttaggaagaatcaactgattcaggtttcttctcttgggatagagacgatcaagtacaggccgtctccgtgtctcttctctcccctcccccctttttcttcctcttacaaaaagaatctcaaagcaataaagagacggaacaccagcgggtcagatgtcagagtccttcctatcaacaaggatgagactactaaacccggtcagacttgaagaaacgatcctcttcccttcgaaggccggagagatcagaacgccggaccacgcaacccactcgctgacaaggatgatgtctttcccggcctaaagttctcctcacttagcatccgttcatctcgggggagacggccgaacttggctgattacttgggcagggtgtgccaatataaatatctacatgactgcgtgaatcagaggcgacaacatcaatacaagtcgaggtcgatcagatacagatcgtcagaccaaagaagaaagcagaaggagacaaggaaaagcaaagtggtttgtcagggatcgagataacggaaggataaagaagcctctccttcagttacgatagagatctatgacacaacaagaaaccggtgatgtaaaacgtagaagaagtgaatgaaagctgaagacagaacagagttgaccttcttttcttctagcgagatagagagaagagatgagcacgagagagcagaaatgggaatctttgatcgtcgtacataagatgaaacagaacgactagtatcaacatcttcctcctcttcgttcttctttactctttttcatttgtttgattggcattcttgaataacgttcttgatgagtgagtcactcgtacagatggagggggttagaaagcatggatgatgcgggtggtgaagaaacaaaatcaaaaggaaggggaaaaaacagaagggacaagacaggcacaacgagaggagaaggaaagtgggtatatgatgaggatcgtagtagtaataggaggagaggagaatgcagacaggataaagaaagtgtatgtgttgaagggtgggacgcgtctcgacacttcatgatggaagcgtttgagactatatccaggtatataacaaatggcaagacagagggaaagaaagtagaaagacggagtcgaccttgatcacagacagatcaagctcaaccgggtatgcccagaagtagcagagaggaaagaagaagaaacggtgggagagaacaggaagggaaacgaaggctcatcacgagatttggttcaaagaccattccctcgcgaaaatcgaagccttgaggtacttcttgtgggcgtactttttggagacgtactgcccgtcaaagtctgctgctgccatgttctcaaccagatagtttgcgccttgttctagctgagcttcggtgaagttggagtaatacacaaaggcttcgttccacttcttgttcaacatcttgttggcgaggtacatgcctatggcggcaatcatggaaggcttcgccctcaagaaccggtagtcgagcaaagtaacttcgatgaggaacttggagagcgttctggtctgaatgtcgtaatcgtcagccttgctgattcttcggacccaactatacggcgagcagtacgaggagatgttgaagttgagggtctgcaggatgattcgttctcctttgaggatctcttcccgagagtagccgttctcagtcatgtacacaaactcgtccacactgggagcgaggatttcctcgtacttggcagcaatgaacatggcggtcactcccacaagctgaagcttcaccaaagagacgactcggacagataggaatcggtcgatgatgttgactgcaatccataatgtctctggaagcatgtggtaccgtaggtggacttggagaagccagtcgatcaaggttgttcgcatcgacctgggtaaacatgagatgtgatgagcgacgggtgggtctattgatgggagagcgaacatgacaatgctctttcacttaccattcaatctcggtctggaactccatgtatcgggggttgggcatcgtcttgagctggagttatgaaaagcagatgagaggagaatcatgaggaagacagaagaaggactacgcgtcagatcaagccgacagataaagacgttgaattacgaaaacaaagggggcgctgacctcaagttcctccatgtatgcaaagatgtcgtcggcgtactcagccaccatggtggtatcaaagacgtcgacttcatctgagaattcttgtcgaagctgctcgatctctaacctagcctgctcatcctttgcctcgtccgcccgaacccaatcgtcctcatcaaccacatcctgctcttcatctgtatactcgttggcctcactgtcgctctcactcttgatcaccgcagcctgggcgagctcgttgaagttcttagcagccgcacttcgtcgatcagcgacgacatcaacctcgttgtcgtccaaagcttcttcgaatgacccgctggcctcgacatcttcgatcgggactgagtcgactttgatgattggttttgagagggcgacagatgcgggagcagcattggatgatggacgagtggcgagggaagatcggctagagttggtagactcggcgataccggtcgaagagttggtctttgggagagcaggtcgagcagagcgagagacgattcctgacgaagcggattggctggcgaccatcgatcgggtggtccgttgagtcgtcggcttggaaccctccttctctttgcttgatttatggccagagacatcctatgggtgagaaggttgagagatatgttaataaaagacggatcttgctgatgctcgtgattggtttaagccggtatgatcgcccagtagatggtaggtgatgttgtgatagatgacgagcgagcaagaggtgagatttgctaaataaatagaaagagaagacaaaccttttctttattgctcacgtctccgaaagcagatcgcttgacgccggccaccggcttgactcctccagccaagacggatgaaggtttagctcgagcggtagcgcccggtgccaatgccgcagaagttgctgatggcttcctgctgtgagcggctgtcgaggtagggacggttgcgttttcatcctttactcggacggcagcagttcgtcgggttgttggggcctatagagagagagagagaggagtagaaagaacggaaggaaggaaggaaggaaagaaagagataagaggaattgtcagattcttgaggaaaaacaagaaaaacacagtgtgttgtcgagccttcagatggacggatggattaaactggaaggaaacgtttggactgactcgttgcatactggaggaaaagaaaaagaacaatggtatggtaagtgatgagtagactacggaggaggattgtatgtgtacgaagatctaaaagacgagcttgagagagaaagagtgggaacaaagttcgttgttgatgggtcttgtaacggaaaggaggcgggaaaagattataaggacagacaaaggaaaatctgaaaagagtgactgaggagacaaaagagaacagagaaaagacaggaataaaattaacagcgatgaacgagcaacgataggaaaaacgttcccggcacaacaacgaagaaggtaggaggtaactgtgtgagaagaggaagagacgacacgagagaacgaacgaaacgaaggaatcgtcgtggatgaaggatggggaaagacgagggaaagggaaacaacgatgggttttctaggctgggtggatcttggttacggatgtggttacgatcgcttgccttgtctttttcttttggttacagaatccaaaagtcaaaacaaaaacaggcgcgtccgggggttggatggttatgtttgtatacgtcatcgtagccatgttgtcagtcgtgtaacctcctgcgcgtaatcatctacaaaccctaacggtcgggaggactcgtttggtttcgtggccgtcgcgtggcttgacacgtcgttgtgccatctcgggaggacaggccgtaaagacacgcgactttggatcagactttacattattagacatctaggttcttcagggctatacaaagttatttggtatgggactagaatataaggaaggaaggaaggaaggaaggaaggaaggaaggaaggatagaaaatagagcaaccaaaatcttgttacatatacatcgctcagagaggcccagaagtagcagccgcctctcctttggcaacagcattctgttccaattccgcacgcgcaccatcctcatcttcgtagcccccagagagactgactccgatctctttgatcgcgaaccaggcgggtatcgtcgagagcccccacacagcaatgtcgataccgagcggaatggtgtggggtaaagtctttcgagcagtaatgccgtatccaacggccgaaccagccgattcaagcgatcgtaggatagaagacaagcgaccgatatcggactgatctttagacgagatagcagcgatgtaaaagtacaacacgttttgtgacacactgagcaaaagattgatgccacccagagggggaaagggaaaagaaaaagaaaaagaaaaatcagtgttcggctcaatgcttgggactacacacatacacacagagaacagacacacacctcgtgttgagagcatagagaagatagagacagtacgctttggcaaatccggcgtttccaaagtcaagagaaggagccttggctctcttactgaactggacctggatggccactccccagacccaggagacgagcatcatgattgcgacgacgaggaaagaaacccgcgcccgagtggcaagagtgaatctctgtcaacagaagacgggagcagagagtcagaaaatgagaaacatctcgactctgcgctcgagacaaagagagagcgaaacatactcgagaatcaaggaagataccaaacataaagttgacagagatgccgaggatggcgctgaggagggacgcgagggctcttttgtggagaatatcacagattggttggcacaacacataacggaaaccaggggatgatacacagcagaacagacttaccttgctcgcacagtaaaatagagagataagaacgtggtttgatagggacccatgagagacgagtagaatgcaaagccagacctaaatgatgtgcctgtagtaagtatacgtcgtgaagaacactgagaccaatccgaaactgatatcatcctacttacagcaaaagaacctcttttcggaggaaagttcttcctaccgtcttcatctctttcacgaaaccatccttgcttgttccaacgacgacagccgtaccgtcttccctctggaccttgtggggctcggacagaagcaatgccacgaacggcgagagacactcgagcgcgatgaacaccaagtacgtgttggaggacactgagccggcgactttagtcttgatgttgagggcggtgttgatgattcctccgagaagctgacctccagactttaaggccaaccagacagccaaatagatccctcgctttcgagcctcggggtagccaagaatgatcgttccctctatggaccagaagataccagcagagataccgcaggtcgtagctccaaacagaaccaaccaaacgacaccatggactttgttgaggtagagaccggcggcatctagagaccagttcgatgtaagagcttgtgaggtgagtacatgtatcactgtagaggcagcgaaaggttagctcggacgtacagggagcgaaaccggagcacccaaaggccagactccacttgagaccgatcttgttcgataatgtggctggttgatcgatagaatggttcgacagatcaacccatgaatcatccagtctctaaattcagaaattacgacaacttacatcccatagcgcagaagaaaaccatgaggccgaacaccaaagcattggctgcgtttaccaagtaaggtgattgcgctcctccagcaccggtcgcagacatggcattccaagtcccaggcgacagaaacgaacaaatgccgacgacagctgcctatagtgatcgtcagacaattcagcctaggacaatataaagcatgaaggcacacccatcgaaactcacttgaaagattgttcctctgaaccaccaggtcttgatgggcgcggaccccgcgctctcggcaatagatacttcgctagaatcaggatcagaaccgggaaactttttctcatcgaccagctcatccgacagtcgggtggaggaagtactggacatggctcagaaaggataaaacactgagaaagctatcaaatgagagggatgaaacatcagggaaggttaaatactttataaactatcgtgcgaggaaagtctatcaccgagtccttgagatgctgaaacggtatagatgtcgaatatcacgccatttaaaaatatttgaatcttgatccggatcgccccgcagagttaatatctggtgttgtcagatgtaggcggatgagggtgcccatccacacatggacgcatcgcacgtttgaaagggacgtcattcaaattcaagaccaagatggcaacatcgtctgttgttcgataagcaaacaccacaaggtggtagtcacaacattcatatccttcagagattgaactggcgcagattggcaaaactcggagagagtcaacaacacctcggacatgtccaaatctccgtccggttgactacagccagccatgttacgtaacgtgcagaatcgaccgacggcgaaaagaggatcatctcttgttcattcacatctcagtctagatagtctaatcttccattctccctagccaacatgtctctccgaacactccctttgaaattcggactaggtcgggtatcccgttccacgtgtcttcattctcgctcgatagcatctctttcagccgcttctttaccagatatcccagagccgatcgacctcccttttgaactagccgaaccaaagaacagaacgtccgacgataccttggtgatcgcacatggtctgttgttagtatacctcataataggctcgtagtcatcttagcgcctatctcgcctcatatacttactagacatttggtttcaatacttagcggctcaaagcagaactggaggtcgctcacaagagctttcgctcaagaactagggatgcccgtatatgctattgtctgtaggcatcctctcttctcttttcccctttagacatccgtatcctcaggaatagtttgttgaatgagcgagacaacctttgtgacgttcattcaggatttgaggaatcatgggacagctcctcatgcccatcctcatacatatatggcgtatgtgcccgtttctagcgttcataacagtcgaaagagaaaggcagctctgacgatattttctataccggccgacattcttgtcgtctcagtatggcttctgatgtgtataactttttcgagcagcagtctttcagagacaaaaacgtgcacctcatgggacactcaatgcaagtttacgatccgtttcattcgttctcggtctcttgtgcgcgtacaactaacctgctacatacgctcttttcctttctcttctcttttcaaggggtggaaaggtcgtaatgactacagcccttcatccccgactaaatcgacatctgaagtctctcatatcggtagacatggctcctgcgattggaaagatcagtccagagtaagaatctggttcttcagtctcttcttctatcatgtttccatcctccagagaagttgtgcttatcaaccggtcttgaactttgttgtattcatctcgtgatcttgaacagattctcaaaatatgtcaatgggatgatccaaatcgaatctgaagacaccaagtcgaagagcgaagccgacaaaatcctgagcgagtacgaagaggtacgtgctatctctatcgaagttacctataaccatgctttcgattagagttcgaggtcaattcttacgcaaagatgatttacgttgtcatcttgtcggcgcgtaactatgcaggccttacccgttcgacagtttcttctcaccaactctattctgaaggacaacaaggtgacattcagagtccccctcgagctcatcaaggaagcaattcctgccatcggtgacttccctttccaggtacgtctttcccgtcaatcttttcatgccagacaccgttctctcaatggttgatgcccatcctgttatgtcgcccttctgctctccttcgcgtctcacagcctggagagatcacctggaacggaccgacgatgcttgttaaagggacccggtcaaagtacatcaaccgacacaacatacctgtagccgaacagtttttcccaaatatggtgttgaaagaattggataccgcgcactgggtgcacgccgaaaagtaagcgttcatacccattctttgttcgatggtatctgatctccttgtctttgctgacgtccatcttttgactgggttaaacgtcaactgtagaccgagagagtttctccgactcatttccacattcgtcaactcggtctaagagctatgtatgaccggagagaatttgatcactgtgtatcgtcaccagtagttacgccaaatcatcgcgtatagaggtttgcgtatcttctgacttgcagccagatgtaggggttaaatgatccgttacataaatgtgaattggggtttctcgtccaaacgccaacgcgtattcttatcattcaactcaatacataatgacagatgaacagaaaaggagaacagatgactacaaatctaataggaagaaaaaaataaagaattcgcatttctataccaaccagaccaaactcgcgccatcatctccagcggtaacgatcgcggatttaccctctccaccacttccgacggcaagtgcgttgatgacggcctgatgacctttgtggtgtgcgataagtgatccatttcggacatcccatgttttaagagtggcgtcggccgaggcagtggtaagcaagtggttcataggtgcagggtggagtcgaatggaggtgatagcctgttcgtgaattgatgagcccccgaaaagataacaaaatctcatttagctatggcggtgtacaccgatactggggtcaagtacgacgacgatttagagactgacctcagggtgctccaacgtactcctcaaccttccagtagtaacatcccaaacgaaagctttcccatcagttcccgcgctaacaacaacaccgtttcctgcgatatccaaaaacaccaaactctccacactctcttcttccttgtgaccttggaatcctctgacaacctctgatttgatcaggttgaccactcggattccaccagctccaccacctacgacagcaagattcgatgaaggatggatggcaagagaagttatcccatcagccaggttgaatcgaccgtccgtagggttgaatgtctgtgaaggggaaggtgatcgagggtcccagacaataaggaaagaatcagccgaggtggtaagtaaacgtttacctgtatatacagagttgcatcaagatgcgtggggtaaggtaagaaaataagataaaagtagttcaagcgcggttgttagtcgttgaaaacatgtgtccgtttgagatatgttggtcaggaaaagaaacgaaccatcgggcgtgaaagaaatggcggtgatggcatcggtatgtccggcaaagacttgcatggtgttccccgaaggaactatcgatttattcaggtatcaatcaatttagtcatacgcctcacgttgtgatcatatctgtggagagaaatcggaatagctcacgctgccacatccaaacagtcgtatcgttcgatccaacagcaagcactggtcctttaggatgccaggtcaaacactaatcatccaaatcccgtttgagtgaagagacaataagcaaatatattcaagtgacctgttaatgtgaaagaccaaggtcgctatgttttgagttcacttacggtaacctcatctgggccttctaaactggtcaagaattcccaattgttccagtcctcggttccgacccgcttccatactcttacccgaccgtccattcctcctgtcgccacgaactgtccgtccgagcctgaaaatacccaaaataaaatcccgagaatttgatcagctaattgggatggagcgcgatgccgccaagtttcgaaccacctggagacatgaacttactgaacgctacagccacgacagagtcagtgtgcccactcagttcaacgagcttttgtccattggcagtatcaaagatgtagcccatatcgtcctctcctccagaaacggccagagagggattagggtgtgccgggtggagagcgatgtcgaacacggatgaatcttctttatgcacgactggagagttcattccgtccatcacgacgagtgacagcaaagaaagcatacgagaaacaaggcgtctacagtcagccgtgaagtctctaagtgacaaaggacaagcaactatgaaactcgaagacttaccagcggcaactagactgttgtcctctcctgcgtccttctgagcggatgacccctcggctccttcgtcgaaatcaccatccggatcaaacaccatagtagttccatccgcgctgattctgaaatcttcttgaccgtagccctcacccatttcgagctgagttccttcaaattgatcatcaccctcgttctcatcctcgtcgctcatcggctcctcacctccatcatcgctctcctcatgaatgatctcctcagcatcttcgtcgttaatgtactcgtcctctctttcctcctgagcagacatgtttgaagggatattcggttgttgtggaagttggggtggagtttacagtgttggctgactgatcggaacgaagtcgctgataatataagtagaaaaaaatggagggtcagttgtcatggaaaccaacggggctcaacgggtaaattctgaatcgttcatccaggtgtcttatattcgaaccatcatcacctcatcttattcacttctatctttctcctttacagtatgcttcgtatagcagtcccacggagggcgctgtctgcatctgggaatactatcagaccgttctcaatatcatgtaatcttgcccgtggctcccggaccaccactggaggtaaaatcatgcagtcgatgcgaggtgttcgaaacaaagactgtgagttatgtataccctcttcttctatatgtttatctcggtacgccatggaaaatgtgtatgaggaatgcgaaggattgagaacggtctctctggttatcatcgttgctgtagttgcgagtgtaggaatggtcgtcggagtggcgaagaaatgacgttgtgcaacgaaacatatccgatttgatatcacgactccatttgctcagctctggtcgtggcgtagatgcacctgtttgaataagagctgaatctttcggttttccccttgtggccattaccgtagtgaagagtttaccagccaaaaaacgactggctccaaacttcgacaacagacgagacattcatcccgatcttcttcgaccggctcggtctcgacttggcaattcgacccgtcggcttcctcctactgtcaaggccaaccctctaattgtgggaagtaccggttcggttataacagccccccgaacgttcaaggcagtatcaaatgcaaagaaaggtcttgtcgcaagcaagtcaacccccaagcaagacttcgtctttcaagctcagccattacaacgaagtccacccaacgcgagcaagttcaaaagccatccaacgttaactggtcttcccatacacttcacaagtcctccggtcagaccgaacctggtcgcgtctgttgctcaatatttgaagggaatacttccagagtcggctgattcctcacttgtcgcaacgcctgtccaacgtctttccctgcagcactttttccctcaggctctcgacattgaagcttctgcaaatttcaaattgaagaagaaccctttagcgaaaccttcggaattcatccctcgaggtatgcgaccaggagcaaaaacactccttgcagcagaaactggctctggaaaaaccttggcctatgtattgcccataattcaagccttgaaggatgaagaagactcgggaaagatgatcgatgaggacgacgaggaagcgtctgcgacaaggcttcgaccccgagcgctcatcatcgcccccacccatgaactcgccagacaaattgactccgtgatctctgctctcactcatagagatcggctccagacaacatgcctctcttctggttccggctcgggtccggacagtggtgtattccgctatcctgaaggagccgacattgttgttggaacaatcaaccgaatcaaggagctgatgggactaccttcgaagaaagatcaacagcttgatgagcgagattcgaaacttgagaacgcggtactcaagaaactcatcgacgcggaggttgagaaggcgaaaaagtttaaagacgatgattggaagaacacctttaggggagcaaagtcgaaagacgtctggatgcctgataagagaaagacttggttagagaatattcaggatcgagagaatgagaagcgggccgcggagggtaagccagagtggacgctgccggtcaaaattccaaaaaggcacgagaagcgtgaacacctgagcctcgaaagagtcaaatggctggtacttgacgaagccgatgtttccttgggtaagcttgcctctgttctctgttttattcagcataatgacgtatgtatgtcagcgttcgcttacatcctgttccaacacctatattgtagccgagcctttcctcgaagatgtcaacaaagtaatcaaccctcttctgacgtcccctactccccctaatttcatcatggccaccgcaaccgtacccgaaacactctctaaaattctccaaaaagaacacccaacatgcacccgattgattacaccaaacctccatcgacttccccacaccctcgccctctctactgttaactggaccggatctaactggcgatcagacgttctgatggaaattcgacgagcattcgtcgaagatgcccgagaaggcaaagagaactctcaaacaatcgtgttcattaacaaagatggaagggcaaaagatttcggaagttatttgaccgagaaaggatttccaaatgtagtcatccaatctgcgtcaggaaaccgaacgaggggaacgaacaaacacattgccccgtttttggtcaacccgagagatcaacttgttgatcgagtgcgggtttcatcatccgttcctgtaaaagcttcttcagttggacttcagccttgggaggaaccgaaagccgagcctagaattcttataactacgggtgtcctgtcaagaggtttagattttgcgcctacggttgggacgattatcatgtgtgatgaaccaaagaacgctgttgacttcatccatcgggctgggcgggcaggtcgagcaggtaatgacggaagggtcatcatcttctctaagactactcagccagtcaagagagctggaggaggagcaggtcgaggaggagcgatgtacaagacagtacgttctttcgattttcttcctggtctttgatttcttatcaagaacctggtctcgttgatggattactcactgttcaccgttcttgtttcttcggcttgttacacatagatccaaatggccagagctcgtttcgaaggtcgaggcaaaggagctcggaagggtggaggagccaaacgtgctcgtcaggctcaaagatagatagccaactaaacaatatatgatgtatcttcatcaaccccagtaaagaagatatcttgcacgcatctgttcggatgtatttctcttaaggagtaagaatggttacgaggagatcatgcttgtctgattgataccgtcgtgaagggtgttctggcttgatagtgttcagtaccttcgtctaaccatgtatccgcacaatttgaacttatattcatctatactacttcttctagaacttgaagtggaacttctgtccaccttgaccttcaaatggatttcctccaccaccctgttgatggaagaaatgctcaaagggagaacctccatgatgggcgaaaggtgaccctcgaccgtgtccactaggttgagatgtgtcgttcggatcgtctccgttatcaaatcgggccttcaattctattcgtgtgaggaaaaaagtgaattgtatcagtcaaggttatacaggcaactgtaattgaacaagaaagaggtaggagataaccgagacaaagaaattaacctggattactaagaacttcgtaggcctcgttcacagcagccatcttggcctcactacctcctttatcaggatgagccgtcttggcggcctttcggtacgccttcttgattgtccgcgcgtcggcatccctagaaacatccaagacctaattttgttcacatttgagaaggaggaatgagcgagcaaaagttaatcagatatggtcattcttatacaccgacagacaggaaattgtatgaaacgtaccttgtagtagtccctaaaggttattgagaagtgaagatacaggacaaaaggataacgatgaagttgagacatcggtcaatgccaaaatgaattattgagcttctgatttcaattgtgaatcggtcttctgaacatactttgcgcgagagattttgagcaatctttgtgctttctgaagtcgattggcgacctgagaattgggcaacgcaaagaacatcatgacgacaaatcaggactgactgatctctgtccatcggacgtgagaatatcgtgaaaacatcaaaactcacatcctggttggaccttcctccaatctcaaatgccctctcgagaacccgaacggcctgttcccattcttcgtctttcagtaatccctcggccttacccacaaggccatctacgctttcctcatccatcagcagcacttcctcacatgcatccttcgccttcttaacttcacccagctggacatgtgccttgcacgccgcttcccaaagcgctagccttggtgaggagatctttttcaaatcaaccgacggcgggaaaatgccttggaaggatgattcctgatacttggccaagagctcgtcaaatgtggtgagaagagacggtttgttggccgtacctcgaaggatattcaaggctgctcgccaggaggagcccgagataaagttggtagattgagtcacttgttttgaaagcgctttaagctctttgaatgcttttttgcaaggcttggagtccggatcatagtgtaggcattgtttaagctggggtagtgttggagaggcttacatggtgatgagagaaagagtgagcagggtatcaacctcgggaatgatcgataggtggagaaatgaaacctactgttgatcaagaagtacgaaagagatgaaactttgatagctaagtctgctgagcttggatctaatgtggctagtcgactagctcagtccaaaggaacccggttagagatcttgtgtatcgcgatgctgctttatctgagatcaagaatgcttacgttagttccccgattccattgtctacgtcgcccgccccaaagtagcac

SEQ ID NO: 459 - DNA, 61177 bp, Xanthophyllomyces dendrorhous
gtagcaccccgccctcatttctctcgcttcgtgcaacagagggctgacctcgataacagatgatgtagtggaaatacaagcctcatagtgctttttagaaaaggatttccgagctgagatgagtgacttttcagcgctctttacagaatccaacttttgatccgaaccagtgagtttttcccaaaaacgtgtaacaatattaattcatttcgtgagctatgaggtgttaaataacggtagcgcgccaactctgatgaaagcaaccttgtgagaaagagactcacgagttccgaagcagctgaatctgacggattggaagccaaaaacgctttcagtgatttcgtagcagccgagtactgaccctccttggcctgtactttagccttctcgagataagcctgtacagtagacccagccaaacaacgttagcaccgtaggagtagtaaacagaaaggcatgaggatattggagaatcacaacgctgattaagcttatggcttgtgcggatgctaatcaatctgataaaactcaccttgaagaattttgggtttaacttgagtatagcgtcaaagtcttccacagcggctgagttccttcccaaagagagataagcagtcgctcgtttgtacagtgtcacatagctcggatcgagatctgttgctccatgaacaagccgaccatggtgatcatatataacgacaacaagatgacctttaatcagactgaatgcacagaagttatacaaaccatatagaaatattgaactgggcgcaccaaaagcttctccaaacagtctgacagcatctaaatagcttcctttgagtagagctgcgttgccatccctcaaaaatggagcagcctcttctatggacgccgcagaaagcgagctggaagccagaaggagcagaagaagggttggtataaacgagatggaaaagatggctctcatctggttgatggggttgaatactgacaacagagatccatcaatgtcgacagcaagaaaccataggaggaaggcgccacgtcaacaaacgctgctggtcacgtggttagcacaggtggtccgaatctgcccataccgcattgaggcgcggcccagattaatataacatagtgtacgtcattttgtgttggctagctgaacctgtactcttcatagcatcagtcccacttgttctcctataactccactctcaccaatcgacttcgacagagtacctcatagatctacacacacaggcagatatgacaagcttaatagccaaatcggttgggatgaaagccgccgagaacctcttccgaaagcatgtgggcggtatcgctccgagggatccactttacgaagaaataactgacgagcgaggtcgagttaaacgggttaaggttggtctcttaatggaattcgaatggaattatgaaaagaatgaggaagctgaatctatatttatacggctggaaaagagggaggctcctcccggtctatcaaaaagagatgcgaaggtgggtttcgttcaggtacatgacaagtaatttcctcgaaatgctcacttacggaattatcttgctcgtccgacagattctgcgaaaagtcaagaaaagggcccactatctggataaaggtatcaatttgtgtggcttccgagtaggatacactttcttcattggtttagtcccggtaagcacatctaattcgatcgaaggctcgccacaagagacaaagcttaccgtgtatgtattttacccgttgcacaggttgttggagacattgcggatgctactctcaattatgttcttgtggttaggaaatgtaagcttgggaggtaaacaggtcctctttaccgtctacatcactgatcgtagtgtcctcggtccatcttataacgataaggtaaacaagcagagcttccaccatggttggtgagcaagatgttgtttaacaatgctgtatctgccggagtagggtaagtgccttgatcggagcacaaagattggtcttggatcgctcacgtttttcttgatctgctccttctcaagattcgtgccccttgccggagatatagtggccgcagcgtggaaagccaactctagaaatgctctattgctggaagagttcttgacgtatgtcctatacatctcgactattccttgattttacttgtcatcttctcttaacaatcgaccatgtacctcttaaaacagtctccgaggtcaagaattattgagatcaaccgcttcgcatcaggcggcggcggtcacccctcctcctctggctccccgaccacagaccacgcaagccggtggcgcccatcatcaaagtgttttgagtccggagcaagtaaagaaagatatggcgcctgggtcaggcctcaaacatggggagcatgttaatactggtgctagaaatgagtcttcgaaaagcaaatggggttggggccggaagaagaccacgccagctgttcaatctgctggagctcaggtttgagcatggtatttcttgactctcgttttcttttcttttcttctctttctttttctatacatcccccttcatggactgtggcttttccgcatgcctagatacacgtttaatgttaatttctaactcagaaggatgtactacttttatctcatgaccgatacatatcggtctctctttggtcattcatcatacataatatcatatgtgttcgacttccatcgctaccacttatcaatatagtatccaatccgcaagaaggttatacgaaaatccatgatcatctctagaggcataaatcggattctagacattctgctggataaacctttgaggctatattgtttggcgtctagcattaattcataagttaaaagctgtgcaacactctaacctcgcttctcaatattccaccttatccccgttgcttagatccataacaccatggctcctaatactcgaatcgtgaagcgtggagctcagtcagtttcatagagctcagatatcctacgtatgcgaccgttataagctcaatgaaatcatttttatctttgtttcgacctgaaagagagcctgaagatgctgctgagctcaaacttggggacgagttcaacgatgctggttgtctacttgtctccgaggtgcaagtgttgttaaatcaacgagatcaatctcttgagagcggaaactcaatgtaagatcatttggcttcttcttcccattcactaatatgagtcttcttcggatttgatcatccgctctgaatctgaattatacttctctttgcttttcacctgactgggattcatgtggacgatgaaccatgaagggtttataccaagacgctcgctcacgtttcgcagttctctagaccgctggaagaggtgacaacaatcaggaggtttgttgtcatttgaaaccaaatgctgtttgacgcgtaaatccaacgactttaactaacgatgtatggatggctttgacgtttacacgtgggtcgtatggtgcacttcgctttccggataaacagcatcctcatgcgagaaggagacttgtttaaaccatttgagattgctcagattggcaatcttttgcctaaaggagctgaagaagccaagagtctgattccgtcgtacgtttgtctctccttccgacctgtgtagtttgagctaccatgtctcatgattccgagctctggctggacactgctgaaactgttatttgtttgtcgcctttttcttaccatcaaatatcgaagattaagcaaggtagatgatgacaagcttcaggggctcttggatgagctcatggtaatgaagcggggctcagacgatctttagaaaattgcctcttctttctatcgtacagaagatgtaccaacaaaataaatgctttatataaaaatgcgttgtacagtggaacgagggtgatcaatacggcacagagtcggtgctcatactttccttccaccctgtaacttaatacacgatggatccgacatattgaaagagcacggtaccgatgatggcaataactatcaggtcaaacaagattggtttacacatcagtcactgctctcaagtcgagagttgagactagtcatagtttaaagtgttcacgtactcattccggttgttttctccaagacagtgtggaagtacagagcggttttacctgacggaaagatagcaaagatggcaagatcagagagggcggagcattagacaaaagactatggaatccagatctgactcactaagaataaatgtccaaagtgcgatgacgcccattccaaagcctgttgctagcttttcaccaagctccattccctgagcttttccgtcaataatcctcttgaacccaggccagacaaggtccaggatcaacatcgaactcatggtaagaaggaagacatgtccagagatatcgtgaccgccagaccagtgaggtcggagctgttgaaagtgttccttgatcgactcaagccttaaagagttgatgacggcttctccgctgactggagcccctccgtgagcgatcgccgaagctgacgcgtcggcggcagctgctccagaagtagtggtggctgaggtcaaatagaacactagatcgtcccaggtgaatctatgggatgagcctccgtgacagaatccgccgggtatcttgacaagcgcgcctttgccgatcccgaccgctttatcgaaggctgaacagtctatggcgcctgtttgacaagccgagtaggggatcaccactccacactctcctcctgaccagatcatcgttctttcgaacagagaaggccctatagcccacaaggtgaggatgatccagaagagagtggcagttatgtatttgacaacagaggatcgtttggtgtgggttcgggtgcttgaggtgagagcaggagggggagacagggtgaggtgaacaatgtataccagagtcgtccacagccaggcttgcttagcaaatctagaaaatgcaatccagatgattggaattcgatcgtgtgttctgtgagcttttatgatcgaaccaaaagaaagcggagataaactacgcacactcggttgaagatgttgctctttttagcgaaataactattcactacaggcgtctcacttctaggtaaagttgttcccccctgttcaccaaggagctgagacgcgctagctgtcggagaggtagctgtagagtagacagccgagtagactgttccggatactacaacgaacaagatcaaagccaaagcaatcctctggggttgactgagaaaagagagcggataggggacaacactattcgctgatgacggcgatgaagacgagctgtcttgcacggacgagctacttaggatgaatccatgaccatatgttattagaattatgccagattactagccatctatacaaaaagaggacggcgaacgtacaccttttcatcctctgatgagcgagtgcttgcagctttggttcttgagcgaacgcccgaagatggcggttgtgacgtcatgatggggatgttggatccagggaaacaatctcttgaaaagtattaaaacgaatactgcagacggatcgatcgtggtgtacagagctgatctagttcagaacaaatggcgcagggatgttgtaggtgtatttgcggtggttggatagtacagggtaagaaaggtattgaccgtcagaaaaaagaaagagccccaagcccgatgggggtgtgacgcctttttcacggtctagggttagcatatttatctttctcaagtggccgtgtaggcttgactccaactatcacccgcacgcaatcacaatcccacaagctctttttatctctgttgaacgacatcagaaaccgatacaaccactgaatagatcaacccagctatctctatcaaatactacactatgaaactcctctctctttctatctacactttctccagcccggctcaggcaacgctagtctctcaggcctcggatctctccgaatattcgttcctcactaggggatccgtccaggagggtcttaattttctttcatccactgtcgccagtaggaccaccgatggccagaggcagagcgttcaagaaggtcagaacatggcaaacgtctaccgaaaggggaacattgctggtgagctcttccgtttttacacgcctcaatgtcctttctttggctccacttggcatttggcaggcttgtgtgtagtaaagctctgaatgtagtcgcggcaggtcgttaacgccttgctcacattgtttgttcatagccgttctgatatccgacaccgcctatcctgttcgagtgtctttctctctccttaacaagattttggacgagtacacatccgatcactggactaaagccgtcggggatagcaagctggcggaatatgttaggaaataccaggatcccaagcaggccgttagttttctcttcccagccctccccttttttccaagaccacgaggttaaatggtttctgactcgtctatgttgtctcatacaacaggatactatcatgaaagttcagcaagagttagacgagaccaagattgttctggtgagcttagccgctgctttttctgctgtgccactcttcgatcacaactaaacgcgtcgttatgtgttctatacagcacaaaaccattgagtccgtcttagaacgaggagagaagctagacaacttggttgagcgatctaatgcactcagtgcccagtccaagatgttttacaagacggcaaagaaggttcgtagctcagacgcccatttcgaaaactcccacacgatcatatattaatctgatgctggttatggttaaactgctctgtctggtgaatgcacagcaaaactcttgctgtatcgtcatgtatgtcttcttctgtatcctggctcctcttgtcattctgctatagcgatgactgatgatggattctctcttcaaataggtaatcgtcttgcatccaccagatgatgaatcgcaaaacgtctttcgttactttctgtctgtagatcactccagtttccaattgtacgtgacttgcgttgtgcttcctttatatatatcatactcctctatgtgcatcaattcttcaaactgttcctcatcttatcggtagcatcctttatcgcacttctctctttctccctttattttcttcgtatcgcgttttcctctctatcaggcttacttcttccctaacactatcaatctcattaatgaactagcctgactaaatagaagagaagattaggcaggtgaagtactgaaatgcttgacagaggcaactgacctgattagctgtcatcgaacgcactgacctctcggtcgagactgatgctatacctgtcagatcttaatctgtcgtagactttacccttcaaatagttgacacctactcatccgtcaaatctctctctccctctccttttctttcttttcaagcagtccttcatcgctacgcaatcttactcgctttcaacacactattccaagatggttaaagtaagtttttgttatggtcattgttcttacgtcttgtgctgatggcattcacctcgctcatcaactcttacaaagacaagcatatgggaacggaagggaaagtatgtgacagggccgactaaatactcacccatcaatatacactgacctgacgtcttgagtattcatgcgttagatatggctttctatggtacggagctcatgtgttgttgtctacatgtactagataggcatctgagaacttggctcatagcttcctttcttgttatgagaacacaggctagcagcgactgttggatcgactgtatgctgcctgatcgtatcgctggagtctaggcttttctcgtgtgctgattgatcttctaattgcttgaacagaatcgtagtcttcctaagatacagcttgtcaaaatcaatgtgtctgaagtatgcagggaaatcgtgtcgggtgaagcccaaggtccagattccgccttaaagaagattaacgacaaggattctgcaggcaacatgcttgagatcgagatcgatcgagttgggggaaacagaaagagagctagtctggatggcaaacatatggggagagagaagagaagtcgagtgatcaaggaatctggcagagtggttactatgggattgaggctgagcgcaaatctgttgcttggggtagccaggtatgtctatccagatcagcggtggatgaaaagttggctgacttgaatgtatgcatgcttttacacgcattgtgaaaacatagagtatatgatcttcaggtacaagctacaaatgtaagttttctagattgcatatcgctgttttgagcctattgaaaacacggctcggctcatagcaagtttgggctgttacagaacgatgcgtctcagatgtatctggatctacgctctactttgtacgatggtctcaaaagcccctcgaaatcgacaaagaagggaaaagacggcgctgttaactttgactcaactgaagaaaagtacgtggcctactccttattcattcaaatggtcgacacgaatgtcaactgatgatcccggatacatgcgctgtcagacctcacaacctcgaaactcccaatgaagatgcactgggagttggattggagttcggtctggcccatgtattggaagaagatgtcggtgcctcaaattttgttacagagtctttgtgttcatccattgatttttgatgattaatacaacttttgactccctaaggattggggcacttggagaaacgacgagaaccatctacccttctctggaattgtatcgacctctggcaacagattcagagctgatcatattgacgatggagatagtgacggtatgttgtcggaagtatcaactcaaatactcgttctgatcctgatagctttgaatggtcctttaacagaggaaattcctcgagcacgaggggctagaactccggatcgtgaatcatcgttcagactgtaaatccttcaaagcttaagagtaaggatgtataattgtatctgacccgacgaaggggagatctcccaatatatatcagttttagaggagcaagctcagatttaatcaaccaagggcctggcagtacttctcagggaggttactctgaatcggtgaggaaagttttgggcttacaaatttccacatgcaactctttagttgactctgttttatcgactatttcgatagaactttgatccgggtatggatttggaacttggcttggatgatttactcgaagatgatggagaagatttcgattttgagggtactcgatggggtttgtctggacagaagagtagctcccccggtttggatggacttgaaaacagtagtcttcaggagtttatgggagagggcttgtaagttgtgtttttgcatccagttcggatctatcgcatgggtcgtacgaattaagactgatatcgcagatcatgtcattggcagggactacggctatatgacggaccgatacgatcagggaaatcagggcatggatgatatgccaatcgacttccttgacattccgggagctcctgtagttcccggtctgcctccaattcttggctacaagagatctgggactgatcggttgaatagcgatacacaggaggtaggttccatgcgctatcatagatctgtatcttgtatcaggattctgcgcaaagctgacatctatgatgagaaaacttcatcatgttggtaaacagcagcccaaatcgatcttgaagcgtgcggggcagaagtctagcaagaagaagagagttaaactagtcgttatggacaagaagttgaaccacaccgacgccggttagttgttttgtctacatatcccgccaagatagtcaactcatcacattttcctatggcggctgagtagaaatccaagaatgggtaagttgtttttgtttctcctcttgtatggacgaagaaatgctggcgttacacctcatgcctaggctgatgtcgacatgtcgtactatcttagaggaggtcgtatgtgaataagcagatcgagcagaggtaagaaaaatcaaagcttagcaaaaacacgagtccttgtactcaactcggccatgttcacattcaggtcactgaacaaacagcaagaagaggaccgtctggcacaaaatcgtgttcatgagcttctcaatggaatgcccaagattttgggatgtacgtctaacgcgcatcatgttatgtcatttgactagcaactaatttcagtttgtttcatggtctagtacaagacggaggcttgattgaattagttcttggtcagcagaacagaaggagacttttttctgatgcatacgaaccttgtgagtcctcagacttatcctcgcccaccggtttccatcagcttatagacgaatgttcttatcgtttttctggtgtgagagcagcaccaaagagacctcgaacacaacatgcagataaaaccgaacgccttgaagattgttcggaggttggaagcgagcatcaatcacgcgttgagatgcggccgtatcaagtgcccgagtttgctgatgaggaaggcatgggtatccaaggatacgattactatcctgaagacagaaacgatcagggtgaagattatatgagcttgaaagcttgtacgtctttcccgctcagaatcaatctgaataacgatgtcagatgttcttacgaattgtcgttcactatttaaccacgtatagatgaagaagtgagtggggttaactacattttactgtcgcagtcgacttacgtgtgattacgacacgtctaccagatcgatagaacaattttttcttcagaaggtgacgtcggaactgacctaagattgagagtaaggacgagttctgagctgcctgtaagtattcagaactatcatgatacctttaacctcgctcatactccttcttcttccgaaagtgggatacatcatccagacaaggtagaggttcatcgatggaaggtgttgaatgttagtacctcatagctttccctgttgtattcctcccttctattttagagggctaaacaaagatttctcatctctacagttgaggctcctggagggatgccttcctcctccgcgggttatctgagtagtatcgcagactccaaagtcgagtaagtactctttagtcgagctctatcttatgcgcatgctcatatttaatctttctgtatagtgtctttgtcagtcgacctcatagacggatgtcctctattatgtcagctccttgggtcaacggattgaacgatgataatactcagaatcagagtcaaggccagagtcaaggccagagtcagaatacaaagaggcaagacactcaaaagtctctctctgttctcgttatgtgtggagatactgtttaataaataaaaacttactttatgatgtttaatcaaacttgatttcttagcttttttgcgtgagttcttgtatgctggttttgtattttcaaagcttaccgactattcgtttctgttgattttgtatgaccagctacgtccaggatctgttggatgagcttcctttgcgttctcattctgtatcgcaaaagccttctggtctctctatccctctctcaacggttgttcctatcaagtcttgtaccagagctgtggctgcgaagggattctatcaagtgcttggttagtagagctacactacttctatctccataggatctgagtgttgtttgccgatgttaactgaaatatcatctgaaaaacgaacgagatcagtactgggtactaaggatgtcgttcatatctctcaaccaaaagactttggagatatttttatcggtttgaagtgagacactgtatagatcctcggtgtatatagctttgttttatatgagttatgcaacatataacatttgtcttctaggtgttttcttttgctctttctggacgctctattctctttgtcgtagattagtccttatacggatcgacattgataacatattgagatgcggtcgtcggctgttcgataccctatcctaaccggttattatccgagccaatacgttttgctctttttagtctgtatacgtcattcatggcgtgtataattgtatcaaatatccgtggcaaatggatcgaagtccgttttggtcttgatccacgatatacctctcagtccaacaaatatctctcctgtaccatgtcttctcttccttcaacacaacaagtttggttccagaccaagcgtggatctaacacgaatgccatcgagctcaacactcaggcaccgatccctgctctcgagccagaatttgtgcttgtcaaagtccactctgtggcattgaatcccgtagggtacaagatgatgccagcgctaccttcgtttgcaagaaaatatccttgtacgtctcacgtgggatgtgtcatgtcaaaatcgataggtcggatgagcgataagagtgtgtgctggctgacttcatttcgtttttgcggggcttctgatactcaatagccattttggagttcgatcttgccggaacagtggtcgacccgaacggatccaccttcaatgttggagacaaggttttcggtagtgagtgacatctttcgcgggtcagtcaagacggcagatgaatgtctgatctgcttgtttggtcgtttaagtctgcccggccgatgacaacatcaaggatggaaagggtgctcttggccaatacgtcctcgtcaaggttaatacatgcattgatgatcgtcacccatatgtctcgtagaaatatgggctaatggcccttctttctcctttgtacaggctactaacttgactgcgaagcccgacaacatctcttttgaggaggcggcaggaatcagtttggttggattgacagcctatcaaggttcgtctgcgagctccttagtttgccattcgacaagccgactgatagatgtcgattcggatttacaggtgtgatcgatcagtgtaaggttacctccggccagcgaattttcattagtggaggaaactctgcggttggacgcatggctattcaagttgccaagatcatcggggcgtacgtagtcgcctcctgttctggtaagagtgcggccaaggtgaaagcacttggagcggatgaggtacgttccttctctctagatcgcgtatagttgagctagtcttccgtgaggattaatcggacactatctttcgttttcatacatttcacggccgcttggtagatcatagactacaagacggtcgacgtggtttctcatctttccagtcaatatgcgtcgcagccgtttgatgcgatttatgatgctgtcggctctcctatcaaccttttctcgagctgcactcctttcttgaaacctgagggagtctttctgtcgatcggagtgatgatgcccaagggtgtttctcaatatctcagcactggagcgtccatcctcaacagtgccatccggcccgtttggttaggtggggtgaatcgaaaatggattatctatctgaccaagagtaataaggaaaatcttgatgcactatccaaatgggctagcgagggtttgttcttcaactctacacaatggcggtcttctttcattgagcaaactctatctaactgttctccaagccatcatcttttatggggatgacccaaccgattctcaggcaagctccatagcgatgtggactcaatccattcgtttgataaggccggtgttcttgccgcatacgaccggattaaatccaacgaggcgtcgggcaaggtcgttatcaatgttcctcaataggtgttttacgttgggtgtaaatgcatatatatatatgcatgtatgcgtactatgtgcctttccgtattgtgtgcctgtgcgtgcctccgaccttgtagtctaatgatgagatgccgaataaagccatgtttaatttgaaccaaatccacgtgtctggatgcgcagcaaggtagacacataaccatccccaccaatttcatccacgtaaccccatcgatcggtgtttcccggagaatgccctagggcagttcccatggttacaaccatctggttacatcccccttcccccggggagagaagccttccccagcggaatgaatattcccccatcccatttgatgggatctctagcaaatagctttcaatccgtttcgtcctctcgaccttctttctttctcgttctctccttcttcctttcttataaaccttactcccatcacccatctctctctcgctctactctcctcctgtttttctccctttttctttttagttcaaatcctccgcacaatctctttgcttgaccgaccactacatctctgtcggctcttcgttgtttcttttcctcgtttggcatttgatttccttcacctccttccgatcttctccttcttcttggtcatcgtctgtcttaatcaaccgtcatgagtgccatcgtgagtcttgttctatcgcgagcttgttgtattttgtgtcgagcttgaggagaaatatcttgtcggaggatgtgatggctgatcgctcaaatgtactttctgggctgcctgttattttttccctcatttttttcccgttactcttttggtaattcggccatcttccatcacttcatctgcaactttctattaggccaactacttttcgtcgcaacagaccgagcccactcgacctcttaccattcagcttggtcccactcgagtatcaatccctgtggagaccaaggctactgatgcttgggtggctgctgaggtgatgagggaggaatttcttttggcacaggagggcaaggtatgtgttctttccctcctaccgacttgtgttatcacgaaaaatcttgtctgagtgcacacgctaacctgtttgtatcgttgtatgtgatgcgcgccttaactaaaactgaaaatgcaacaggatcttcctgaggccagtccaacccacgatgaggatggcaacgccctgcctgtctctaaccagcccaagatcgcccttctcgcctcgttcatgaccttctacacctccaaactctcctccagctcaagttcgacaaccagcgcctctgagacctcggcatacgatgtcctgctcgcttccttcgctcacttcaccgaggccttcctcacccttcccaatgtcgacgtccattcgcttgttcaggcttacgaccctgactcgcggaaggagatcttgagcgcctacttctcgacactagctgccttagaggctaaattcggaaagagtggaaaggtccccaagcagcccaagagctggctgttcgaggctgccgagaagggagaggctgaggtgtatgcgttattcggaggacagggtaccaacgaggttagtcactttttcttaacgccatctccctgtgatggacatcttcaatgctcacatcgcccacttctcggtttgtaacccaaggtttacttcgatgagctccaatccctcttcgatatctaccgaccctacgtggctcctttcctatcggccgccactagcaaagttcttcttcctctcgctgctcaagccaccgaggctggctcctcgtactacacctccggccttgacgtctacggctggcttactggcgccactccccgaccggccgtgccctaccttgcgtccattccactttcccttcccctcatcggtctcactcagctcgtgcagtacctcgtcgtttgcaacgtcgcggacaagacccctggagagttccgagcccttattaagggtgccaccggtcactcgcaaggagtcgtctctgctgtgtgtgtcgcctcctcggattcacttcaggacttctccgaacgagctcttgctgccgttcggttgctcttcttcattggaaagcgaggtcaggaggccttcccgcttctctctatcgagccggctattgtagacgatgctgtggagaacggagagggtgctcccactcctatgttggccatcactggactgaccttgaagtctctcgagggacacatcaagaagaccaacgctcacctcccctccgactctcagctctttgtgtctctccacaacggacctcggaactttgtcgtcaccggtcccgcccgagctctctacggtttggccaccgggcttaggaaggtcaaggctcctgctggacttgatcagagcaaaactcccttctcaaaaaggaaggcagtgttctccactcggttcttggtcgttggtgttccctaccacagctcgtatcttgaaggggctaccaagaaggtcatcgagcaggacttggctggaaaggacttgtttgctccttctgacctcaagatccccgtctaccacaccgagagtggtatgtctatattctccactcacttcgtttcatggcatattgactgatgtttcgctccctgcgactgatctgacaggctccgacttgcgagctctctcgacctccttgacttcctctctgtgtgatcagatcttcacttgccctatccactggaccaaggctaccgcattccctgactcggctactcatgccattgactttggacccggtggtgcttccggtattggaccgttgacaggaaggaacttggagggtaagggtgtcaaagttgtcgtccccggcgagaagggaaagatcggagccgagatttactcgagaattcctggtaagaaggaggccaagtggtctgagaaatggggacccaagttggtcaagactcggtaagttggaatctcgtccttgttttcttcatctgcctcttccttccagatccatcgtctgattggaattttcactgctgctatacagggacggaaagattcacatcgatactccgttctcccgaatgctcggaaagcctccgatcatggttgctggtatgactccttctaccgttggagccggattcgtttccgctattctcaacgccggttaccacgtcgagcttgccggaggagcccactacaatgctaaggctcttcgagccaaggtggctgacatccagtctcgaatcaccccgggaactggtatctcccttaacgcactctacatcaatcagagacagttcagcttccagtaccccctctggcaagagatgcgaaaggagggacttcccatcgagggtttctgtgtggccgctggtgtgccgtcttctgaaaaggctgtcgagatcatcaccgctctcaaggctgccggaatcaagcacatctcgttcaagcccggaagtgtggagggtatccgacaggtcgtcaacatcgccgctgccaaccccgatttccctattatccttcagtggaccggaggtcgagctggaggtcaccactcgtgtgaagatgtccaccagcctatcttggccacctacggttcgattcgacagcaccccaacatctctttggttgccggttccggtttcggaggttccgaggatacctggccctagtgcgtttgtcatgttggatcttgtctttatgcttcttggacgtatgctgactccatcttttgtcctctatcaactttcatcttcttatagcctgaccggagactggtctgttgaacagttccaggctcagcccatgcctttcgatggagtcctcttcgcttctcgagtgatggtcgctctcgagtctcacacctctccttccgtaaagcagctcatggttgatgctcccggagttgatgattctcagtgggagggaacctacgagaaggagaccggaggaatccttactgttcgatccgagctcggagaacccatccacaagatcgctacccgaggagtcaagctctggaaggagttcgatgacactgtcttcaacatgcccaaggagaagagagccgcttggttggagagcaagaaggactacgtgatctcccgactcaacaaagacttcaacaagccctggttcggagagaaggccgacggaactgtcgtttccaacatcggagagatgacatacgaggaggtcgcccgacgaatgattcgactcatgtacgttgccaagcagtcccgatggatcgacatctccctccgaaacctcaccggagactggctccgacgagtcgaagagagattcgctggtgtcaacggaggagtcaagcactctatcctccagtcttttaactctctcaacgacccccttcctttcatcgacaccttcttcaacacctaccccgccgccaaagagcagctcatggccgccgaggacaaggccttctttttgaacatctcccagcgacctggacagaagcctgttcccttcattcctgttttggacgcttccttcgaagtttggttcaagaaggactctctctgggcttctgaggatattgacgccgtcttcgatgccgatcctcagagggtctgtatcttgatgggtcccgttgcgaccaagtactgtactcgagccgacgagccgatcaaggagatgctcggtggaatcgagtccgacctcgccaagaggcttcttgatcgatactactctggagatgagtccaaggttcctaccgtcgattacattggtgccaagcccgctctcgttgcccccaccctcgacggtgtcaagatctcgactgagggtaacaagaccgtctaccagttcggcaaggcttcttccctccctgccaccaacgactggcttgaagctcttgctggtcccaaggtcggatggttgcgagctgtccttgcctctgtcaactacgtccagggttccaactatatctcgaacccggctaagcgattgtttgctccccgacctaaccagcgagtcgaggtcatctcaaccggaactgagatcacctcagtcgtcatctatggaagtgcccgatccttcggtcctcacccggccgatttcaaggctctcgatcttaccttcgatccctcctcctcccgtatcaaactcaccatgttcgaggagcgacgaggatcgtcccttcctttggtcttccagttccagtaccgacccgacatgggtttcgctcccatccacgagatcatggacggtcgaaacaagaacatcaaggacttctactggaaggtctggttcggagacaacgagagcctccctgatctcggattgcaggagaccttcaccggacctcccaccgagatcaaggttgaggacgtcgaaaggttctgctcgatcgtcgagaaccacggacaggctttcaaggcttcccagggaaccgaagcccaggctcctatggatttcgctatcgtcactggttggcaggttagtctttagattaaacttaaaatctggacacgtagacagtgtttacaactgaccgcgtctattctatcgtataacaggctatcatgaaggctatcttccccgctgctatcgatggagatcttcttaagctcgttcacttgtcgaatggattccgattgcttcctggagttgcccccttgaaggtcggcgagatctgcacttccgaggcccgagtcacttccgtcgtcaacagtgatagcggaaagactgtcaaggtccaaggttacgttatccgagatggcgagaaggttattgaggtcgaatctgctttcctctaccgaggccgattcaccgacttccagaacaccttcgagtctgtcaaggaggtcgactactctgttcccgtccttacccagaccgacgtcggagtgctccagtccaaggagtggttccactgggatgatgatgctaccccgcttgcccctggtacgactttgatctttaagacgactaccgacctcaagtacaaggacaagacctccttctcctctgttgtcgtgagcggagcggcctacgtcaggaaccagattaaaaacctcatcaaggttgccaccgtcgatctcagcctgggagaagctcaaggaaaccctgttctcgagtacctcaagcgacgaggagctcctttgggtttggacattcctcttgagtcctcctactctcttgccaccgccggttctctcaaccagttcatcaccccgtcgaccaacgagccctactcgaaggtttctggagactacaaccctatccacatcaacccttacttcgccgactttgcctctcttcctggaaccatcacccacggtatgtggtctagcgctgctaccaggaagtttgtcgagacggttgctgccgataaccaccccgagcgagtcattgcgtaagtttattttcgtttcgctatatctggttctcgtttatgactggaagactgatttgtttcatttccttcgacaatgtagttacaaagtcacctttgtgggcatggtcctccctggagacgagcttaccgtcaagttgtcccacgtcggacagaacaacggtaacaaggtcgtcaaggttgagaccttcaaccagcgggacgagaaggtcattgacggaaccaccgaggtccagcagcctcctaccacctacgttttcaccggacagggttcgcaggagcctggtatgggtatggagttgtacaactcctcgcctgctgctaaggccgtttgggacgccgccgaccagcacttgttgaaaacctacggtttctcaatcatcgacattgtcaagaacaaccccaaagagcttaccgtctactttggaggtctccgaggacaggctatccgggctcgatacatgtcgatggagagtgaggacgagcagggcaacaaggttcctctcttccccgaggttggacctttgtcgcccaactacaccttcacctcgccgacaggtttgctcaacgctacccagttcacccagatcgctcttgtcaccgtcgccaaagccgcgttcgtggacttgagcagcaagggtttggttcagccgcgagctcctttcggaggtcactcgttgggagagtacgccgctcttgcttcggtggctgacgttttgcccatctcttcattgatcgacgttgtcttctaccgaggtcttacgatgaaccgagctgtagtcagggacgaggccggtcgatccaactacagaatgatggctatcaaccccagccgactgccctggtagatgccgacagccgaagattgtcttcatctctttccttgtatctagatctttcctcttatctttctcttcgtctaccgttttcccatatttctcctcgtgcagcattgcttggaggcaaagctacacatagataattctctttcctctttccttctttttcttcttctttcctttgttatttttcacgaacttgcaactctcattgggcctctctttccttttcttttttccctcctattctctttattttcattaatttccctctgtttgtcttgcaaaaagcgtaacaatggcatctttgtcgctgatcaagctttttcttaccttttcttatgtctcacaagttctgacgtgttgaattatatatggttcaagaactgttctctcctctttctggataaaaacaaggacagagcttgaatgagaaaagatacaagacatgagattgacatttttcgtaaaagatagtgagagaagtgtattaaggaaatcgggacgaaagtacaacgaacggaacactatatgactttttgtttcttcgatcttttgcaaacgatgaagaacggtctagatgtacactacttgatacgaggcacagagtggaagtgaggttttgcgtaaaataaatatgaagaagtgagaagaaagaaaagagctacaggaggggcgtgaaagaaacgatgattgggaaggcccttccccttctggttaagcagcttgaatgttgacagtcgactctacctccttgctcttcttctcatccacactactaaactcttcagttccctccgatcctcttcgatcgggactgacgatcttgatctctccttccctgttaatgtaagacatggtagatggcgagagaacagggtcgtcgtctgcgtagatcgctttggggatatgagattccggatcgggaaaaagtttcgagaggctggtgtagatcacaacggaggctagcgtgccaaagagccaagtgaggtcatacaagtgtgtcaagccagtaccgatggcgatttctggactgatggtgttgatcaaaccagggatggttggcgcgtaggtgatagccatcgtcaccagagctcgccagttgaaacccttagtgtagtagtatcttccgtgtttaccagcgtacaaactgggaacatcaacctttccttgtcggacctggttgagtagatcaaggcacacaagacccgatcagtttaactgtaggcgccaagccatgattctgtaggaaatgatataaaatagctcacaaggtagtaatctgcgatcaacataccgaccataggcgccaagaagacggtgtatccacccatgaaagccaaaaatctgagcgacaaacaccatacaagatcagtttgatatcacagacttgaggacaatagaagcgaagacgataggcttacttggctccagattccatgatgttccaaggagtgattgcccatccaccaatgaaggagatggcgatacttccccgtcgaatgttgaaatacgtcgggaagagggaggtcaagtctgccgctccagagatggagttagcggagatgttggtacccatcgaggcaaaagcgaaggcaaagccacagaagaatcgagcagcacgtccttttgcgtcatcgtcaaaaagatctagaatggtcaacggattccagatgatgtcttgattgtagatcacggaagctcccgaagagacagtcattccaatgaatgcggccatggtaaaaacgacagggatgataacgagttgaacgtattgcgctttcttgttggtagcataacgggtgaaatcaggactgtcaagtgggatcgaaggaaagaatgaaaacggccaaaattattttactgttcttgagctgatgacacctcacgaagactgaaagggatatgtacatgttgacagaaagagcagtgtagtttccgagaacggaattcatggagctcatgaaagcccagcccttggcacttccggagagcgtggccttctgcgtaaagacgggtccaactcctgcctgtgataaactccagatgaacaatccgacgaacgcgatagggactgtaggtcgcaaatgaatagggtcgaagttgttcatcagcgtgtcttccttcttccctttgagagataacagattctaaagacgtacccatgatcgactttgcgaggaagaaatacttgatcttactgggatggataaggatgaagggaaattgtagaacccagaagataaagtagcaaagcaagccgccggaagtgatgtttgcagagtcgggaagactgtttttgtaatcccggaaggatggcgaactacagtacatgatggttgatctgtcagagttgcgacatacagcggaaggttgtatcgatttttgcggtggcgaactcacagagcaacgatcatagcgtttacagattgcgatccactgtacgactgaactccaaacctgatagagggagaacgagacgttcataataaggaccgaaagctgagagagtaggatgcgatagaagaatcaactcaccaaacacatgccaagatcaatcgagacaacacagcaaacttggaaaggtggtgcccaaacgacgaccgagcctgaatcgggaacggcgttcgaagagtagctccggtctagaagcaaagatgagcggcgcataagttagaccctgagacctcgagaaaacagactacgaagcgaggacgaacggatccttggagggtgatgggtatagagatgatcacgtgaccaagaaagatacaaggaagtgtcgttttgaaatcaagtccgagagacatgatggacgacgccatctcccaggtgggaatgttaagcgcatcagcgaaccagaaagcgatgtaggagccagtagtccatgttcggtcctgagaaatatccaaagaaaatatgccagtagttagatggaagaagtcaacatggcaagaagaggatgagtgacgaacctttggcaatgtcggagctaaatctcgatttgagactttgatagagccgtaggtgaactcttcctctttgactctaagcctgttgatgtcaaacttcatcttgagtgtgtgtattgaggaagaacgagtggaaaagatttgagttgaaaatgaccatcttatgatggtatgtgtttatatgaagccgagtactagaattcataggcagatagatagataagctgattgtccaacagtccagaaagaaaagatgtaaaaagatttcctcctcggctccgagtgggaaaagatttcgaagaggaggctgaaggacggccaaactctgaccttggctgttattatctggcctgataaggaaatcacattggaaagagtactgagtgtatcgcggtaaccttcatatcaaacccaggcgttttagactggttgctctcaatcggattccgtgctaaccggtgaggtcggccccgatactatcggtcagtttttctttttcaatctatatatacaaaccgaaagattactttggaataaactcttcaaatcagaaagaaaagagagataaaaacaagttaacgaaggaacacgactacagatatagttgatagttcaggtaaagcagcaagcacgcgaacagaggagcagaggtcaatgtaattcacttgtggcaaccataggattttcagataacatcactatccaggcgcagatggatcctcggcttcatttgcactccactcgtagtctctacttcgccgctcgtcctttcattgattcgaccagcagatatggagcagaggagacaaaattctcattcacattcccatgacggacagacagtccccatcttcaatctctgtatctgccagtgtatccgtcccgttcaatctctctccatcgaattcgatggataaccttccgatgagatgttttgtcaaaccaagctttataccgtagtgcttcaacaacgacgacaccttcgagctcgctttagccatgaccctaacgtcccctcctgtacggcctcgaaggacgatctggatgccttctgctcggacatcgtcctcagtggccttgccgttgtcatcgtcatgaactgatgatatagacatagagtgttccttggacagtccgtagatttctcgagatgtgcttgaccttttagactcgattgacaaatgagagcttgggttcaagccggcgttgagccgcggcgaatggaactgccgagtctcgaacaaatcacggccgtcgtcgtcctcatcgtgatcaccaccgtggccctcggctcgcacaagagacgcttcttgggcttcttgggctatacgctcgatgtttcttctacgttcctcctcaatctctttttctttgacggtgtagatgtcttttcgatagccgactgtacatgtaagaatgagaaaagccggtttgacaaatgattagggttagttatctgtcgttttttctgcccattgagacattttgcacatacccatctcggcagaatgaaagattcctaaagtatcaggagtagtgctcgggtagacccgtttgccctcgtacgtgattaccaaaggttccttgtatcctttgcgcttcgctccttcatccgtcacgtcaaacagcgaatgaaactagagagtaggcacatagtcttcactttagtgtcaaatgttctcttgaacacaggcaagatagagagacacacgccaacttacacgatgaacggcgaataccaacggtttctcaaacgcctggatcgctctttcagacacactccctgccggatgatgggcaacgactttcaatctaatcgtcacatcatccggcgcgcctatagtcagcggattcctaaccaccaccggtggcgctggcgtcgctgacaatcttgatagatcagacccggtccatgctggctcagaaataggcaaagccggagaccgtttcggaggggtgagtacaaactgaatctcttcgtcagaatcttcgcagagatcgactctgttggaatgcttgtcattccgattgggttgtgaaagagatgaaggcgcttcgaggaactcaagatcggaatcagaatcagcaacaagaggatggcgagttgctttcaacaatggatttggattatcatctgctagcgcgtttcttgatcatccaggagtcgagagggaggagaaaggtcaggctgctgtgaaagaacaacgcatgcacagagagagattgactcaccgaatcacattctctactcgatggtagatcatggcgtccatctctggcggaggagtcaatgatattgaccttgctcgtcgaccttgcttctcgcttttcagcagatcatcttcgttccctccttcttcgtcgtccgatagccgtcccttctctttcttatttctacgttgggcgcgagacgtcgatccatcgtcgctatcttccgacgacctgatgcaaaatcagaagatagacactactatatcagcaatagagaagataatactgagatatattcgaagatacataaagaaataaatacatacaagccgatgacatcctcttgagaaaccgtccagtcaaactttcgtttcggttttcttctcttcttatttgactcagtatcgctttcgatatcgtcatcctcagagtcacccttatcgtcgtcatcattacccgcatcatctcgggaattgtaaggttgagcactaggtgagcgaaagggaaaatcaccggtctctcttgggtgagctgtgatacttcatgatcaagaattagttttaccgcctttgtgatgaacgacttcgccaccgagagtatagggttcatactcagagacaagaaagacacaacttacctctttccctttctttccctttcagtagaccacctggttttgtccaacctctaggtctcctctcgaatcgcttcagctcttgttcctctttccttctttggtcttcgaacgtccctctttctttctccgatacgaacatttcccgattggaactttcatcctcttcgccgctagataagatcacttctgtatgaaagttgatgccatcagatgaaggagaaacaacggcccaagagagctcttcgctccctttcgccgagaacctttcaatatcgaaacgcgtcgttgtcgatccacccgggtgtgccatagatgacgaaacatgatcgacctcgatggatatctgagggagtgaaggaggaggaggtgaacgagaagttgagtcaccagctgaagtaggggttggtgtgattgacttcgttgatccgatcggtttgggtacggctactcgcatccgaggtttcggacgagggcgagttggggccgggggagatgacatcgtgcttagataagagttgttctacttattctcaacgtatgaggtaacaagaaaggctctgacgttattctgtgcgtttttggtcgaggtgctgcaacagttaatgactgaatagcaagaaggaaagaggttgttgggattgatttggaagtatgttgtaatattcgaatcgttgtcggctcaaaataatctaacaaccgcgtttgtacgtgtcatcagaaaagaaatgcaacatgtataagatcaatccaatcgtccatcaacacacctcctcactctcactcccttagcgagaacacctttgaagtgatcaataatatccctatccatctttgcccacttttccagtttcttcaaaggcttcaaatccagatcaatcactttgacctgccctgcactcggcggaccattgacagaaatccgaaagattaacgagcaatctttgaatgtcatcgatagaacgaacgcaatgaggtgttctctatcagaccagtctatagatcgagcccctcctctgtatcgctgaacaaagtgagttagctcaggtaacgtcaaaggttcgaaggatgatgatggtcgtgctttgaacgatgggagattgaggagcgtcgggattgataatggatcgagttcttcttgaagactggccaatctgtcaaaaatcggtgtcgatgtaaggaagggaagcatgcaagcttcgaatctttctaacagggccgattgagaggatggatagagtacatgttccaggctgctagtctacgcgagaacaagagacaaatggcatgggttcaacactttgtagatgggaaagacagcaggtaatcgacactcacatcgttaggtaagatcatcgtcccttccgcaaatatcctcatctgattgccccttccttctgtcaattcccagcccttccatagttcgttaatggctcgacgcactcggtaatcctgtttggaaaataaatccaacgggcaatacgctaactcaacgtcgttcgggaaagaattctggtctttcaattgacgatgcatgcatgttcgcccatacacaaccttgatctcgcgctcgtcttgtggaagattttctggcgatggaagaaatccccatttaggctgttttacaaatgaaacatttgcttagcattccttgacactcgactcatggccctaaagaagaagtctaaactgacctttatctcaaccacaagaacgtcttcgccgtcatctccagttcgagtcaagtcttccatcagtagagcctccgtactatgaacgttcaatcctccttcgagcaatctgaaagccggtctgattttgaggctttgctcattcagttctgaaagaaaattatgatcaagctctataggtctttgaacagggagaaactctgatccaagcagtacaaggatgacttgatctcgaaacagactagagaaagcctcaatgttgagctgctcatcttgtgaagacacatgctgagctcgattggttttaggtaagcgtagaacgctgtgaacaaagagcggatttgatcctttgtatcggtagactatattggctccacctaatcatatgttatcatgttaagatagttagctcaggtacgagtgaaacgacatgtacaaactcagaatctttaataccttcagccagatagatccaatcggacggagatgtctcattaacgcgaagcatatctttcttgctgactgtcactctggaccatgtgcgaggaatatataaaagacgaaggaaaggaagctgagtgagattggcatattcatagattggttccttgaaagatgatagatagatatgtaagaaacagagaccggatcgtttgtatcactccgacaaggccggtacaaactcaagcgacctggaagaaagaaaaagggtgggaggaaactcctgcttccgataaattggatagctctagagtaatccgtcccagaagttgtgagagagcaggcaggtgtcacccaaagcctatctcctctcttccccccaagggaaccgtagatgataacaaggagcggagccagcctctactttcagcatgggacagaatcgacgagcgagaccctcgagagtccagttgataggtctcggaacagagtgccagaagagaccaacagatctgcaaggaagcaaattctagagagaggagagagagacgcatgagagatgggaacctcatcccccctctctagatttcttgaatgtagtcctagcctttttcgcctctcaaagagtagttttcatctttatttcgagcctatacagtcggatctttcgagagtgctctactcacgtaacaggggtatggggtcgctattatacggaaaggtgaggctgaggccgtcctgatctttcggttacaaaggggagaagaaaagagagcgaaagagagaagagagaggacaagtcgtatgagtagagaagaggagatgatgatgtcgtttccctgtcttgaagatcagaacgttatctgaccagggagacgcaagaggatgaatgtttgtgaacgagatggatgtatgcagatagaaagaaatacattggggtgagatctttatttccttttatggcagtagcatcatcatcgggggttattggtaattgagttttcaatagaacattttgtaatgcaaggactacagcgttttgtcgatatttggtagttttcgcgcagtaaaccaaccggcctggttcagcccggttggcgtccggttcaaaaatgctgagcggtgtctctggcgaaaaaaaggaatgcacccgaccgctcagaaacctctgacactccttaggcttccttcctagctacagcttttttattcaaacaaagctagtcttaacaggtattcaatatgggtcagtcatcggtttacatgttgcttgtctttgttgagaaggtagggtttatgggtggctggggaaaagaaattgaacgtcttaccggcccttttttctctatcagctcccaagagaaacaaagcccagaaggtcgccctgagcgacttccttgctgatgacagtgagtattccgagtatcaaactcttggagaacgccggcaagaagtgtgctgatgatctgtctgacttatagagcatggttcgtgggccgatgagatggaggctcttcctactgcccgtaagtcctgtcgttcgcttcttcggtttctggcctctttctttttttgtcacttcgcgttcgtgcttctgcctctgtcgtggatgttacactgaggctagtcgtcttttcatgttcagccgcttcgcgacccgagggagagcgactcgacactggtgatttcatgtccaggcctgaccgagcaccgcgaggagagtttggtaagttctaactcatgagagccggtggccgcgacgaccgtgtggcgagtttgagattatgcgtgcgttccttggatcgtcagacgggcctcgactgactctctggtcttggttctttagctggagaatcccggggattcgctcgagaagagatccctcttcctaccagcgctcccttcactgcgtatgtcggaaacctctccttcgaggttggagaggctgacgtagagactctcttctctggtctctcggtatgtccatgttctgtgcacagttcctttttgactagatcacgaagacttaatggactttgtttatcgtttttaacattcgtgtctcagatcacctccatcaagatcatcagcgatttcgagggcaagcccaagggattcggatatgtcgagtttggaactttggatgacctcaagcaggccatggctcgaactggagaggttagtcaacccatcttgatatagataattagaacatgatccaactaaagttattgtggcttgccacgatcaccttcttagtccgtcggcggtcgaactgttcgaatctctgtcgctgagcctcgtgagtttcttttctgttctgttccggcaaattggctggaaatagactcattcttgactaactatcatgatacgaaaaatcttatgaattctagccaagaatggagttcggtcttcccagtttggtggtgccgctgatgagaagtcttcctggcgacgagaaggacctcttcctgctttggagaacactcgacgacctaacaacaatcgattcgattctggacctgcagccgatgacgatcgagattggtcctctgcccggggatccaagtttgttccttcctcggacactggatccaggtttggtggtcccgaccgcagggagggcgtgaaccctggagctgctgaggctgctagccagtggaggaccggaaagcctttggctggttctgctcctggtggatttggtggccgagatgctcctcctcaccagcgaacccccagggctgacgttcctcccagcgctgctgatgctgaggaccaggtttgtcaggtttcttcatttagtctcgaagaaaaataaaatacagaatgttctcaattgacttgggattgtggtctttctggttaactaagtggactcgaggaaagaacttcgtggcttcccctcttgctcatgctcctgagcgacagttctcatctggacctcgagcgggtgtttccccagttgttgagacctctgactggaggtcgagcacgcgaaagcctgctttcgatcgatctcgtgagtgggctttgattaggagctccgttctgaattttacagatcaatctttgttgactgaatcgaacatcttctttggtttcgttttttcagccaactcgtccaacaatgcttcgcccgtgccactggctcgaaaaccaatgactcttctcccccgatccggctcaactgtttcttcggccggaccttcttcccccgacggatctgtgccttcttcccctaaggcgtcatccaaggcttcaccctttggagcggctcgggcaatcgatgtgagcgcgcgtgagaaagagattcaggaaaagcgactcaaggctgaggctgagaggaaggctgccaaggagcaggagagagcggctgtgaaggatctggagaaggagaaggagaaggtgaaccccaaggtggttctcgccaagcctatcgaggttaaggaggagccttcaaactggagggagcgacctgccaagggggccgtgcctctttcccagcaggcccagaagtctgtccggggagagcgaggagcgtccgccggtggtgccgtaaagaaggatgaaaagaagaaggaggaaaagaagagggagagcgggaaggcgttgaacttcaacgcgttgcaggtcgaggatggtgaggacgacgagacggacgaggttgaggccgttactgagggagtcgagaagactcagatctaaaagacacgtggtgagttcattctttgtctgtatattcctaccatggcatccgcgccccgcttacatgactccgatcgtatctcgtttatgttttcccttgatttgtctttctcgttacccctgcaatgcctgctttctccgatttttttccatgtttacgtcggcttttcgtttgttcttaagagtttttgagtgtcgagtgtggtttttcgttcaatctttctctttttaaaaatgttgctttgctgtgtttctttatgctagactctgttctcaccgactgattcaccgcaccactaaggttgtcgttgaatatgaccgatcactgtccaaaagactgtcgaacaaagtcgtcttgtaacaatcaactatgaagcatctgaagcaaaaagatatgacgtagagaaacagcgataagaatcttggatatgacagggttcatcatgtgtagatgactgagatttgtttctctgcgttgtctcctgatcaccttattcctttcgtggttgctgaatctgtctcggtctcctcgtgtataatagctacgcgaaacactatgaacggatgaaagatcagcggcgagggtgaaacgaagtgttacgtcagcctgatctaatgacgatcatttttaagatttgcaacgtgtttccactgcccgagcttatttacccctcgctctacctcttccttctttcgacttcgtctatcaccgccgcttctcacttctttacgtcttactcatagtcaaacgtaaaacgtgctgagctgaaccataagcagagttgactggaccagtagagctgtttggacggatggccattcgacgaatatccgcaatcgcctctctggtgtctttaattgatcagcgttcttcctcctgctcatcttacacatctctgttgacaaggctctagctagttctctttcttgccgaccgcgcgtgaaaaaaggctgggcatgtggcatcttagttaacaatgctgaccttctctgtatcctgagagatactcactcacacgcagtgctcacaatttcttctttttcttttcttttttctatttttttcccattcttgtttattatctccgatgagagacatgctcttgacttggattaaccgtaatatatattttgaaagaactgatcgacgaatggaacaaccttttgaaactcttgaatgcctagctgtttatttccttttttgcttgtttgaatctcacgtgtggtttcccaaacgaaaaagagatatcagggaaagaacaaggttggaatgtataagaatgaacagatcctttcgactctcgtacatctcgagtcaatgtcgtagatcatccttcccctcttcttgacattgttgttctccttattctctccgccctagtgcaatctgtattcattgtagatatggcagacactacagttatagcttcgaaacccaaaaggggtcttttctctagaatgaggagcaaccatcatcaaccaggtaagagaaaacttcgccgcaagctttggaaacagatttcgagagggcgcggctgatagaaacggagttgatcatgaccatgctttcggcctcgtctcgtacttcagccgagaaacaatctgatgctgtccttcccacacttacctcgcctaagaaagagcatagtgaggccatcaagcctactggcgaaaacgattcccagagctggccagtcgaaaacgcgcctgttgagagtgagaacaaacatatcgagaagagatcgttctttggtcgatgtaagcttccgtcctgcgcttcttattgatgtctttaaatctcggtctgatattgacagatgtctattaattcacagcctcctctcatcaaaagaaggagagtcttagcacaccggcgatcatcatgcgatttgctcattcgagcaccccaaccgacggttcgctccggatcagagtgtttatggatcatccaactgccgaaccgctctacgtgaacattattcctggtgttgacagtcttcataccctgaaacgcaagatcctcactgaggacaacactcgattcttggcgactagacaaaatcgaaaatctcctatcgaggtaaagtgggatattccagagtttctcgaggaagaaccgacggaagatcattatgacttcgacaatagattggatgtctacaagatttcttgttcgtggatccatatcagcaagatgaaacgaacgtatgaccacacaaaggtctttcattccattctgtcatcctacccatccaacttgatagttgctcaatccgatcaagacgcaaaagtgccactcgacttggggtccatctttcctccagatacacctgagatggtcgaagctcgagcaaaagggctaaccgaattggctattcggattaagccacaaaagagctggccgatcctggtcgcgtttagcgatgtaccgacccatccattcgtggtggagtaccagcgaggtatgcgtgtcagggatctcaaggtcatcatcggagaggctaggaccaatctgataatcatcatgggtgacgcttcgaccactacactcgatggctcagaattcttcctcttcaaagtacatatctgatttgttgtgtccttgcgccatctttttggtcttatactgactctacgttccctcgcctatctttttagtgtgcccaaccgggtaaaggaacctcaccccggacgttccccaatcaaatcgatagataccgaggtcttaccccggccacactgtttgatgatgaagaagtcgaatttgcatcacataggttcatgaggagcttccgacccaaacgaggaaacaatccattggaaaaagttgagctcgtggcgttcatggtggatgacatggaggaggacctgttgaacacgttgagtggtacgtttcgttttttgtcgcctcccagctttactgccgatctcttcttatgtgctgttatgtgttgctgacttcagaaaacgtgtccatcatatatatatatataaacagtaaattcaaaagcacctccccgttcaatattatcatcccctgccgaacagtacgccgggttacattctattcaaactcccgatggatcaaagttcggctccagtcgatcccgactctcatactcggaggcgtcccaatcctatcttactcagccaattcgtcgatcctcagccgctgtattgcctgtctcaaggacagacagcatggctgtgcacagagaatcttgtcagccctctttgcaaacttcggcgacctcttcgcctaaaactgccccactgtctatcgtatcaacaaacatggcaaagaagcaaaacaaagggccacgagtgattgaatctgaggagtttctagagacggaatctcctcttgctatttcagacccggccgaactatctgattcagacatgtcgggctcgaatctggacatacttaaaacccctccgattgcacttacagctgctaacgatcatggcttgcgcgccgaatccggttcggacgagaaggacaaggctgatgaagaggacgaaagaaccatggtgaatggctatgctctcatcgagggcgctttgttttcactctctctcaaaccaatcgataggaagggtgaaaagttggtgaaaaacaatcacaaagggatgttcagtcaagaagaaccgttgtttagcgtaactcccgttcatgttgggtagatctttacctgagaggatgggtatctgtatacttttttttatattctattcttgtttattctgtttgttgacatacatataacactcatatagattttcttcatttctccttgttgctttcgaggacttatcaatgtatatatgttggccgtatcaggatggttgatacgagagagaatgctatcagactagctgatggcttaacgtgcaatgcatggatgcattataaagttgttttctcttaatctagtcgtcaccatgttatcactctcatctttctcgcttaagtaccctactctttcgttcatctcgtctgcctgcctgcttgtctgcacaccacaagaacgaagtatagcttctggtatcatcaacatacataaagtagaagacaggttgtcgaagggactcaggcaggtgtcctttaaaagaagacttgtcgactctcaatcatgacccattcatccggaccgaacagaccactgcccgttccaccggtccgaccgacaccttcgccatcctcttccctcacttcatctccttcttcaatacgtcgaccgctcaacgataactactctcctacttattcccctcgaaatccgagtcgttcaagtctttcacctacgcttcctcagattaagagatcagctgagtctgttaatgcaaggtttcatgcgtttgcttctgcaagtgggtcggaccctcctccagcttttcaacatgtgtcccttcatcagcatcagtacgcaccagcctcatcaactccgatagaaggctatgattcctatgttcaacaccagccggtacatcctcaatcgcctccgtttgcaccagcatcgcctcgatcgatacgcgatcaagactctgaattatctcctttcgctagaccatcgacagctggatatccaactcatcccagctcagcttctaatttctacacaaatcaccacaaggttcgcccaacatatgaaccaggctcagctgagcaggcgacgcagcaatccttgtacacaaaacagtgcgaacaagaagaaagggataaggaagaagctttgatcgcctcgttaaatgggatggaacttgaagaggaccgggacagattgctcgaagcagaggaggagaggatttttaagcgagctcaagaggaaagtgtgaaaatggagctaagcaggcagagaaacagcacaggatgggaaacctgggaaattgggattgggaatggaacatatgagggtctgcatacaaatggacaattcgatcagtcggattactatcatcaggtttgtttctgccattctcttcgtccatcatttagactcgtttcgtttctagacgtttggaaaaacaactgagacttattcgtggttatgttcttcgctttatctttttcatttgtttagcctccacctcctgggagcgatcagaaagaagaccctggtatgatctcgaccgggctatcatcctctgatcaacatttcaatgctctctcctcatcgtctaaattcttcgaggatgaattcaaagcgcatgcagagatcatacaaaagctgaaagactggcagtccggtttgctcccagccggtctggagtggtacgagcttatcccgaacgaaacgagaacggcgctctcagaaaaagaagtggaaagacagggtctgatctgggagatattcaggagtgagcaggaatacgtaaagaatttggagggtgggttaaatgtgagcagaattcgggcgcttcataatttgtatcaaatcaataagcccacggcggtctctcgattgttgtgcatactgaatatctgttttgtttttcctcattggatagggatacttcactccgattgctacagttggaccaagactgatgcgtgaggtcttttatacatcccttctcttactcttcctctcctaaggaaaacctcaaacactaaattctgttgtaccacgcttgtttatactcagccccagaaaaagtgcccactttcatagcggatatctttcataatattaactcaatctttcctaagcgtcggtcgttttcccacagattatttcatcggctttggcttttctattgtcgctaaactttgccgtttatacatctatctgcttgtctacagattcaaagatggtaagtctcgactctgagctctagaatatgtgcatcatactgatgttcaatggttcatactgtttgtaggtatatcatttgcaggaaaggcagctagaaagtcatcctgtggtgagttaatctcttgatttttgcgtatgtatggcttttgctggttataaccgatgtggtgatcatcctgggtatgatataggttcaatcgatatcggatattttgatcatcaacttgtttgatcttctgggtgattacgagaagtatctaaaacagtgagtcgaatgatgtcaaagacgtcttgtacaaattaagatgatgatattgagcttcttgccttgatatcagttatccctatgccgaagcccgcctgagacgggaaattactaaaaaccacgcattcaaaaagcttgtggatgtgagttctaaatttatatggcgattttttctttgtgttcctcgattcatgtcttacaaattcattgttcattataggattgcggtcgaagcgaattagttgtaggtcctcttctccttttaatggacatatctcttccttgataaaaaaactcacttgatgttctctgacaaacagaggaagcaagacttagcgtcttttctagtcagccctctgagtcgactgtcaaaactcgccttggcgcttcaacggctactcaaaatcactccgaacgaccatgaggataaggagcagatccctgtcatccttgagttgattgatggaatgctcagagctgttcgtgagttgttctgaggtattctctttgcttcgatggttgtcaactgtgcatagccctgatatcgttttcttccgtttatgaactcgaatttggtctccaaacgctgctcttagagcccggtgtggatgctgcgaccgccaaagtccaagcatggcatatcgcacagaggcttcgatttcgtaaaggagagcgaaacgatctcaatctagacttaccttccaatcagcgggctcttctctactccggaaaggtctaccgaagacaacgcaatgaacgagacttccatggatggaccgatctgttcttgattttgtttgataactacctgttaatcacgaaggaagagaccaagtcagggggccatccaaataatgaagaagacacgacgtacgctgtggtttccagagtacgtttcatcagatgtgatgctcgatggtgtacttcgtacagtagtttgaactgattggtaccgcttgtcttatagcccttgccgttagaatacttgcgacttgtcggttcggaaaatgacccaggcgagcatcggcgtgacatgattgttcgtacagactacttgttcgttagctggaggtcgatatgaataaactgaggaaatcgttgttactcactctcttatttattcatcttgatgtttttgaaaggtcgattatcaacgtaaaaaaccaatcaagttgtcaaccatcctagagcctcttgttcaacctgacgtaagctgcttctcgatctaatattgacgatttacattttataaaaactaatttgtacgcgttgaatgacttcatagcgaacggtctatccgtttcatatcgagcacaagggtaatggacaagcttatagtctatacgttgacaccgtggcgtcgcgcaaagagtgggtctcgaggcttaagcatcaaattactgttcgcaaggtcacttcggaaaacaatgctgtatgtcctttcactgtctcgtcgagtccgatatagaaggcttatatgaatcgttgcgcgtattctgtcttccggttggacagctatactctatgcatactctcacctactctcctcgtcgacaatcgcttatcttgacacgtccactttcgatctcgagagccactgaatcaactcaattaactgaaccagagacaccctatcttagaactgcatcgtccttctcagcagtaacactatctccctcatctcaccgctcttctatcccctctgtaccttcggtggcgactcctaagctcggtttgaatatcacttgcgctggatcatttggtgagctctcggatagttgttatgtcttcatgttcgagataatattgatgctacatcctctgcagtcgcgtttggaaagcgatcattcgcagtagcagattcaaacggtatcagtataggataccgggatgacgctatgtgtaagtcctcagtctctctcaaactccgaagcgatcatgtggttgctcatacccttcagattttcatcatactccataagcccatcgatgtatcatcgagtcctcttcgatcatcgacttgtttgtcctccaagatcttaaccgtatattggttgtagccaccggaactctctactcttacgatctaggcaaaatattggtcgatgccaatccagataactggaagattacaagaaaagagtctggcgaggttctgagtgcttggggagagaatgttaactcggtttgtaaaatagggtacagagaggagattttgcaaagttagtttttttttaccaacatttcatcttatgttcaaggtataaagacgctgaaacctgccacgacctatagttgtatacagttgctacaacaaacttgtaggacgttagtactttcttctctggcttttactgatatatcatgctcactgagaatcgctccttttcactatctagaaacaaccttgaaagctttagagctagtcgacaacaaaccttctcgtagtcaatctctcgccagtgctttccaccgccagccgaaatcgaatgataaatctaaaccagcgacgtttagaacggtggctgaggctgtcgtgtcgggtcctatcaataacattggattcttcgagaaatatctaagtcttccgacggacaaaaacggagtgatcatcttggacctgatgaagtaagttgaaaagcagagtacaatatcgaagtttgaagccctgatgtcttcttggctttgcgttctatagcccaaccaggaccatcagctttccaaacatatccgagtcatcgagttctaaccccacaatctctggcttgaagcatcgggtgacatcatactctgctcgtgagatttactcttctaaaggctcttaatcaacgttgtcaaattctattttaacccctttttttgttttgttttttccaaagttctcatgcatcggatcagtgagaacgctttcttgattgtctacgaaacgggtggaacatggggtaagcaaattgctcatgagaccaaagacatcgaaccgatagtaacgtaatttctgggtactttccgtagtcgacaagcagggttctgtgttgaaagacggagtaagtgtgtatctactgtcatttgacaaccgtccatcaactcctcattaacgtctcttattatgtctaggcatatatcacctgggaagctcgagcagcttctgctgtcgtccaaggctcgaacatcgtgctcttctcaaaggatggcaatttcatcgaagtccgctcgatgaattctggtagacttttacaggtgattgagacccagaaagttaggctaatcagcgataatgggccagacagattggtaatgggttgttatgttgagaacggtcaagagaaaccgttcgaggtacgtataattcgcgtctgaactttttctctttgaggaacaatagattatttcgttcaatttactaaatttgtcgaggcgtgaacttggtactgtagttggccgagacagttgctctcccaccgttctcagagggaacgaattgaagggcttatgcacctctatcttttcttttccatttgcttctatctctatactcagctttttgtcttgcttcttctttttcttttctgttcaaggctatcttcctgtggattatttgataaacggtgtttttgcagatctacttgatcatattcttagtgcactataatctatcctttcatctacttgctcaaacacgctatataccaagctcctattgcgtcttctcacgtatctagtttgcgaatacaagagaacatgtcttctgtccgatctgaactcaaacagaattggttgtttccgattggtttcgccccttgtcattttctcgcctctcttctatccgataataggctctgagaattgaatagatatcgaagcggttgctcaagtatatcgagctcggaactgttttaatcgatccaacggccgctcattgttccacgtctcgaacccttcacttgtgatccctagggtaggaagacctgactgttggacgatgaacgaggctgaaatcgaaccataagcagccgctgctccaaaaagccaaaaagtcgttacaatcaggaacttggcatagaattatacggcgaaggagcagaggccaaccaaccttcgtaaacatctccttgttcaacctctagaccagccattagccctcccaaaaatgaatttcctgcacctgtgacctccttgacttcggatgccgaagcgtgccagtaagaaggtacccaacgaataccgtgtgttcgggtgccaacacaggcgcctagttttccacatcggaggaccaccgaggcttcggagggtaaggttggcatatcgaggaatgtttgggtgatgacattgtaatcggctgttgtttgaggtataggaagtgatagaagagctatcatgattgaaacgtatgaagagaggaaagtagggattaacgcgacgtatttagggaaagaactttcagtgatacaatcaacgaagacgaaccggcagcttcttcatggtttggacttaatactttcactcccgtcaatgcggtcttcagctcctccaacagatccggccgacagctcattggatgaggctcccacaccagttgcggtttccagtatccttcccgaggttccagggctttgagagctgatgacgtagccataacctgatcgggagaaccacatatgtgtaggtacttggggcgcaacgaggggtaggaaagcagatcgatgattgtcaaggatgatgggggatttaggtacttgaatctgaacgtcgtaggaaagcgatgaaggattgatgaggcggtcagctcgttagaccaaatcagatcagactaggtaagattgtgaatcaacggacgttctgtctccgttcttgtattgtatacacgctcgaacactgccagatgtcgttctccatttccagatatccttcccaagtcgatcaagatttttgaattcgagcggatgtcctgttgggtcggtatcgacgatgattcctagctgactgggttgcaaccagatgcgagcacccacgatagcataaaaacctcctcctcctatctgttaaaagcaataaatttaaagatgaatataagtcatttggccgcatagagtgtatgtgcgctgtaaggatggctatacacgattgtatgatgaagcagcggctgagccgtcctcgtttagaaatctgaagcagtccaccaagacagtactacatgaaaaaacaaccggaacagaggacacagaaccaaacgcaagtggacaagaagtctttgttagattccttgtagcatgatatgtcaacttaattgaagaaagtttgcctaacgaatgtttgtcaattcgtcagtgaacagtctatcgttagggcttaccctaggctagagataacgactattggctgcctgtctccggaggtgttctccatgtatatcagatacgattcaagatgatcgagagcgcactaattttcgtttctccggtcagcagtcagtatggctcagcttggccaaaagctaagtgagtgcttgtggttaatgttgatgttgatgttgttgctgttgaggtatgctgctattctgtggtacatagttatgattacaaaaaccagacgattttctctattcgactcttgattttcttctattactttcgatcatcagccagtaagcgagccatcatccttccctcgtcgccatcaccttccatcatttacttgatcattcaccagcacgcgaccaagcgactctcatgttttcaaactcaccatatcaatctcaacaaggctatccttcctccccttatggtcaacaagctcagccagaccctctcgccttttacagctcacaatcaatacctgccgggtcagactcgaccggatacatgggctacggctcgggtgtagcaggaaacatgggtggagggattgaggctatcagcgggagaatggactctggcccgatgggaatgcagagaatgtctggagaaggaagatggtgggaggcgtttggaacatgtgggtttgaaggagagcctcctctgatggaaggtgtgtcctgtttcttcttccttcctttaccctcaagggtttctactatgcattcatcgcatcctgactgaatctttcctgcttaccatggtccttctgacaactgtcaaacctaaatcgaacggtagaactcggaatcaatccgtcccatatcctcactaaatctttaactgtcctcaatcctctttcgaaaccagatgaacagatcatggatgatgctgatctggccggtcctttactgttctgctttggattcgctatggtccttctcttcgtaagttcactgccgtttccttccaaaattcttgcaccttcgggtcctgattgcttgaatttttcttaactaaacggaaatgaaccacacagtccggcaaacctcagttctcctacatctatgccatcgctctgatgggcacgatcgcgatctatacgcttctcaacatgatggctcaacgcggaattgacgcttatagaactgcgagcgtattgggatactgtttgcttcccatggttggcttagggacaattgggatgggtgtgggaatggagtaagtctcttgtttcttcatggaatgttaacactgatatcgtgttaatctctttctccctgatctctctttccttttctctcttagtcgaccgctgggttacgctctttctttcctatcagtcctttggtgcactcattcggcttcgtccatctttgtggccgtccttcgaatgtcagaccaaagattgttagttgcctatccgatcatgcttctctacggatgttttgctctcttcaggtatgtaaatctctgtctctctgttgtcttctcttcttgttttcttttgacaaaagaatggtctaactcttacttatgtgcgcttaaaacactcgttacatcctcagtgtgtttaccgttggagttccaggatccaaatagatataatgcgcttctgcgacccataatcttctcgtcaatcaatgtaatcctatagaattgacctgccaacacatcgagccgcttctacaagagggtttcgcttgattagacttcatattctattttattttttcatctccaggggaaactcagtcttcgtcctcatcgccactttcaattctaagcccaccctgctcatcgtcacttccttcaggcgtcccacgttcctcccgtcgttgttcctcccgctgctttttcttctgctcgagcttcttgagaacttgagtggcagagttgaagatcccgcctgtgggcgctccacaggcgaaacatttgggcgtcttggcgaatcgcttgatggcacatctgtttgtttgagaacaagattcaaaaaatagagaaagtcaggtgatcaaactcagctttcaaaggtctggaagaactaactgaagaagagaaagacgaaagaagggacgcacgctgaatcaaagaaatggttgcatttcgtcacgaccgggtcgacgaactcttttcggcagatcaaacaagcgaaaggaatatcttcttccgaatctgagtcatcgactgcttgaccagcttctcggagggatgcttcgtgctgtttgtcaagctgccagcctgatagatagtctcctcgctatttcaagagaataaaacaagatgaaaaagacacataagaagaaagattgagcaagttgttagttaatggacagagctgtgaatagaaaggagatatatatagaggaaaatcaaagctagatgtgtgatacgtacgtcatgcaagaatttacaggtatctccaaaaccacaccatcccgtctctacaggtttacatacacaaaacacaaattggaggacagcggccaaagtgagcacgaatgaacaagataaacccaattacaccatgattaaaacgccatacctttataatccttgcaaacatctggctgatagtctacaacagtgatcgttctgatattactggacgctttctgaggaccagctttcatcttgtttgatacgccactctctctttgttcgagatgtgacttgtaggcagccgcgccatgatacagtccatcatctggtatgccatcgttcaaggcatcctatgaagaaaggtttgaatacaagataaggcgttcgagtgtcaatcacggattccactcctcatgtgcaaccagaagtgaaaagcgaagccatacagaaggaaaggaacatacctcgaccagttttgctcttttcctcttttcctcctccttctttgcatcagcgtcccaatccaatgatcccgtcgcataattcctgttttccgctttcgatgtcccactagtcttccagttaacattgaccccatcatctaacccgtcattcatgtcctctctttcccagtcttcttctttgcgtgattttcgtttcgttccctggaccaaagggttgtatactgtcttcttggatggtatgcgaacagcagagccggaagatgacgaggtggagttgttggcggacgtgtttgctgatggggatggcgatcgctgacgagctgtcggacgaggcttagatttcttcttaaagatagctacaggagcggaatcaggctcagaaatagtgcttgagttgaccattatgtcttctaaaggagtaagagggtgatggtcggtggagtgacgaacggtttctcgaagtcattacgagagtggcatacgttcgttaagtagccgcgcgttcgagtaacttgggctgatgacaaatcaagtatctgggtaattagacggagattgatgatatagatccaagactcatggatcaaattccaagacaaacagagcgatacagtagatcgatagattcaaataggacaggaagcgaaaacaaaagatgaatgtatagaaagattgaaaggaaaacgaatagaaaaggtcgatcgacagaagaatcgtgcgtcccacattaaaccgtaccctcggattgcaccacagctgtaagtacaaggcggccgtccatagaggcaagatgagtacgagtaattttaaagaggacaggcttcagagtgtttataaaacgtacgttctcgctttgcaggagttttcccaagatggaggtgatctttgagacctctgttgccaagacggaacgaccaaggctcgagatagtcagccaacaagatcagacggcagcgaagcagtttcaagatactcgaaagcgatagagaagagaaactatatacgtactgcttcatccaggcagcggttcgataaggcttgaatccagcaattcctctctgtcggttccattgttgtctcttatcggccttcttgatggcctttgcttcttcctgtttgatcgatagataaaagtagagtgagcgtttagtatatttgacaaaacgacatgagcatatgcttgagggtgtgctaaccttgtcaatgtagccatcgtcattggcatgagcctttggaaccgatgggaacgcaaacgatttgagtgaaagctacctcgctcctatgggataagaaaagtcttcactcacgttcttctcagcaagctccgcttggccctccacgtgatcgtacgtctcgaaggcatgtctccgggcctgagaagcgcaatgagcctcgtgatcctgattaagcattcaggtcattgtttgatgttaagctctacttcatagaaggtatacaatgagtatctgttcaaacgacatacctcgtcgagtcctgaatctagcttgatcgttgtcgataacctacatcgtgacagatgggacgacaacaagaagaatgacgcgcgggttaaaatctttacatcatgatagagagtgtggagaagcatacgaaccatcctatgatctggtactcgtgcgtttcctttgtgaacgagttgatatactgcatccatttccgtaagtcattcatcaagtgtagctcgacgtcaatgaatgatcccattttaagatccaactgtataagtcaccaagatatagaaaagttacacacattctgacttagatgatccaagttcttggagatcaagatcggaatccggaccttccgagtttcgtcatctactagctcttgcaaccagagcattgccattgccttcgtctgagatccaagtaagcccacgaccgaggctccttgaagcttgaatgtcaagaccgattggaatcgactataacagggcaatcttaatagatcaatgtcaaattcggcccgagatccctcaatcttcgcttcttttttggacaatctctcagtagaatcagtagtagagatagtgagtttcttcatatcactggcgagactttcgtattgagggtcgaggtcgatcacaattggactagaaagttcaacagttccagtttccctataaatcaaatccgaaacggtggttcttatcaggtctatcaacaatatcaacggccgttagaaagactacataccatccaagaagattatggggcaagtctagctgaacaggtttgaataacaaactgacgctgacacctatgagaacatgaaaagataagtatacaacggtcagatccgtctttgttgtatcgatagtctgtatcagtgtagtcttacgtccgaatccaattccctcctcaagctatggtcaaaaatagttaccgaaaacgaatatcggttagttgagtatctgaagtcgaattcactaagctgagatgtatatgagaagatctgaaacttacagcaaacaggcggctgacctcgctagattcgttgaacaaatccttgagaggaaggttgacgatacccagaatcggatccttctctcggagcgcagagtttcgaacgacaatccgaaccacggtatcctgccagctacgttcatagaagcaacacgcaccattcaggatgcattcacatatgtacattagtgaaataaatggacttacttcctgatgaacttctcagttccagcctacatagtcacaaaccgagcccaagaattgatggaatgataaagccagtgaagaaatcagaactgtatttgaattatgcccggtgcacggaataagcttacctcaaagtatggtgtgttgctgtactgcttgacccgagttttgtaaaccatatcgtcgttgacgatgatctcacaaaacgcactcggtaaattatctgcttgctcagagacctcctattggatcactcgtttcattaagcatgtcaggcacagattcatattgtacttcttcaccaaaattgaatcatagaaacaatgatgacgagtttactaacatctgtatcttgtccagcaactccttcgcgttccttagcagtagttcctttaagattttgtctctccagctggttgatctgttcaaacaacatgaagtgtaaatagatagagtctagcaacttaaactcaagatacttagatgttggacgtacttgatggatgaccacactcaaaacaccactcttccatcggggatcaggactgagaaggacaaaacgaagcagaaagagtactctcaatacttaagcacaatgatttttctcaacaagggtatgatagatggaacgaacggtgttcgggtaggatcaggtaaagcgggagggccatctctggcagcggggttaggagctaaaccaaagacgaaccaacacagataatgagtataatctttcgacaggtagggataaaatgaaagccgctaaccaatgtcatcaaatcgcatctcttgctcaggaagagatttagtaggcacggctgagggatgatcttctgggatctcgagttccttgttaagaggagccttttcatagtagccaaccgaccagtgaagctagataaaaacaaaggtcgaccatccaattgagccacgatctgtttaataaatggcatttgagtggagaagagaccctcacctttccttgagatttaccaccatctacccaaaaaaggcccaaaacaaacaccgagagtacccaagaggaggcaccaggcgacggcaatgagttcagcacagtcagacaagtggcgtttgtatatatatgtacagacagagacgaaccttcgaagccttgaatatggtctgctcgtcgaagcatcacattgggtgtcttcatcaattctttgacgggaactttgactggagggaggtagaatctcgccgtgtcagacacagtcggtcccatattagtttattctctcaaagcattaggaagagaaggcttacttcgtccgataatatcatcattggtgtgctctgtgaacccaaaacagacaacacatgttagaaaatcttaatcgatgggtatgtagcccgtccctttacgtcttccatcaagggtacgacttgaaaatatagcagtagactaactgtctgaatcccaaagcataacactcaagctttcctctgtcttgacctcattggcggtaatcaagagcgcgcaggtctcctcaaaaactggatttagatcctcagatatgatcctagtcgaataaagtggttttccaaatttggagtaggcgagcacgatgtaaggatcagaagatcctagatccagtttagattttgaatagagaaatacgcgtgggatggacaattgggttagcacgttgacgtatatgaaaataaagaacaaaaatatgacaaaacaaaccatttttgtcctgagcactgagatcctctccatgatgaatgcaaatcaagaaaacgccgatcgcctgggtatctccaatggccgctcccgaaagcatttcctgaagattgagcgtcatcgactatacaagcaatcgtaaagagtacaatcgaggtttccaaggattcagtcatctcacgtgttctctgcgctatgatttgcagaatgaagggcgacaaaccttgggagccacaaactcagctgttccagcagcaatagccattttaacgaaacttgagaccataggaaggtccaaaacattaggtaacgccttggtcatagggatgaccgatacatccacatccggtacacccatctgtcgattaccaataacaggtagataaatacgagttgaatatataaaaacgcatatcgacacagaagtaggaatacgtacgaatgtgaaagtcacattccgaacgaaagggtagacagggatgaactgcagtcgcagtcggattgtaccgacgatgccttcgatctgcacccaaagaggaatcgggatatgaacccaatcaaagacctgtttgtttatttgaattcatggcaacaagattcagttgattaggtcttagaaaattgtctggagaaaacggatagatagacggacaccaaggaaaaattcgagtagcagatggatgttcttggaccgttcgtttgcctctttaccagattcagcgctatatgcgaaggcaacttccagattctgtcaaatgagaaataatgagcgatttttcgaaacagaacgttaattcgcaaagccagtagcagacaataagcagcttattaggaaacaatagaatacgcaccacatattctccggagtcatccagatcagcttcttcttgagtggcagctggaccgtttgcactggcttggaccttctccccgttcttttttctatcataccaaaatatggacttgtacagtaagcaacagaatctgaagtacgtcaaactgagacaatagatactcctacatacttcatctgatcttttttatcgggtaagctccgcatagagataattcggaacggattggatccctgaccgacttctgaaattctaacggcatccaccacagcgggaagtgattgctgcatgatgtcctccaccatatccacgattgacagaaacatctctatccaacccatcaggtgatcgtatcaataaaagaatccttatcgttcttctgctacacacatcctagccgagcgattggttatatactcaccaggattcaacaagccccagaacgtagctaacagcgaattgagccactccacactctccggcatcggtggactgtacttttccgctcttcgtcgatgaacatctaacctgactcgttccatctctcgctcaagtttcctagcggctccccaggaaaagaaacacgcgccaaagccgataagaccgatgacccaagatcgaaagaccagagcgatccagccggaggaaaaggcggtgaggatccaaaggagaaaagttccgatgatcgatgcataggtgagtcgatgcaagcttttgatcgttcgagtgacggcgggtgatggagcaggcgggaacggctgaagggataggtttgtcgtcttaggttttgagctatccgtatgggaacgagcagagtgacgccccttactaggatgaatcgaactatcttcagaggctctcgagtggtctgtataggatgaaagtaaggtaaatcagcatacatttcggtctaggtctattgatcacctcaggagatatgacgtactgttcaggtctgaatcttggatattgaccgcgtatccagtgaccgggtccctcacagttcgctcctgcttctgggttccatcgacctggttttcaagacaatttcaaagcataaaccaacattgttcctgcaaatcagcatggaaggccaggagatattgagagaagaggaagcgactaacgttttcagtcgatcgcccttggtagacgttcattctcctcctcatctcttctttctcgctctgagaatccaaagatccgttgtcatcacgtcgatctttcgcagctttcagttcatccgctgtcaaactgttgtcgtagttatcttgatgttctcgttctctgttggcaagactacgcgtgcaaggcgaggaagcggtgaaacgtgtaaaagatggagttagtactctgagagcaagtccatacaaagcagcgtaggaattaggctcgggatggaaaatttatctctcacgacacaattgaaaatactgaacaaaaacatttgtaacagtaaagaaggagtatagaaaagggcaaaagatgggacgaactatttctggatggtcggaatcttatgatgttcactccagttctgggcgtttgtctcgtgtgacccagcggtaggtgaagcagtcgaatccttagcatacttctttcccactggtgaggacgaggagacattcgcggacgccatcttgttggcgagaaggatggaagaaatgtcgagagtgatggcgagaaggagaggagggaggacgagcaagacagaggagggcaaaagtgaagagatctcttaagcgcagtcgatacagtgacgtcagtctcggctctattcgattccttgataaatagatggatggatagatagataaatccttcacaatctgatcattctcttcctacggttggtcttgaatgcatcattcttactattcttccaagacgtttagaaggtctgcactcgctgggaaagacacacagatgagatattgcccaacatatatcccgggaaagatagaacggacagaaatgaagactgagatatatacagcggtcgaagaggaagtagttgtctacacgaaaagcataaaatgagatgtctctatgaatgatgagactacaatgttcttgagaaagaaatgaataattattgagataggattcaggagacaaagaatgactggctcatatgttgtatgagctatactgtggtatacgacgataacaaacttgatgcacgtagaagagatgatgggaggcggtgagagaaaaaggttacactatatacactggcctatatgtaaagccttgcagatcctagaatctagttggagaaaaccaaaggagccccctcgaagatgagtctgcccaacgagacagcctgtctaggtacacaggcggaaccctcgctgttgatcacgaagcctcgagcgcattccttgatgacacacttggcgttctcgcactcgacgttgtaagcattagcgatggtcgtgcaatcctggccggtggcatctccagggaaaggcgagacgcatcctccgccttaagttcgattaataaagagaaatagcaacgtggtgagtaatcaggtgacaaaatattgaagaaatacacgatgctcacaagattcaaggttggccttggtgtcgatgcattcgaaaccagccgagccggataaagtcttgatagggcaggcggtcatagtgcctgggcaagcgttgcgagatcgagcgttcaaatttcgtcgtcgggctccaggagagatacatgtctgaccgttggcaacacagtgtcccgagcatctctggaagccagtggcgcaagctgaaatcgaacgaagaagcaaacaggtaatggttcagacgatgacagaacactaccaattcttgtgtcatgaatgaacaatgattgattaaatgatcaacttaccaaagccacaagctccagaacaatcattgggaattgagttggtagggtaggtgcaagtagcgggaaggaggttcaaggcagcaatcgcagcggcatcaacagcagcctcgagtggtccaactgtggggatatagtcaatggtcaagagcacagcaacaccgtcagtatgtagaaagattgattgatatgtcgagaacacatgtactgcaaggatcttaagaactcacgaagcgcggtagaaactccagttttaaccgatgcggtgttgagaagggcggtagaagaagctgtaagaccggtaggagtctgtcggaccgttgcatgaactagatatcagcgctcaaaatccgaagtaattttaagaagcagcgccaaactatacgtacagcacagacacagagggaacccaagttgaatgtagtcaagacaacgttgatgttattcaaggagatagtggcctgttgagaacgacgagatccaagggtatacgatgagtctacatgtcatccaaacacattctgtatatagagtgctgtagaaaacactcacacaaacaggggcagtgactgccattgccaagtgggaggtagcagcgaggacggcgaggatcttgaatgcgaacatattggaaagagtgtatgtcaaagagggtcgtgaagattctgagaagacgaggaggaagaacgggattgattgaagaggagatgaagaggagatgatagaaaaagagatgagggctgaaggaccttttcgctcccccttttataaccattcatctgtgctagagactacaggatccatggaactatttgtcgaccaaggcttaaaccataatagaaaactctctagtgggtctaagaacaggtcacggaaaccgtcgtgggcgcaaggcctacaagtgagatttgagaagtgaccaagtgcagatcgtctcaaacaggacggttgtgtgtctgagctcatgttgatacctagctttctcgggccaggtcgctacaaacatgaaggaggagggaagtgaaggcaggccgatcagagaaacaagtagggattgcgtctcgctggattcagcgccgctcatgttcgaaaagaaggacaggccaggaatgatatgtttatggctctgcggatgagcattgcgagctgtgaagacaagagttgttctcaaaagcctcaaaaagaaaaacaaggttagtcaatttggtctgtgtctcataggtgtcagtcaggctgaaggcgttgtgaattgcttagatgcaatttatcaaaagtcactgagcggcaccgacgttagcgactaaggatcagtaggcagatcggacagatgagagagaggaaaaatatgaacaccgtggaacatgaacagggggtcatcatcagttatcaacggctacaacaagcggctgaatcgttcagtgggcacgatggcaaacgagagagtttgaaccgcaaacactaagagaaaaagacctgtccaagccacagtcagaatgattccatgtttttctcattcaagcagtcggaagcgggaagtggtggattgagttggctgacgagatggaagcaacttcagcagccagaagatcaaatagagatcaagacaggagaataatcgcatgaatattaatcagatgatccaacctattcattctcaaatttgacgatgccatccgaattcagcgggacgctgagaaagatccacaaaacgtggcttggatgtctaatagaagtttccttttgcgtggcttgaatgttcgatagtatatccctttgatgtggtacctacaggagatctagatctcagaagatctcagaaggaagaatgcgatgaagcagaatgtcgatcatgacgagcagttaaacgtcggaggatgagctcgacagatgacaattaagcatattcacgtttctcggatgtgtgtcggatgaaatcagggtgacagcctaaggtttacgtccgtttactcaatcatgactaagcataaagcccgaataatctgcatttaaccttttcatcatctttattgatacttgatcttcaaacacatacattgaacctgcatcaacgctaattttgaacacatccgaactgacttccccatcctttccaaaacataacgcctgccatgacaactatttcagccgatctatctgcgctatctataaaagatcttggctctgtgccgttggaagaattattgacgacagcatcgacttaccttgtgggatctcctcagcaatccctaccgtaccttaatcaagctctcatcctatctccttcgtcagctcctattcatgcacaacgagcggtagcttatactttacttgagaactggccaagagcatatttcgatgcctgtcagggtctagacgatgatgcagaaggattgacagatgagctcagggcagagctcataggtttggcagggaaatgtgccgcagagagaatgatctgggatctggccgtcatcgcaagttttttttccaagttttttttttgcttccttcctttttgttgtctcggagcttgcttcatacgatgttgtcgtatatttgtatgcttgcgtattcatatgcctttgttcttggcttgaaaacagcatctagaagaggccattggactgactcggacatccgctttgcttgccctgcaagcaaaggcactgtcgaatcttcagaaaactagcgtgtctccagtcaggacaaggatgttgaaccaaagaaaaacaaagtttctggaagaagcgttcccaggaatagatgaggatgaagagtgggaaagctcagagggtgaaggccatgaagaggatgggggtgatgacgatatagatatggctatgtagatgtctttattcatactttaagcattcttctccgattggtacaggtgaaccatcctaactaaacattgatacagttaccaaatcccaaaacctcaatctgagatgcaagggaggtcgacctgggtgtttttatttgttagacgccagattgcgtgaaactataagtataaaaggacgaaaaaagtccgtctacaaggatgggtgcatcatcgaatggagtgtgtatctgaatgtccgacgagaaaccgctgggagacaaccacaaggaataaaagaccccctcgagagaccctacctgtgacatgtttccattatagcaggaagagccgagatgatatcccgccatcggccacttaagcaaatgagaccctcttcttctccttctgtccttcgcctgccttttccggcttgcccccgctagtcgatccagccgagccagagggtttggatgcctgtttcttcttctgctttcgttcccgctgtctttccttctctttttctatcagaagtttcttggtctcacgctagagaaagaaaacagatatcaaaatgcgaacctgattggtagagacaacgtttgacgtaggagctttcaaactaacgtaccagaggagccgaccgttcgagcttccgctgagcttttgtctttaccgagctttcagcgatttctttcactttcgtctattttgatgcggaggcaaacttacacgattagccacgaacgatcaatgataagataattgttagggttggagtgaataacgagacataccgtccgttgtaatttttcagctcgttcttcgtccttctttccagaaatctgttcgatgatgtctaatagcgaactctaaagacaatcggcgagggtgagattaagagttatccatcagctttaaagatccttgcgttctaccaaagatgcacaacaaaccttttcctcgacaaacaccttgcccttcttgccactcttctttctcttaggtgttgatgagccaggtaacggttttgaaggtgagctagtgggagaactgttgacaagcgttgtagattcagcctccattgttgcgaactagctatagtgtgtgtgtgtgtgtgtttgtgtgtaagaagacgttctctgtatgtctccagaatctccaaaactaagaagggaatcaactggtggattcctcaagatttagaccttaattgaaaagctgtacaaaaatcataaattcaaaaattctgaccaaccgacccaaattctttcttgcctgcttcttccttagtcgacacccctcgtagctcctcaactgtccttctgtcgtttcttttctcttcttttcctcgttttcgttgatcatctcggcgtctagatttcattccgatcgattcatcgaacactttagcttcctagacgtaacataaatcttgaaacacgttcaatatggctgaggaacgagagatctcccggctttaccgagtcaacagaaccatccacgagctcgtttcggatcgcgtacgttccttcctcctaccggttttatcattctcccattgaagcttctgtcaggagttggatggcttacttgtcatctttaattttgcttcttcctcatcgtttaaacggatttgaattttatttattggattggcggatgcgtgtgtgtcgtgatttgggtatatggtcgaccgatggtgaacgaaaactaaattggactggactcttatagggatttcaagttgcagaagatgagacggatatgagttttgaggatttccgaaatcagtttgccgccaatggatctgtcgagtgagtctttcattctttgttctctcgtggcctatgccgtgttccgttcgcatgtcgcggtatttttgttcaagcgggaatgctcccctcccctttggcaaattgaaatctctatggagcgaaaagctgactgctgcttgtttatcctgtcttttgacttggtttgctgtgtggtaactgtgactgtttcttgatatcttcctttattttattttattggtacttggtctcgaaaagtcgaaaccagctcaacttctggacaaactcacgtaaagacccgacagactctatctttatcttttattctgatgaaaagaaagtaggagtcaagaccatgcgaaagtgagcagcattcttgactttctggccgaggagctcagagatttgaatgctcattcaagacgttatttgttttgtaaacagattcattggtatccttgatgagaagcagattcgacgaggtatcatcatctactctgaagcaatgtctcccccggcccgaaaggtttgtctcccgagctttactctctcttccaatccgtatttgccatttatacaaatcgactgactttcgacttgtactttctcgaccttggatctactcatctctaggttatcaactcgatgggacaggactacaagcttgaggagtacgccgaggcagatttgctcgtcaacatcactcaccaccagctcgtcccgcgacacgaggtccttcctgagtctgacaagaaagcattattggagcgatagtcagtcatttgttctctccttttccttcccattctcgatgatagactggaaggaaactaaagttccaactctttttcatgtctcgtgcgatatattcttattatagccgactgagagagactcagcttcctcgaattctgctttctgatccggtagctaggtactacggcctcactagaggacaagttgtcaagattacgagatcttctgaaacggctgttcgtctcttcttttgtttcttttctcgtgacctgtgtcctgtggcctttgagatagcttgaatcgctgattactggtatatctctctttcctcactttcttcataacagggtcgatatatcacattccgtatagctctataagctctgtcatatcgtcgtctttcttcctttcaatcctttcgtggtacatcgtaccgctctcgtccatcattccatctcgagggggtttctcttttccttctctctacgcggtagtttgtgtggtttctttcatcattcccttctctcttgtccttcttgcccttttcagcaatcactgaactaaaaataaaacaatacaagaaggttttctcagatatactctcgtcgtgacaagccaattgaaacaccttttcggtgcttccttttgttctcttcacttctaaccacacagcacggataacgagattgtaggaggtaaacagagcaaaaaagaaagaaaagatgaacaaacgtctgataagcttatttgtgactattttatgatcaagccgtatgaattaccatcctcccc

SEQ ID NO: 460 - DNA, 4344 bp, Xanthophyllomyces dendrorhous
ctcccccacctccaaacataccacctccgggccctccaccaccatggtgtcctcctcttccgccacctccgaacataccacctcctccgcctcctccgccaaacattcctcctccaggaggtcccggagggggtccccactgagaacctccaccgccaaacatacctccagagttatggtggcttcccataaacttggaagctaaaccagcgatcaaaactccagctccagctccagctgcgagctattcacatgtaaagaaaggagaaagcttagccggcccgtattaaaaaaaaaagagaagaaagaaagaacagtgctttcgggagaaatataaacgataccttgccgaagcctcgatcctgcgttcccgtcacagtccgagcgctatcttgatagaagagctcctgaccgtcattctgtgcagtagatgtctgttgctgttgctgctgctggtaagtcggctgactagactggtagtaagagccggcgttcccgctctgattatagtttgattggccgcgaggatcctgccatgtaggagttggattggaagagttggtgtcgacgtagtagaacgcctgatgattactgtcccattctttgatccatccattaggaagaggctgttcgttgctcatgatgattgtgatgtactacaaacgaagaaagaagatgggattaaaagagagatatggtaaaggaaagcgatgaactctccagaacaagctagctttaagagaatcttgcgggagggttgccgatgtatgacaactgcggcggtcgcagatggagtgggaatgacgtaaggatcgagggcagttcactgcgcaggcacattgcactttatcgccacacacgtgagtggtcagcccaactgcacagcctctgttcagccaatacatcatccatctccttcacattcgccgggaaagaacaatcttttctacccgtcctatccgtcgtccttggactgttctgcattcgattcatacagactcaagctcacgctaacacattcgtcgttgtaatatactgtactgtgccgcctttctcttaagctcatatggataccgatcatcagatccgtcaactgcaacaggacctcgactacgagcggcgcgctcgccagatcgatcagaaactgtttgatcaggaaagaagccatcaccttcaggctgcgagatcagccagtgccttccctgcttcttctatcggctcaccgaccacatggggcagccagaagccgcttccggttgctatcttttgggactacggtcagccttcatatccgtgtcgatatgaatcttggtgtttagaaaaatgttgactgacgatctttatctcaacgatcggcgatggcgatgggtgatggtcgtctttcggctacagaaaactgctcaccacccctggcaacaaacccttcgctcctcgtcaaacacctccgaaagatttttcagccgttcggtccgatctctttcattaggtgttatcaaggtatgcgctcactgcttctatctttcgccaccactctaacccgattctcaaactgacaaccatggttgttttctatgtctcgttcttcttcttcttctttgttctcctgaaatgaactaacagacgtcggcgcccagccggtttttgctcagacccttcgatccgggctggaagcatgcgctgtggaagtcagagactgcggtcgatggggtagaaaagatgtcgcagatcgtaaattcctacattgcttctctttattctcacgatttactgagctaaagggccgtctcttcattcttctcttttctcattctgcagaccatatcatgaccgacatattcatgtacgcattagacaatcctgctccggctacaattgtcctcatgtgtgttcctcatgattcttcagctttcgtcttggctttccatcgatcccgcgctgatgtgtctgttgacccttaatgttcttagctctggcgataaagatttttcgtatatacttgcaaagtgagttcttgtagttaggactccatctgcttcatgtcgtgcgcacactgatctatttgtcggtggttctaccgctttttttctgctctaagtctttgcaaccggtttgtgcattcaccatgtctgctgcaacatatcttttctcactggtgccctttttatttattttttccgatctaaacagtcaatacaacgtgattttagtcgagaaccagatcggagctgctgaagagcttaaatcttctgcctcccaggtctacaagtggcgcgagcttcttcgtgacgcaggcgcctccaaaggggcttcccttcctcctactcttcctatctctagcataccagccccgatcgtgttcccgactccccgtcgaacaagatcgaactctgatccgaacgtgagcccaagcgctatccctactgctctccatgccaaaccagattatgaaagtcgacccgtcctcaacaagacatctagctcgtctactatgatcgcgcccgtaccggtgtctacaacgacacctactctaggaggtggcttcaagatcagtgcgtttggaccgctgttggatgtgttgaaaggatggagtgcggagaacccaccattgaggtctgcgatctcgccgttagttctcaagaaggatatcaatgcatttgcgagagccggagctggaagttggaaggattatgtcgacaaggcagagtcagctgggtaagtctagattctgacttgtgcatcgtgtggtctttgtgtgatgtcttaatcacacgacgtttgtgtcatctgttctatccacaaagactcgtcgtccttgcctccggccctaaacctgggatggaaactatcgccctgaccaaagtgttcgccaacaatggggcatcctcgagatcaaccgttcctccatcgtccccgatctctttcaatccgatcattcccaattctctatcaaagctctcccgggcaagctccctttcccaatctatcaccgcatctcacctcgaatcttttgcgcctgatcagcctaaagctccggattcgacaagcacatcgcccatcctatctgcccgtagacggcttttgaccaacacactcgctaaatctaccgatgactccatccgatcgacctaccaacccctgatcgatgtcctttctgtcttaccttcatcgcctcctccccatcgatatgtcgtcagtcaacttctcaaaactaccacgaaaggctcagagttggtctctcggtttggctggaaaccctacgtggagaaagcccaggatcatggattcgttcgtacaggaggatcggttgatgatcctcttggtcaatggatggaactcatgcccgctttcaagtcgacaggtgaacgggtcccatttgacaagaaaacgcccgtccctccgttcgcgattcatacggccgagacattccgaccgttgctgctctctttgggttcgctacctctaccttcgagctcggggaagacaccagccgcgttgatttcaagggtggccgggcagttgaagtcaaagcaaaaggaggcattccagttggttggagtggggaactttaaggattatctggacgtagccatcagactcggcgtaatcagatgtggcaagggagtggatgagagtggtgattgggtggcgctcaagaaggaatacagaggattggcagggtatggagttcccgcgcccagagtggtcatcaagaagccgaagacagcagaagagggagaccgagctgcagcagaagaccaagccgtggtggaagacggcagcaatggaggagagacaaagaacgaggaagaaaaggaagcgaaggaggatggggtggtcggttcagcacaggctacacccaccagagtggtcagccagaaggaagatgtaaaccgactgtttgcatctatccacgcctctccctctcctgccgtcagcttggcgacttctttatcgcgacagctagagagtggatcggatatgaccgagacggcgttggtaagctcatcgactataaatcttccaccggtgaaggagacgacggcgctgtttgatttcatcgcttcgcctgctttcccgaggagaaaggacgacgtttccattaaatcggagttgccgaatgaaaacacagtgcctgtgcagattaaatctgaagaaggatcttccccagctttggcggcctcttcctcttcttcctcctcctcctcttccgacgaagatgatgactcaactgcttcgagaccatctacccccactcgcggagtgttttccagaaacacactttcttctcctaatcttgcgcctaactctattcctgcgcccgcccctacgttttcctcctcatcc

SEQ ID NO: 461 - DNA, 7729 bp, Xanthophyllomyces dendrorhous
ccccgcccccgcgcctgtatctgtctctgcacccgatggaccgtcggacctgacacccaatctctcaggaggtttacctccggatagaaagaaattcacattcacgttcactccgttcggtaccgctcgatcgaatcctcattctccctcatctttgtcttcatcctcgtccccgccttcatcctcatcttcatcttcatcttcatctttggctgcatcctccttgacggcggcggtgaagagagggactgtcaaagcaggtaacgtccttactgacgaaaccgactcggccgagccttcgcacaccccatccccatccacgtctggaagaacgacggtcatacgaaccagagagggtcctagtgcaaatatccaaacatggtcggaggacccgacggtgtcgagaatggagataaggacgggaacaggaacagggaacgatacgatggacagaccgacaaagatcgagtttcagagaacaaagtcgtcgaccacgacggctgctgaattggcagccggtctttcactctctttagaggactcggtttatttcgtttagtcttttcgcttcttcttcttcttcttcttcttcttcttcttttctcggcggaggcggaggtggttatgacgcgatccgataggtcgggggaagatctcgggataggttcagtggatcggccgaattagtttctgcacgtttttttatatcatttatctgctctgcactcttcacacgcgtttgtacatccaactatatccacatccacgttcggcattcaattcatcggagagagagtaaaattgattttagagtttgcacagatacattttcatgatcatcgtcgtccttcataggcaatcggattgttaggtcacagttactgcacaaatcccaacgagctacagagttgagaaagaaaaagagaaagaagaaaaaagagaaggaacaggataacgaatagatacatagatgatgaccgaatgtctttgctatcttttttttctttctttttttcttttttctttttttctttctctttcaattgaactcctcatttaattcctccatctctctgtacatggaagtgttcaatagtatcgacttcctttccttctgcattccttgcctctattgaaaacgatattgccgccgttggtgatgcaggtagcgttcaagatggatatgaggagaaaagacaagatgggcgagctgcttatccagagcatgaatctagtatagcattcgcgtggttctcacaaccgcgacagtcttgtctaggtctttctctttttgatataaattaaatattaaacgacgacgtccggtagggcccctccaacgagcgatcggtccaggcgagcatcacagggaggcaccgtgaaacacagagacagagggtcgaagagagggagagggcgtgtgtgtatgtggtcgtggtcgtggtcgtggttcatgaatggtcgtttgagtacagggaaaggaagcgacagtaatgaataaataaatcctttgggtttgcctttcctttcaagttctttattctattttgatgatttgtttattggttcgtttgttgtttagaacatcgttctttgattcgagcttggattggtctggtagttttccgtatggccagcctccaccccaggtctgaatgcatccggtcgaagtttcttctttgggacgtcccaagactgtccgttcgattgagaggctagaaccgaaacgggagcgggaagtagaggtctatcggggtcagtctggtcggaatctgttcttgtccgtccggtcgtctggtcaaattcgtgatcaccttgtttcttccctcgcgctcgaagtttaccggaccgcttggcgagtagtctggcgtatcggaggccacactacagagagacaagaagagggaagagaattcaatctcccagccggagacgcctttcgactgactggaaaaaggagacaaatgaaggaaaaaaaaggagaaaaaaggacgaacagcattacacagatccttcaatccggtctctccttttctccactctgggctctctgtgagtccacagctcgcacacttatcgacccctcttggtggcctgccttcgttcctcaggtctttcgccgcttttggcgctcctgatgaagcgacggaccctccgccgaggccacctttgtgaggggcccgtttggagatcagcgaaatcgatggtggtgctagtagtgatgatgatgatgatgacgatggcgagtttgtcatatccgactttcgcttatgcctgggcttggtcttgtctttgcgctggtcctctggttgagtagttggtactggggtggaagtcgaagatccgtcgaagttcgcttggtgataaccgtctgatggtggaggtctgatcgggggcctggtctctttcgaaggagaatctatcggcgagggtagactagggttgggaaccatcaaagaagaagtagtggccgacggtacatcggtgatcgtcggtttaggattgaaagggaacaagggcggagcgatcgatggggcgacagtacccaatggaggcagcaaaggtgcctgcgacagagttgacagtgatgatgataacggctgtgtgcctctatgtccctgggtgacgacaccataaccgaatccacttcggtcgctcaacccattcggctcacctggataggcggcgatcgggaggataggatccgttggaaacccactgagtccgatagggagatgtgcgcgggaagacggtctgtctggctctggatctgttcggtacattggttcttgtcctaggctaggaccaggtgatcgctgaggggtaggcagtgatgagttcaggtatgcatcctgggcgaagggacgagaatgcggcgcagatagcggtttgaatataaagtttgtgggtgtgtggaattgctgttggatcgtctggaaacagcaaaagatcaatgtgccttttggaaggagcaggagcagaaacagagacggagacaaaaggagaaagctccagatattagaaaaggcagactgccgaaaagaccgaaagcaaacaaagaaaaagaaaatctaaccataaggaatgaagacactctcgatatgtctcaaacaaccctctgtggcaagagtatgctgcgctctgaaccgtttggtgcaagtcgtttttgcgtcgctcattggcgctgagtctaggtcaagagatatttcgtgtaatagtctttgaaagtcttcttcgaaataacttccatcgaggtgaacgatagaccggtcgctatcggggtgacgtggtggggggtgagaaaacaaaatgtcgtgatctggggaggcgaggaggatctgaaaaactcgagtaggggcttttgaaaataagaaggacaaatctttaggtctagaaccgaacgaagtgggctggtcaaaagcgaaaagacttacggaaggcggggacacccggagtgggattctggcataccggcaggctttccatcgcgttccacaagtgtttaaccatctgacaaagagtgaagagaaagaattgcaggattaaaaatgttttagcctctatgggaatcactacgaggtgaagagaagagattagacgtacggattctcttataaagctggttccacaccagtttgaccagtcactcttgatttctttgtctatgtcaagcgttgggtctttgtctgaagaagagggagatggaagaagaaaaatagggaaaggagaagggaaataggacgaaaaggaaggcgagaagaaagaagaagggaaatgtgagatcaccaaacggtaggcatcagatcatacggtcgagtcaggcaatacgaatcgacgtcttcttctcaaactaaccgacggaagcgtggaagaaggcgagtacgataccatcgccggcgacattgagtacaagatccagcgccagataattatcttctagaagaaagtaatgaccatccctgtgatccaagagaaggaggtgagacaagagtgatgtaagagacggaaaaaagtgagaacagaaacggagagggacgtacttgggctgttccgggttcgtacaacccaagagctgacgggccagagggacactcgcgaactttactctgtttgggaagggaagagggattgaactttggatgtcggtcgatcgccaggcgcagaatggaaagagagaaaagagaggaggagaattgggatgagccaaccttgtgacggtcccggagagattgccaatgctgacgacacctctgagatctttcatgccctgtttgacctcctcggctgatggatcggtttcagatttgaaagttggcgaatttagtctcaaagattgatgaaacgagaggaggaagagagagagagagagggagagagagagagaaaaaaaaggacacagggagaggaaggaaaagaggagaaagaaggaggtgtacaaatgataaacgcgaccgaagaagaccaggacgacgaaaggacttacgatgtaaatagtcaaagatactggtcccaatcatggacatgtgttctgtgcccatgtggaactgcagagtgggaccaaggtagagaaagtctaggttcagattgagaagcgccctgtttagtataagagaatcgtcacttctgagctcttaacttttcttgttatccgttttcaaaacgagaagagaaaccaatcgctcaccagtctttgaaacggacgtagatacaagcgagagtgtatatagacgcgcgcggagaggacaaagagtcatcagcttggagccagaggaaaaaaaaatatgagcatgaggagcacgaagagacgtacaacacctaatctggcccacttctggaacgttatacggttcatcatccctaagtactctacccatagcgctcatgtcgaccggcactgtagtctctggctttattatcggtgggtacgtattgcgggcctgggttgtagcatgagctgcagccgctggctgaaaggcctgtccctctggcttggacagagtagaaacagaatggtggtagaatggatggcctggagcaggatgtggctctgtttggaatgctgtttggcttggtgattgatataacgggtggagcggtggctgcaggtaaggttgtgagtaagaatgtgagaaagcttgaccgtgggactgtacaccgttcgaccttggcctcacgtgtgacggtgggtacggatggtagaggtgctgtgaaggatacggattaggaaacatgagagagagagtgtgtgtgtgtgtgttctctgttgaacgtgaacccaagaaggcacaacgaaagaaagaaaagagaagaaggttaaccccaagcagaaccggatgatagacggacgacgaaacgcgatgggagcgagtgagcgagcgaaaagattaatatgaacattctccgatcatattacaaaggattcgtattcgacattagaaaaataggtcagctcgccagcccgcgccactgggtcggtcgttctctgggcggttggcctggcgcagactggcgcacggatggacggacgagaaggcccggtcgatcggatcgagggccatcgatcgattaggcgcctggtcggggcaggcactacgcagcgtagggaatgaaaggggcaaaacccaatatatatatatatgcgtattcatgtgcgcaggcctcgaaggcctctcgtcctgtggggtggggtgcctgtcggctatattaggtgacgtgttcggcgcgcatgcataaaatccctgtttgaaatcatgtgctcattcagcgagctgttacccgtaagtttggctgtggtccgtgcctgtggtcacgtgaatgaagggtcttgtgtaatgatatgtcttacgtaattgccctgccctgcccgtcatctctgccctcgagtaccttgcccgggcggaaacccactcaatctctcactcgttcgtacgtggaacactcacacactcacattcaagatggatggctctacagatcaatcgtcttcagtcatcccagcaccggcaccaacatcgacaacaacgacagcagttttcagacctttagaacataccacacctccaggtgtgtcatccttctcctctttatccgtcttgatgctccccgtgttaacgtttctagcgcgcgctctctctctctctctcttctcatctaccatttattcctgatgatctgctcatcccagccgaccttcaagactcagactttgagctctcaccggcagaaatacaagcggcgttcagagaggtcaccgacaaagctgctcagaggattgtactccggaccggagcgatgagagccagagacgaggctctcggctcaaaggctaaacctgtctggtcaaaggtgcgttattttcttagccaatcttattctctagcctattcttgctcattcttgtcatggcacttctaaaaactcattggtctttgctcatctatcttgctcctcctggaaattagacaaagatcaggatcaagttttctgaccgaacgcagatcgaaaggatctttccttcagaatcggccatcggcgtcctctatgactttgttaggaacagcctaagtgatgaacatcgatcccaacgctttacactacgtacgtccttctcagtttgttttcacctatctccattcctctctcgtcgtcttctgtccatatatacctcggagtgttgagaccagtgaatactgggaacgcccacaatacttgaaaccatatgagcgcagttcaaccgccgaggacacctattccagaaacaccaccgccgccgccatcagcaaacgcgcccaaacgagtacggccttccgtcccaccggcgcctgtgaaagtgacattggcggaccatgcgttggccccctcctccgtcctgttggtgtctttcgagaacccagaactgaaccgttcgtctcttttcttctttccttctcgctcagtctttcctctcgatagtctcgcaccaaacatagtctgaggatctgaccgccaaatccacttcttgcctcgctcgttcctatctctgtcttgaaaacacacacacgcaaaaacaggatcagatagaccggcccctctactcccctcccttctctcgatcgcgacagatcttccgaaaccagcccctccgtccgaaccttctcctgtgcctgcgcccgggtctggatcggcagatagaacaggtttaaaaccggcaggaggggacaaggcgagagggtcgggaaagatcccaaaatggttcaaatcgggaagtaagtctcttttctttccatctggcaccttcaaaaagacaccagactgtagcaggatgagaacgtggatgagccagacaccaacctgatcccttgttttctttcctcgctctctcttcgttttcataagaaaaatgaaaacctaaacgagaatagatccccctttgtcaatgttcctccaccttgtctctcctcctcctccccttcttcttcttcttcttcctccttgcctctagagaagagctgatggtgatgagagaatgaaaggcttatgtctctctttcagaagaggattcatctgttgtgtgtcatgttgggtgaaccgaagaatagacttgcaagaaacaagggaaagagggagagagacagagagaggacggagaagaacgtgagaaggaaaaaagggagaatcgggatcgagatacgagagcaccgggagtttattacaagagaatagaattaaaatagaaggaagagggaaggag

SEQ ID NO: 462 - DNA, 35582 bp, Xanthophyllomyces dendrorhous
  misc_feature (6658)..(6667): n is a, c, g, or t
aaagagaaagagagaaagaaaacaggcgagtaaaagaagagcccccccaaaaaaaaaggttgagaccaagctcaaagaaaagagaagaatgggaagaccgtgtgggaagagaaagaaaaggtgagaaagaaaagatgacagaagagctacaaggatctatccacttttctttctctagacttgttgcccgaatacctgtccaccggacctcatccctccgatgtttcctacgtttcctccaggtccagcgacaccggctcctcctcctgctccaccggcggcacctgctccggcctgctgctgctgttgttgctgctgatgttgctgttgctgctggacttgctgctgctgctggacttgctgctgctgctggacttgctgctgctgctggacttgctgctgctggacttgctgctggaccatctgctgatagggtggcgtcctgtcctccaagaactcataggccaggttgaaatccttttgttcgactctggaccaagtggcaggatcgaaaaagatataggtccctctctctgaaatgttggtcttttccgtggcctccgctcggggatccttcgtcagccagtaaccaatctctttgtgccaacgccaatgtcggttatatctagagaacagagcgagataccaaaatgcatgagccgtcgagacttgatgaactgagaaggagaaaacgaagctgaagagacagagaagaaatccgtgaacttacaactctgaagcagctagatcctgcaagacatctctcgggcaaccgtaaaagatgtagaacaacgtttcctccgcaaacaggttcatctttccttgtgccggtgacggtcgaacgttgtaacaggatggagtgtggtactcttcttccagatgaacccctcgagttaatgacggttccgcccaaggtgccaccaggctcgacgacaatgctctacaagatacgcgaaacattggaagaaaacgcgttcagtcacaaaacccttgtgaaaatatgaatcctcgaagaaagaaactccatgaaacagactcaactcgtgcccagccatgtttacaccgagtgacatgagatccgttccgaaagaaagcatccctttgtcttcgtccgcgttccgtatggcatgaaggaaagcagcaagtccccacttatccgccggactcgctaagatttgctcggccgggctggtctggctaggaaaggcgccgcctccggtttctggccgttgagatggatgcgggccttccgtcggtactgagtcgcgtatgaacgcacaacaaggaagagtcagtttcagcaagggagtcgaaggaaagaagagaaacgggacagacatccgtttggtaaactcattgagttgggcggtaactgttgtcgcagtgctccaggaggaggcgccaaagaggaaggtgtggtattcgatccttggatttgtaacggccaggcttgctgaggtcccgaggtagcaagcttcgtagcataattcgaattctgctagaacgagcaccaagaggcaagaccaaaccatatgtatagtagaagaaaaacagtcaaactttgcacatccttctattacacaatctgtgctaagtcagtatcggcagaagaaagcgtgaacgtaccctcgaatcttctgtgacgcctctagcaaacttccctcctccgccaacaacacccatgccagcgaccgacccgttccccagtccgttcatcatgacctgtccgtctcctcccaatgccgggaaatcatctgcgttcagtccgtttccgactgcaccggctccgccttgacttgactgctgttgttgctgttgttgttgttgttgctgatgctgttgttgctggtgacccggattcgatgctagagcagcatacgtactcggagcttggctgagcgaactcgaagatgtcggcacaccccccaacgcaggaaaatctaacggatctagaccagttgtcgatgtcggattcgtcgatgcattctcagaggggtgagaggagaacaaagattgatgggaaggagtggttgatggcgtgcctccagtttgtgaaagattggtggatggtaaggaggattgctgttgctgctgctgttgttgttgttgttgttgttgctgctgctgctgctgctgttgatgttgctgttggtgttgttgatgctgatgttgctgttgctgcgaagggtgttgctgcatcgcgttcaaaaggttttgttgttgttgagtaacacccgatccagcacttccagctgatccaaaaggaaagccagaccccgaccgagggttggttcccacgagcccacccccacttagggggtaaccagatccattcccgccaggagtggcagccgcaggcgtgcgaggaccttgctggtgagggagattatactgaggttgttgcatgtactgctgttgatacggaggtccagtgcgagggaaaccaggtaaggatggagggggagcaagtgccggcggtctgtttggaggagcgcctggatatcatcatattttttgacatggaaggaaacaaacgtgcggaacaagcaacggatataaaggtggcgagagtgttgaccgaatccatagcagagaggtgaacgggaagaagagaccagatcagaagatgaaaatcaccaggagagacagaaacagacgaccgatcggaagcgtctgtggcaaagacagacacgtacctggtcggttcataggaggaaaagaaagctctctggataggatgaggagggaagacggagcgaggcggatcgattgaacgaaagaaagcttgaggataaaaggtaggagcggtttctgtttgaccgaccgaggcagagcaagatacgaagggcgacaccaaagaaggcgaacggaaacgatagaagaaagaaacttggaactcgtcagatgggaaagaacgaaaaagaccgcaaacagaaagaagacagctctgtttatctctcctccttctgaacgcttcctcataataatttggggcagccgaaagaccagaggctcatttacagtctagcatacagctcactcacacgacgttcctattctttcgacaacggggcaataaggaaaccgagatgggatgggtcaagaggatgctgagaaggaggaaaagaaagaggtgagcgaacggggcaaaagaaggcagagttttggctagttacggtttcgtaaccatctgcgtgtcaagcctacaatatacgcgcttagtatacacagactatgcacagatcatacacgaatcatacactgatcatgtacatcatatacagatcatagtctgagtatgatcagactacagtacgacattaactactggtacatagagctacagtttactcaaggggtatcctaactgctcctcggtttccctaatacgctcgggcgtggtcttttgttcaggagcatagacttcataatccggagggcgcccgaaagcgagcatggctgcttctacgaggatcgatctgtagacaggtgaaagacggttcgaaaggtgtgcaccgtgaatgatcaagtgcgaactcaggagagagaaagcgagaacctacgcggtcagaccgatcacaggcttcacacctagatgctctctgttggtcaagaagctttgtttcacgaacaggtggttaaatggaaacacagaactgtcagtcacatccgtgagaagagggggaaacgcgttgtttggagcacccacccgtgcagtctcactttaccgcttccccaagcgacgtcggtcgagaagtgaaagtcatccatgggcgagagctcgagcgaaaatgatgaggcgctggtggtgatcggaagaggaaacggtctggtccacgaagctggcgcgtcgtatggagatcgagatagcagaaagtagtggagaggcatcgagaacagatgagctacctcatccgaattgatcactggctataaattgagatcctggtgagttgataagctgggtagagtccaaaataaataaaaacctcaaacaggagtccgatagaaacatacaatgatgctattgtctagaagaagaactaccacgctgtatgaccgagaaaattcacgctctcattggtcagcatgaatcttgatgagaaactcgatgtactagaaattcacaaacggggtgaccaaaagtttatctctgctcaagaagacggagaggttacacagatggagaaccttctcttgatccatcggcagaccaatctcctcgaaagcttcccgcctctgtagattggcgcgcgtccacgcatacacacgccaccctcagattcagctttgggtgaacaagtaaagaagtggggagatagataggtaccgaccgctgtgaattcctcatccgtgtcccctggatcagccttacctcctggtagcgcagtatcgttcggataatctcttagctcatcagatcgtctatttcatagtaggtcagactactttcagccctctgttgtggacccatgttgcaactattgacacagcatagactctcaaagccaaggctacgagacgtcttttgttaacgtctagtcatgattaaatgttgataccttacctgctgagcaccacgtatagatctcctttccttcctacaaacagacaaaccaaaacggatgcgtgctttctcggtggaaagttgaacgcgctcgcaggatatgttggcggaggttgagacgcgagtctctgaagaacaatctcggtttcagtcggataatattgctgtttgattcgatcgattacagacaggcatgagagattcgagttgaccatcagtggtgagcacgtgtgtgtagacagacagggatcagtgtctgtaagaagccttggacgacggtatgatgaacgggtctcataagaagtcgactgagatgttgatggcctgacctggccgcccgggttctgtccggttgccggtttaccgggtgtaaccagtgaccgttagggttgtggcagacaccgccttgttccagaaactttgacacccgtggcttacatgatgagacacgtgatactacgccacatgaaacatgactcagctcaccgctttagtgcatataagaacggccgtgttttcgttctcttatccacttcccccgccacccaaccatcatcttcctctctttcctctctttcctttcgttctcccttgtgtttgttcgtgggcttcgttccccgatgggcatctgccctttccgtgttcaccgttctatgatcaattttccgaatctttgcgttcattgtctcatgctttaggttggctttactcgtggcagaaactccctttactttacatcctcgcttgaggaggtaaggggaaatgatacaccctcggtgtgagtatcctaaagttggctcttgtgtcctgtggatggcttgatcgttccaaccgagcgaactcctccctggatcgaaagaacatgaatgttcgtagatggaatcgagatcttcatcgaaacttgttcccttgtggtgtggcggcgtttgcttgagtgtgaaacttatcgatcgtggcaggttgacaacagatgactgaataaaaagttgaagaaagactcaccgttataggatcgtttgatctggttatacatagcatcgagtctcattcttctctggctctggctttttaccagctacttttttgctctctccagcttggcttctttcacgttcgaaaactagagagtttctcttgttcactcatcaaccctctcatcatttgggcacgtagactttcaatgtggatgtttctcattctctcttccaacaactgttcttgagatcttgagcggaatatccctcaacttgaacgacaggacctcttgtttctcatcatgtttcctgtgggctcaaacctttctgttgttctttttgctgccttaggcttctaaagcactgccaaaagaccgaacaccatagggtttcaagcaatcttttgcttctgttttcaaaccagaggaacgatagcgcatatgcgaacgtaacgatacaggctgttaacgatcgtcagagacttatcaaaggagatgcctcgtgatttgaccaggatgaagaacgccgaaagtggaggtgcctgcggttggaccgaccccttgtttcgagaagaggagagagagaagaacagagtggtagtgaccgattgagtcggtctgcattcgagttctgtttggcgagatggacagaatggaatgacgacagtcggatgagttttcatcctgctctctactcttctggtcttgatttctttttgcttgtttcttttcatccttcttgcctctcttcttctgttgtaagaagacttcaagagaggtttttttttcttttccattctctccctgttgtgttcgcagaagtttggccttgccacttgatgtgaagaccacaaggtgacgttttcttgatcacgatagagatccttttcaaaaacgatggagagtcatagatattctgaaagggatactccttctttaaactacctgatcgacgtgagcctttcgtttgtactttgcctgtgctcgaagccatttcctgtggagcatacatcccgggacccagtgaacaaagaaagtgtgatgagatcgtgggccttctcaatctgtgaaagagagtaaaggaggaagaaatagagagaaagaaagaaagaaagaannnnnnnnnnagaaagaaagaaagaaagaaagaaagaaagaaagaacagacgaacctgtagcctgataagctgtagatcttttcaccatagtaatcagggattgggtgagcggcagcgttgacggactggatggtggggtcggctctgtgtttagcgatgtgatcgaagaacctggttccgtcaggccagtgataggcagagagcagatatgtcaagaaggaagcgaacaacacagaaggagttgggagcaagatggtccgatacaagagtcagtcagccggatgcaatctatccaagagaagaaagagtgtcgggtgaaactcactttcggtccatcctctcgatagcacttgcgtaccgcctgttgtatactctccagatgaacccgccaagaggcgtacccaggaggaagccaccaaaggcgctagcaaaggtggccgccatgtagacgtacactggctcgaacccggcgatggaggccgttgggtcaagctcggtgttcgcaaagtaggatactccaatcgtcatctgagtgcgtttcgacaggaacgatgggtgtccgaatcgataaaatagaagagcagagatgggaagatgatgacaacagagccacatatcggttagatcagatgctcagaagggaaggacacaaagtaacatggggaatggatcctagtgagatacggaccccggtaaaagtggtaggaagcgcacagagtgtctcgagccatttcttgcttcgacgtttctggaggtactgctcccagttgagcgtatccgaagcagctctggatgatgacgacaccgatggcgaggcagtagcagatgcggaggatgaagtaggaagggtggacgaagcggacaccggggtgatcacaggcttagttccagtgggaggaggcagagcggcaaaggatcgtccgagcggtcggctaagagcagaagcgagcgagagaggtgcccgggaagacagagtagctgaccgaagcagggttctgtttaaaaagacaggagcgggagacatgatgtgctttgaagaatggatacgaggatgataccggctgatggtgttggtggttagaggtgaagaagcgaacgtcattctttcccccgcctggtttcttttcttccagccaagccgctctcggtttcatacacacacacacacacacactcaactgaccatcagcaacactgtctctctcttgttatgtctgatgccaatgagttcgtttcctgtttaccatcatcgtatgtttcaagtcgaaatccagatttgaccgttctctgttgaatatctcggagagtagctcgtctgcgaacggacaccctgaacgctgtaggaactgctcaaacaatccgattgagtatcaagcacctggatgcaaacacccatcgctttgcaaatcatgtgctatgaagcaaggtatgatgttctgcatctgtattgtttatattggctgtggcatgtctttgccaaacctgaccgactggtttgctgggattgtctttcacaaacagccacgggaggaaaatgcaaggtgagcgatcatatatcatccatccgatcaagtctcatcctgtttcttcatcttccttgacattcgctgacctatcgaacgaacgtactctctgattgttgtcttgcctccttccaatcaaaggtgtgcggagaaaagttctttgaactgcagagagtatgagcgtccgagtgagtgaggtgcgcagaggccggatgttacatctttcaatgaacgattccatgcacatatatctttctacataagcgcgagtggatccagtgatatacaatgcaagcggagagtcacatccagcctgaggaacaacgacagtacgagaccaagccatctatggtgatgatgagaggcaatcagattgaacgagatcaaccccacaacggcgatccccgcgttcaactgaccatcaccttctatcaatcctctcagtctgccttgaccaccgttcatccgcacagatggtcaatcagttgtccagcaaagtgtgcgacatccatcagcctatatcgctcaagatgtatgttcccgtttgataaagcatgtgtgttgtatctggtctttgcgacagaagacctgacgagcaagctcgttcgacactcatccctgaacgctgtacacttacatacgctcctttcttcctcaacacccaattcgtctttgttaaacgcctggaaaactttcgttgggggacatgcacacgctcaagtgggtacctggaaggccagattccaaagagatcgttcaaacaagttctggataatcccgaactcaagtttgcaggcagtcaactcgagtgagttctccccgttctctatgttcaatccggatgctacgccattctgtcctgctcctggtggacgtagtattgatcggtggtctgtcttggttcgataacactcatgatacaccggaatgaaatggaaccttttcagtacactgtcggacttgtacatcaccgctcaactctactcggacgacaagccgttgtcaatcatctatcggacaaaacataaacctttcggaaagatctatctgttcgatttcgtttcatctgtttcgatctggatacatttcctctcattcttcttgctgattagatctcgggtgctctctcttcctgtttcgtctgtccatttatgaccggttgatctatgggacaaaccatagatggaacgagtgggtcaacctgccaaatcgactgtcatctgttccagccaacgcccagctcgcactcaccatctgggacattcaaggggccggccaggcagttcccttgggaggaacgaccataccgttgtttggacctccttcgtatgttccctatattgtttccgttgatccaatcttctcttagaatactgtgctgatctgcctcatatttgaccaaacggatgcacggccaagtgaggacgaagggagacagagacttctcaaacggggagagcaaaaatgctatgtacatagagaagttgaagcagatggaatgtccgacagtaagacgcctgccgaggtggaggcgaggaatgagaaaggcagattagaggacgttcgttcccttctcttcaacttccatcataacgcatcgacagtgctcgctaggtcttgtgactaacagtctgtttctgttcgaatgtgtagctggttgccaaatacgggatgaaagaccttcctcggccaaaaatctcgagcgtagaccaccacaacccacctcctatcccgccgccgccctgtccgccctcgggggtgcccccactgggcaactatctagattggattactaaaaagacatttgcagagattgaaagaatacatgctgtaagctcaaactgagaatacctatctctcttttccttcctcatggctggtttgggttccttctgggacctagctaatgtttcactcgactctggactctgatcgtatataggcggagacatcaagttcaccttatctctttctctacgtcgagttacctaaattcgaaagccctgtgatatttgcagaaatggtacgcgctcagatcaaccatccttctccgtttcttctcggcgtcttcttgctcgtcctgatgcttttcatcgtccgttgatgctccccctacattcaggagacaccctccatatcagcccttcacgatgctctatccaccctgcctcttccaccccacccatccggacaggccttgtcccaagcatcaacctctcaaacgcacacccaaccagtgaactcggtcctggatgacgctcaactctggaaagttctggatcctgatatggtaaaggagaacgtgttcgaggccaaacatcgaagattggtcagaagtcatcggagtggaccactagacagggagttgaagccaaatgcaaagattagggacgaattgaatgttcgtcctttcatcctttcgttctcttgccctttcgctttctctcaattcttgagccaaggtgaattgttgtgttgatgaccttgggggttctgtcttttcgattaaagtctatattgaactatccgccaaccagtctccttttaccagaagagaaggatctgatttggaaataccggttctacctctctcgatctaagaaagcactcaccaaatttctcaaatctgtcacttggacggacccatctgaagtcaaacaggcagtcgagacgctccttccactttggacggggatcgagatggaggacgcaattgagttgctcggaccgggatttttggatggaagagtcaggaggtatgccgttggtgaattagcaagagctggagatgaggtttgtctactgtttcgatttctttcctccctcctcttccttctgaggtttgttctgttgtcgtcaaacatgtctggacgagaactgaaagtttcttcttttcttctctctcgccattgaattaacgactgaatcgaccgaacacaatcaggaactccaattgtacctccttcaactggtacaagctctcaagtttgattcacacacaccttcagactctcgatccatgcgctcctttcactcttcacacaccgcctcaggtgcagtctcctctcctaatggaggaaccggtacgggtgggattggacagggcggaatcctctcgacggaggatagtggactagcagacttgttgatcgagagaagtgtaggtaatccggtcctagggaacagtttccattggtatttgatggtcgagtgtgaggacaagggcgtggttggtcggatgtacgctaggatcagttggaggtacatgacagagctcatgaaggtgagttgactacattcaatatccaatcgggtcccccagagctagcttcatggcaacagttggctgatcatttctcggaacgtttacttgatgtaatcgcctggccttgtatcagattccggacggacccaaacggagagacgttctccgaagacaaggcgaacttgttgctaccctatccgcccgtgccaaagaacttcgagcgtccaaagacaaaagagagaaaaagattgaacggcttcggaagtatatcgacgagcctaagaatcatctgtcgactatggcacctttgccgttgcccatcaacggccgcataattgtcaacggaatctctgctgagaaggccatgatctttaaatcgaatctgttgccgctcttactatggttccagtgtgcgcccgcggttccttcagccaacgcatcatcacctgaagatgaaccattggaaccagcaggagctaaacctacaccgatacccggatccaccgacccaacagttccaaaagctgaatccagggaggcgttcccttcatctcacccagcagtagatgctcggacagagtacggattgatttttaagaatggagatgacctccgtcaagatcagcttgtcgttcagttgttcactttgatggaccgtctgcttcgaaaagagaatcttgatcttcgtctgacggcgtacgatgtcttggctacgggaacggaggaaggtatgattcagttcatacccagcaaaacattggcggggatcatgagtgagtatggaagtctgttgggttatctgagggtcaatcatccaaacgagagaagtatagatacatatggagtggatccaaaggtactggatacatttgttcggagttgtggtgagtcttgaaagctggtttcctcttcacattacagagtatatcgtatcgctatatacttaatcattttccttctttcttgacatcgaagctggatactgtgtcatcacctatctgcttggtgtaggagatcggcatctagacaaccttatgctttcacctgatggttggtgcctttgctccctgtcatcgtgtcggtcatagatttccagactaaacacttttgctttttcaaccttgaatctcttgaacggcaggccacttctttcatggttagtccaccagattcttcattccactacatgattgacgtgcagctcacgatcctttctgatttaaaactctttgttcatcaacgtttatctcttaaagtcgactttggctatatcctaggtcgggatccgaaaccttatccaccacccgtcaaattaagtcgagaaatgatagaagcgatgggtggtccaacatcgccccattatctccggttcaaacacctctgccacacagcattttcgaatttgaggaagagtgcgaacttgattctaaacttggtggcgttaatggtcaattcgggggttcaggatattaaattggagcctgataaggcggtcgccaaggtacgtttttttccttccttattttcatataggcaatgcttgtattgacaacaaacgtcgatgattctcatctacgtttatatctgtatcggcgtatatctctcttcgtttgattagatccaagaaaacttcatgcttcacttgagtgaggaacaagcgatggagcaattcgaaggacttctcaaccaaacgagcttgttgacagctgtgtttgacgttatccacgattggtaggccactcttggattctgttctatgacggtcatcttatttctttattatccttcctggtttactgatctaactcctcttccttcatccttaaatgtatacagggcacaatactggagatcctgagtaggaaagaaagagaaatcgaacagaaacaaagtataataaaaaatacctgaattttcatacagaggttctagttcgaatcattcattcaattagctaaggaggcattcatcattcgttatactttcggctctttttcgatatctttcttctaaatttcttttatgacttcaaagccttcttgatcgtctgttttttgaacacgcaaaatgaaaaataattatgagaaccttgttcattcattgaagagtataaaccccagagagcttatcaatctccaactgagagaaagaatcgaaactcacagcttccatctcgtcaaaatcggacgtgtcaactcgagtgatttctcttgagagcgcggtctcgatcgcgttcatctcttcccacgatcgcttatcgtgcacgaacgcaatagccactccctttcgaccgaaccgtcccgttcgacctgaagatgtgaccgagaacggtttattcatgtggttcagtcagatgaggatcatgacaacgtgtaccaactcgagacttgaagcagatgaggaggaggaagatgaaggtcactcaccaactcgatgcagatacgtctctgaatccggctgaccacttccagtcaagggcatatcatagttgacaaccatgttgacttgctgaatgtcgattcctcgagcgatgacgttggtcgtgatcaacactttggtctttccatctctgaacccgtcgatcgtcgcgtctcgctccccagagtctttctggccgtgaagggaggcgacttggtgaccttcggcttgcattcgcttcgcgatgttatctgcagtgtctcggcgctagaattcaaagcgagtcagaccaaagcaaaaaaaagaaaacaatcgttcggatcaacgaagaaggaaagagctcttaggcagacgcaaataggtaagagacaaaccttgcagaagatgatactctgaccgattgtcaacaagttataaagttcgaccaagacgtcatactttgcttcctcgtccttacagtccatataaaactgcttgataccgtccaccgagagctcctcctgcttaagtttaatctcgttggccgatggcgcaaacttggcggcgaagtttcggacgatctcggggaaagtggctgagaagagaacgagttgagacgtcttgggtagcatgctaagccgtgttcaagtggttcagatcaggagggatgattaacacgactgatgcacgcataaacaagaacaaggaagaggaggacagtgctcccaacttactttctgaccctcatcgtctgctctcccaaactctgttgatccaacatgttgtccgcctcatctaaaatgagcgccttgacagccttggcgtcgagcttcttcttaacaatcatgtccatcaccgtaccgggcgtaccgacgatcacgtgagcatttgtcggagcggagtgtcggtcgaacgagtccttgactgcgaggaagactttgacaggagtgaattgacccatcgttcggacaacctcttcgatctgacgagcaagctctcgtgagggggcgagacagatcgcctagaattaccaggatattaaattatgacggcatggcgtcaggttcgaaatctagccgcttaaaaagcgtacagaagaaagaaagacactcatgcccgactacgtacctgggacttctcgacactgaaatctattcggctaagcatagtcaaggtgaatgcagcggtctttccggttccagattgagattgaccgatcatgtttctcggtctttcatataagaaaaccatgacagactcagcatgcgactacatctaccatactgtagccaagggagactggcgagacatacgggttttgaagcaacagaggcagcgccctctcctggatcttactaggtttctggaacttcatcgcgtaaattcctttaagaaggtttgggtgtctgcacacaaataaaccaagggtccaggagcattgatatcagcctaatccttatgactaccttaaaattgtctgcaactataaacacaaaaagaggaccaaatacaatgactgacaatccaagatcctcgaatgatttaacactaaacaacggcgagttcgggtccgcttgctggtcagccaatgtgacctacatccgttccccacaagaaaaagaaaagaaagatagacagaacagagcagtacaataagcttctgtaaactcgtacgtgtacggccaatgaatgaagagagataaacggacgtacggtgacttggtaagagttaggtatcaagttgtcctctgatcattccataaacataggttagcagttattggaccacccagatctctaaccccttatttactcctggtccagagtctctgtagagatctcacacgagaaagaacgtaccttccttgctatctccatctccagcctgaaccttcacctcagctccccccttggtatctccacctccattctcctgatcggtactcaatcctcctagtctcgaagccaacgagctcacattcctatccgacacagcaggcttggacgaatcagaggtagaagacacctccgctggcttgtcttcctgcacgggcgtagccttggaggcaggatcagaagcggcatcactcgatggaatagggttcgaagtagcaacagcaggcgcggctgttggtgcagccgaggtagccgacgcaggagcagaatgggcggcgctaccagcatccttgacgacggcgggcgattctgaaggagtctctgagggcgacatctgatctgtctcaaggtaagggtataaaggaatggggtgtatgcgtgtgtatgtgtgttcgtgttggtcgaacggggttgaggttgaggttgaagttgaagtggattcatcttggacggtccttatcctaacacttaggtagatattcatatacattcattatagacaaccaatctactggatacgtttgctttcattcttatgtaaaggtggatggatagaatttctctatgctgctcgagagaacggaaatcgaaaagaatgtgtgaatagtgatgatgatatgatacgactacattttcgaacgtggctttctcttctctggtataacagaaaactatccttccccgttaaagaaatccctatagactttagggggtttcactgttccaagaggtacttcacaagaagaacttacaaaaagaaggctaaaaataacgaagaaactaagacagaaaacgagaatggaaaaagaagggaggaagaagaaattatcgcagaagggggttctcatctatcttgaggggtgcaccagcccgcacttcccacatatcccgtacccaacaactcatatgccggcttttctcctcgttctctgtgggaaagatcggcagcgtccaagtgataagttatgatgatcagtcagctgagatagacagaactagaagagaatagaactgcttgcgtgcggagcaggaacttacatctggtcgatctccttagcaagatcgtaacaaacctctgcgctcacagcagaatcaaacttgtatgatgggtgtgaacggacgaaatgcctgtagtatgctgccggagtcatgagttggcctataagatttgatggtgaatgattagaatccatcgaggagacgacaggatgagcgatccagaccaagaagagatgcgctaagaatcttagagaaaatgagagaggagaagaacgaaccgctcgccctcttcttaaggatggtgatatacccgtcgagtctcgcccgagctttcggctcgatcttaagcgtgttcagatatgattccaccaagcccgataacccttcaaagtcatcacccttcatcccagagcgtaaagacaaagcaaggtcgacaacaattgaaaaaaagaaacggtcaaagccactcttggtatagatgagtttcaagaaggcaagaatgagaaacagacttttccattgaagatttcatctagtgtcatttcttcaaactcgttctcagccctgaaagatccgttgatcccaccacacaccggtggtttctcagaatggatggattttcggaagaagaacttttctgtgagaacagcatctcgcttttgggcgcgtcgcatattttcatcgacctaaagagggaaccgaacgaggtggtcgagtgacggagtccatagaacaaacgttgagtatcattcgtcaatattcgtccagtgaaacagacacgttatagatagtggaaacatataaagctcgagagaaggctaaccttggacatcgggatgtagaaattaagtccaaagtgtagaattgctctagaaagcaagatcaagaacaaagagtatgccgcgttttcgaaatccgttggctgaacttccatacttctgaactcgactcgccaaccgatgggcgagtttgatgggggaggcttaaatcgaagggtttgccagtttgtagattgtatactctgtatcggagcgaaaagtttagtcaccgatgagtgattgacttaaggcgaaagaagggaagaagaaggagaagacagacctcgaaatgatcggtcgaagtctcattgtcctgctctagggactctgagaagatcaccaacgggtctcgaatataaagatgggcgatatgtcgagctagttgtttctccactcctgactcgccccaaattcaagatagaaacgaaacgtaccagatgttatcgtcagttctactataacgtctggtgagatatgaaaaacgatcagcgaaggaacactcaccgttttcgatcagccttttcatcacggcctcatccaccggaacgtcgttgtcgttgtactctgatctgttggctggatcagaagagatgtacgaatccacgctaccgtacctagatttcaggatccgtttctctccgggttgtaagggctgttccacagacgatcagaaagagggtaaaccagaagcctatcaggccatcttgatatacagagggtttgatataacggagagaagatgaaatctacaaacagcctcgcctcgttcaccgggcgttcggtcgtcgaccgcaccagcaatcacgtcccacctagagtctacatcggcaaggaatcctcggtagatcggtgaagatgcacttagcgcaagctatctcccaagccaagtcaggtaacaaacaagcaaccatcagaacgacgtagaacgaccggttgtaaaagaagaagaaaactcttcggacgcaccatgatcggagcgacaggcgtgagcgcatcgtaaacctggcaagcctcggccagatcctttccttggagtgttacttgcagacagcagcagcccataccgaacgccatagcgtccatgtaaatatgatcttctttcgcagctcccgcgttggcctcgccatcgccggggtagagcgttcggtcgaagggaatcgtcggatctctgaatggctgggcggtctcggtgtctttgaagatcgggaggttgatggccactttcgaccctcggcgtcgacgaatgttggctgccagagttctacaagccgtgaacatgcacacagtcgattgcgatcagtagaaggaaagagggaagatagggagagaacctcagatgatcgaacaagaacttacgggaatcgaacatgctcgttaataagctcgtctccaacgaaaagagattgcattgcgctaccctgaacctttgagtgaggatcagaaaacggagtatccgtggtacccagcctgggccaggaagtgatggtcattgggatttcatgggaagatagatggtgacgggcgattctccgactggtcagtatgcgaaggaagcaacgattagtatcgaacgagggacgagctgatattcaagatattgatgaccgatacaaggcgggaccgctgtcttgaatcaattcaggagagcaaaagtgtgaaggacataccgaagtctcatgtttgactcaacagtcaacagactgggaatactatcatcgtagggagccccaggcgtagactctagcatgaaccgtccgaactcggggtgaaacgtcggagcggcgaaactggatccacgagagagatagagacaaagtgaaggacagaggcctcgatcagttgacagcttccagcgcacatcagataaggggtcgaccgaagacgatcaaaaaactcacttctcattctcgcagttcattccgtccacaacaccttccaacttgtcaagaatctccgtctgagaaagagagagcgttgcgttcttagactcgtcatcgaacgaaacgatcaagtactcaatctgtcaagcagaaaagtgatatcgtgacggacacgcatggaaagatatgtttggcaaggagagcaaggcataaaacatcaggccagagagagagtgaagtagacgaagagagaaaaaaaagagggaagaagcaagaaagaaaacgggaaagagaaagaaggaaatgattgatcagcactctttcctacgcgcgaatctctccagacttatcaactgagacttctacctcgaggcgataagcaacgaggcaaagaaacgaggactatagaaaacagtttgctaaagttgaagcattcatatcagaagttgaaccatacctcatcaccccagagaagaggatcgtcctttctatccttcagcctgttgtacaatgcgagaaactgggtgacgccatcgagcttgactttttggatgtgttgcttagagtcctcccaagcgagcggcgtaccaaccaccaagagacccatcagatagaacaggagctgtacgagagacagaaggcgaagagagcgaaagaagaagaaggaaactgccgatgtatacacactaatcggaagactctctataggatggacgaagggaacaaacgagttgatgccaaaagagttgcatggccgaaaacgcgacggaagcgagcttagtcattcgccggtggctattacccgcgatataggagaaaactattaggacgtgttgtagtatgtattggaaaatattcgtattgctcgttcagccgattggtaatcgtttccgagcacgtcatcttttccgatcagctcgtccagacccgatgccacgcgggtctgtgttaaggtctgttgtgttaaggatcaaggtcgtcgatatctgaattatacaaacagaacgtaaagagagcaggagcgagagaccgagcaagcgagcgagcggagaggtaagaacgacacaaggtatatgtatagtagagcgatgccaaacagagatggtcgtggattggaaaatataaaagagaagaaaaacaaaataaacataaaggcagatagatgtcaagaaagacggctatagaaaagaaataacgacaaagaaacagcatgctctacgacattgatgaagacagatcagtcactaataaggatacaatagatcaccgatcagcatctttgcttttttttttctcaagaagttatacaagattggtcaaaggcgaaaccactcacaatctacttgggggtggatcatgtacgagatcgcgttcggatctgtcggcgcctgggatcgatcgaccgagagctcgtccagcccagtcatatcccccttgatctcgagcaggtattgatcctatacatacgcatacatatgtgtatccgcttcatcagtcttgttcctccctacgttaaagcacaaacaggaacgatgattaaacttaccttgacgagcttgtgaagagcttttccaatcaattctcgttcttcttctaactcttcgaccgtctggagatcttgttctctggcctcgaggtaccagtcgataagttcctcccgttccaatccaggctggccttgacgttctgcatcggccaggtgcatgaccactgttgggtgttgaataacagatcaagcgaaatcattagcgctatatagcatgacagaaaacactaaaggaaaacttaggaaaagaaagactaaccgagattcatgatagccatgtatcgatcgtacgtgatcttcgtctttggctttgattggatagttggcggaacagtaccaacagggactgacgatccaccacttccactggaagaagaagtctgagcaaaagatgattcggcagcctctagagcagccacatcagctgcatctcgttcagcatcatctacctccatgtccgctccaggcgctttcttgccatcagcatcatcatcaccgtcctcttcgtcaatatccacatcgtccttctcgacgtggatgatggactgtcggagaagcgagaatgcctcacgaaccatgttcggtgtgatctaagatgcgcatacaaacacgttagatcccttaagtctttgatcgcaaggaggaagtaacgggaaagaaaagaataactggcctgacctcgttctggcagtttgctcgtgcgatagcctcactcaaccgaatcaaactctcaagttgacgaacggtaattcgatacgagttcttcccaacaccacccgcatcatcttgtcggagttttccgtacttttcgaccaggacgactgaagcatccggcgtgagctatcgaggcgagtgagaaaacatacggcatcagccttgacgtgcatgtaaaacatacgaaggctagaaaagaacatcaagagaaccttgacagagcttactttgggtttgaatgttcgggcgaaccgaatgtaccgctgaagagcctcagtgctaaattctgggttgatcgcagcatccctgaatcgatgaacgttcacgatatgctgggcgatatgaagatcggtctcttcattgcattcgtccaacacgacgaaaaatagatcgaatctcgacatgataggcgcactcattgccacattggctctcagacttgccttcctattgtacctacctccaatcgggttggcagctgccagaatggacgttcgagcattcaacgtcgcttgaatacctgctttggcaatggagatcgtctgctgttccatcgcttcgtgaatggcaacttgatcggcaatgtccatcttgtcaaactcatcaatcgcgcagattccattgtcggccaacatgagcgctccggcttcaatcgtgaactcgccggtctcttcatcttttaccaccgcggcggtcaaaccagcagcggatgaggccttgccggaagtgtagaccgctcgaggtaagaaggagcatatgtatctagcaccaatgtctcagccaataaatcgatacacacaaaaagacaagaagacagaaacacagaaaattcgacaaaattactcacttgaggaactgagacttgcttgtactcggatcaccgacaacacaaatgttgatatcccctcggagatggattccttcgggtgtctgcttatgcacaccacccatcagttgcaggagtaaacctttcttgacaatatcgtgacctacaagaacaagtgtgcacggaggaaaacagttgtgccaattgttaacttccgcgcacacatcctgaagagtagtcggaggtgcagagagatagaagatcgaacataccatatacagtcggagcgatactgttcaccaatcgattgtagatgtaaggagcatggaccatggccttcaactcgtcaagttcctcagtcgtcagaccactaaggaaagcagcctgttcttcgtctccgtccagttcgtctcctcggacgtttgttccagaagactatgtttgtttcgataaacaaaggaaatatttatcaagtcagcttctggcgctctaccgtaatgaaaatgacgggaaagccggaacgaaagagaaagagagcctcaccctagcatctccactcttaacatgacaagccaagaaagcagtcttataacctaagtctcgtaccccaagctccttcaaccccgtcaccccctgactagctggcccttgctctcctttcccaccgcctcgcccttctttctgcatctgagacgtcacacctggcatcgacatctgtgcaacatcaggcacgacgacaaaggttccggtaaaagtacacttatcacctgctttggctctctccacaatttcggatcgaaggatgacatccagactgcagaagattagagatggaaaaaaagaagaaaggcgaaaagtgcatcaacatctctatctcgtgtgtgtgtgtgtgcgagcaatctgatcgattcttcgttcccctctgcagaacataccttcgaggcatgcttcctgtaggaatttcattcgggttctcctggatcctgaccttttgccaatccgaaaatgtcgactgttccacgttaagcttccaaaagttcttgttcgcacacgtcggattttggcacatgatcggctgtttacgaatcccaaaaccaggtttaaaatagagcctctcccaacatcagatgttctgtttatactttcatcgatggaagtgaacgacgaggcagagaacgagagagactcacctcagtgtacttgaattgttgttcaacgttccctaccgtcgttctacatacttcacaagcaaaggctccaaacaccaactctggtcgaacttcactcgtcctggtgaccgttccgctgatagccattagctgaccaatctgaccagttcttaggtctctgatgccggaagtgattggcaagttctggaacgcgattgaaaactctctggttgaaagtccagacgaatttgaactgctcgaagatgttcctccaccggacgtcgctggcgataaatacaaatagtgaggttcatactttcgaaccaagttcgtcaacgctcgtcggaggaatggtagaaatcggtagtattgtccttggatagcccgagcgagaacttcttctcgttcgagaagatgaccaaagtcgacgtaaagcgtggtaaagtcaaactctttgagtgtctttatctgatcgatatagatagggacagagccctcaggaacggcgtggggattgtctctatcatcaggtgtagctggcgttgcagggaaagcgatgttgggcgtgtaactaggtaaagagcagaaaggttcggccgtatcaagagaacaaaaaacagtctaccattagaacatgcatcatcaaactaacaaggatgactgagtggaaagaagaagcaaggtacgcacgtctcgagaaatgtttgaaaactggtcatgacggcttctccagtcgcatcggtcactctagggatgtcatcttgtaatcctctcactctcctccttgaagctctcctcgctgctatctctccatcgtcatcttcatccgaatcattcatggctctctctccgttttgtccatctgcgcgaaggtcggatgaccgaagggagagagggtcgacgtttcgttgtctgttttgagctagaggtggccggaagtctgcaccaagtgagggggaagatgctctaaatccggctgatgaggaaggaggaaagagctgggatgacatcttcaggtctagatatcggtcagatcttcaacagtaaagtcaaatagagaaaagggtatgaaagaagagatatcgacgcaagtggagatgattcaagtggtagaaagaaatcaatgacttctgctcaacagacgcgtttgtttttcttaattctgtcgcgtcgacgcgacacgttgatcaacagacaaacattcatttaataatttatgcatggctggcataacacgcgcgcgcgcgcggtgggactagacactgccatcgttatcaacaacggagagcgaggagaaggaaagatacgatatgataagaaaggagcggagggaagcaagaaagaaaggacgtgggtatgcaatactttgaaacaacagccataatcaagttgggcacgtaaagaacagaggaggaagcacaaggcaaaaggaagagagataagaagacaacgaaatatcaagccaagaaccaaaagaagagtagaaggacaaaaagaaggaaaaagcctcgacggtaaggagtaggcagaataataaaataagagcgagtcaggctagaccgatcaaaccaacaaggagtttccatctgattggatgatatccctggttaactgaggagccgggctaaattttctccctcccgcttctgcttgaagatgtcttccagcgggtgcttggaagacgaacctatcatctatttggttcctctgtccaaccgcaggagtagtactagatccattggcttgtgacggcagaccgttcccgataggatcattttgtcttttctctggaccaaactttccaccgttcaaaccttgtgagggcagtccttcagagtctcgtccgttaacttttcggaagttgacaggaggaggttcgattagccgttgaacttggtagggtaggtcgtactcagcctgttgggctagggcaatatatcgggccaattcaagatggaggtggggatagtatgttgttgatgccttcctcgtggactgaagcagccagatggaaggacgacataagactttagctcaaaaacatgacgcgcgaaacgtatacgagcagagaaggaaaagacttaccaagatgatcctgtcaaatccgctttcaaagagttgggcgtggaatcgccaagcactcgtatcagaatctgatgaatcgttcagctcataacaagctcgagcctgtgcattgatcaatctgaagtggacggcctgtgaagaatggagtcatacgaccggtcaggatgtgtgatcctgcatatcagggatatcgatcaaaagtctgaaaaagtagagggagacacataccagataatttccagcttcgtattcaactgatgaaaggatgatgtgaaaatacgcagtaatgttgaataataaatagtcagagttgcgaatcgacgataagaacagaagataagacgcacctcctcctgtagctccaccaggtgctgttggtctttcgacctgggaaacatctagatctgacagtcgccaaatcccattggcatggcagaacatccaaaagtagtctcgactaagaaagaacccgaatcatattcatacaaagggggaggggcgatcaggccttttctcttctactcaaagaagcgatcgctgagtttcaacggataggggagaggagagttgcgcaaacactaaccagacatcagcgatttcggtcaggtacgtcttgtatactctaggccgatgagcgactgtgacgaattcaacaagatcattctctttttccggcccgacgagcaaccttctaacgaactctggcaagttagcccattcctgtgaaacgccacaactgctctcaacagggaagagatcaaacaacaagaggatgagctcagtcatgagttgtctggttggaacgtctcctggtttcttgtccgaaaagagaagggtagtgagtgggatgaatggagcaggggagtattgtcgaatggcaaggcagccgacatcggacgtggcaagggctttgatgcatcggagaagctcgtgaaggagttgatcatcgtgttgttcctccctgtgtgaagcagcacagaatcgagatttcagtcgaagtctcaggctgctgctgatggtacgttcttgatgggtgagcatacgtacctccattccatctcaagtacctcattcagctttcgtagcatgaatacatatccaccttcatgtaagaaagtttcgacccatctaagacaaaaagagaacgaagaggaagacaaattatttagaaaggatgtcgaatgcgatgaagaaaaaatagaaactcacaaagtggtttcctgtcttagtaacatcctcaacttcttcactctaccgagatccatcacaccagccggcggtccatcccttaaccacctcgccattcccattggcgaattttgcgtgccttcccttagactctcggcttgaaccattgaattcctctccggcccggttttcttacccttcgctcgctgtttgtctcctcgctcacggtcagatatttgtcgaacgtgagaggaggaggatggtgagctctggtggtttccaatctgatggttggatcctaggatagactgatgtctaggaacaaggaaatagtccgaatctcgagcgatagatgatcgaagatcgctgggtgtcctgtcaggagtagatgaagagtgcgaggaagttctagaaggctgtttggggtaaggagaaccaccagatcgggcagacatcccggtggccaattgaaaggattgctatatgattgaatatcgacgaggaataagcaacaaaacgagtacagagcaggtaaaccgagagctagaaaccgaccgagtttttcaagaacgcagatttcacgtgttggtccatcgtgttcatcttcattctaactgctgaagggacttccagagcgtcctgaggatttgattcatgaagaatagaggaggcaaacgtatatatcagtcaaccagcatgcaagtagtgcttgggatcaatttattaatccgatcacgtaactcaccatcattgcctcaaagtccgtatcgattctagttttacctccaggagctccctgggagaatttcgacagcccatcgagatctaagctttttgaagccgcgtgtccaactggtgtgccgttctgtcctcttccaacgttgggtgctctggaagtttctgatggccgttgggtcattatcatgctcatgggtctagctgttgagctcctgctggttggtgctggagttgctgatgatccgggagaagcatattctccaggcgcggctgctgctaccgaagaagaaaaatgcgttcgacaaacgggcatgcctggagtgaacagaggaagttggttcattacgcctcttgttggactatgaagaggaggtgcatgggacgatggtcggccttgctgctgctgctgatattgttgttgctgctgataatgttgggagtatcgcttggtaggagacggaggagctgacatcgtcaagacagctctggagttcactcagaagggaagagaaaattgaacagggagcgagaaagatggactgaggggaactaggtcgggattaaggtatgctgcttcggtctaggtcgatggtggtcaatgggttatctaagagaaccatgcgccaacaagagaaaagttgttgaatattctactcaattgacgcgtctgttcctccaagaaatcagtcgcgtcttccttctatccgccttgctcgtctgtataatcagtgatcattgcctgcttttctcttctctctctctttctcctctcttagtttttcttgtttgagtcttttcatgaaaatcaaaacaagcgttgatcttgccccggttattctgccctaaatgcctgtgaagtgagaaaagatagggaagagagatcaaagcagactctcgtcctcttacatccgccacgtgtggatgtaaacattttgatgcgcaatcttgtctctttcccaactgaaggaaaaaggaaaaaaagtgctgagactgactagatctatcctttcttgtgtcttcgagagaagaccagaccatccggtccaagcttctcgcctatcgttctttgtttcggccgaccgatcggcgatgaccgtcaagtcattttgataaggaccatcctctgcatacacatggctacaagaatccatttgacaaggaccgcctttccttcacttgatcgcgatctcactctctcactctcattctccttccttattctttgaggttggttatccttgcccagctaacaagtgaccatatactaatatcgtcgaagagtgcagaaaatactcaaaatatgacaacatctgaattaacgtaccggcgggcaaggttatcggacgaacccgagttgatcaagctgcgaatatcgtgtggatggggcgaggataagatcggtcaggtattgaaagattctgtggatggaaagttggcgctttatctattcgaattagagggtgaaccgatcgggatgtgcgtatctctcttcatttctgtactcgtttttttgaccgatgggctctccattgacaaccgttacgtggaaacatctggcttgggaaacgaaggggagcgatcgagtttgaacctgcaggagagccggacattgtcaaccccgatacaaacacggtgatgatatgtaggtctttcaagcagaatatgagattttctcttcgctctctttgaaaaaggtgctcactatgtgctattgatctactcgttgagatagcactgcttcatatatatactcgcttccaaggcaaacacctcgggaccaaagtaagtgaacgagagagcacctgtggtatctgtgtctcataacgttccaaccaatgacatgtcttgcttgtcaggttatggacatcatagaagatctctgcgtgcgtgaattcggagcaaagaccatcaccttgaacactcggcctcgactggaagacggaagggtcaaccacgtgaaaatttggtataaccgaaggggttataacgagtacaaggtaaatctttctgaattggatttgatcaagaaggaaagggagagctaaacgcttcagttgttgatttctaccttttcaggccgaggaacctagatacaagtggggtgataggttgttgacggcatgctttctgaggaaggttgtgggttagagtacgataaagtggatcacgacgtgcccaagcttgtttcctttgtatttcatactagaggattgataccagttccggattactgtccgtgacacacccgttcatgtcttacttcttttcttttgtattttatccgtattcttatcttgttcattatcattagaattttagatatacaaagaataacaaaaagatgagagagcaagatacagggagtaacagagcgtatgcaaaacctactagtgtagcgagaggagaggagaagagagaggacatagaatctcagaaagccacaaaggcataggcatagacgtactaaactagatgggtagagcgccagggaagcgcactggttactcacctctccaagctttcggatttgccagccaccgagcgcccaagggcgggtgactcaccagatggttacaaagtgatgttgtaactacgaatgtgcctggtgcctgtgtgcctattgcccaggtgcgtgcatatatatatatttatatttgcgtgtgtgtgtgcctgaacgcctgtgtgcctgtttatcctcccctgcggatttccgttcttccctccttctcatttgccctcttctccttcttctctttctccttcttctctttcttcttcttctcttctttgacccatccaccttgtccatctaaagtttgtttctcctttctctctgtctctcactcttgcgacgttgagctcgtgcagtgtgtcgttcttcacctctgctctctttttcgtccaatactaaccttgatgatagaactttgttctcttctttgggtcacctcaccctagggtaaacacacatacatatacgcacacacaccttcgtagcgatttcaccttcttctttctttcctcctttgctcattcacatttgagcccactggaaaggttctttctgggatcatctcctctctctgttctctccctcggcccgaatccatgccgacaagtcgaccgaatagcgcatctgtccctcagccgccgatcgctcttcacaaacgctccagttctcaaaaccagaatcatcctcaatacgcaaactataccagcacccacgactcgagccctcagcaatcgacgctctccatgtcttccactgccttctccgccgctaataatccctcgccgttgaacccaaactggcaggtcaattcacaagcggccggcccaggtgtcaacagatcccattcaaactcttcctctggggaaaacacatcgatcacgtccggcgagcacccagtcggtaatgttcccggtacgaatgggaagactgaccctctatcggccgtcaacagccagattggctcggcctatgggccttatgccgtatgtccgacttttcttcctgatcttgctccctcagagttttagttcgatcccttttccccataggtcgcacacaaaactgatccggccttcgtattttctgtctggttcgaactgtctactcactcgctacatacgttcaaccttttcatccaatcttggcgtactcgtttcctcttcctccctctcttctctctgtgtcgacgatcccttcatcatccaatcgcttctcgaacacgaccttttcgactttgtttacactctatgatagtatacatcggttgcccattcccactccgcccaacctctcttgcctcagactccctcttctcgattctcaaccgctgtgtctgaatcctctcttggatcatactcgcccaacgacaactataaccgacactctcttgtggcgcctagtctgatggctggtcaacgaaacaacggcgatgacagccatctgctttgggacgaaaaggatcccgagatggagtaagtggtttttcgtcgtctccttctcctctagaaattgagacgttgcttgctttgctcatcacagtatgaacgcttcaacctctctagcgatgcccttcaccgaccggatcctccaggtaaaaagggaaaacactctgctggaggtgttggttctggcggcggtttagtctggtcgaccagaggatgcttcaatgtcttagtcttgggtttcctcttaggtggacttctcatgctctttgccggctatcctatcttgacatactacctcaagaaagccaaaaagtcgtctagcaaaggaagcttcaagtaagcatcatccagccctacttgatgtcgatctctgatcgagatgcgaactttgcgagagactgaccaactttggggcattccgtcggcttcattctcagcttgggtggcaccaatggaaccggacaggtaagctttgatctcatgtcgctcggcatggcctcatgtattcggtcactcacccttctctcttctctctcaggtccccgtaatccccaacttgccgaccttgatagacagcgagacgcctgatagtgctagatcccgtaccggatttgacggaaaaacatacaacttaatcttctctgacgaattcgagacagacggcaggacgttcttcccaggagatgacccctactggtgcgtcaggtcctccgtatgcatatgccgattttgggtttccaatcagcttaccattcttgcttttgaaattcatcaacaacagggaggccgtcgatttccactactggcctaccgctgattacgagtggtacgcgcccaggaatgcgatcaccaaggacgggaagctcgtcttgaccatgcaagaaagattgtcccacaacctcaactttgagagtgccatgttgcagtcagtatcttattatgcctctgaatctaaataccctagcgtgtacctgtactcgtgttgacgctgatcatctattcaacatctctactttcttccttccccttatttttatgttacaataggacctggaataagttctgtttcactagaggatacattgaagtcagcgtatcgctgcctggagataatgttcgccactttggtcttttttcacttttgtttcatcgccgctgacttctttaacttttgattcgtccttcgtcttcacaacaggttgttggaggttactggcctggtgtttggttaatgggaaacttgggtcgacctggatacggagccagtgaatcccttttctcggccttttccttttttgacaacaacacattgctgatcgtgtcggcctttctacttttccttttcttttccattagcaaccgaggggctctggccttactcttatgactcttgcgatgtcggaacgtttgctaaccaaacatgggctaacggaaccggtcctgaagctgctcttactactggtcagtatttggcctgtcaaagtacaacttcatcattcaaatgattcacgctctgaccgttactctatcttcttttttcctatgatcatccatcgttttaggctataacggaggagaactttctgagctgcccggacaacggctttctgcctgtacttgtcctggacaggatcaccctggacccaccacaagtacaggtcgaggagctcctgaaatcgatatcctcgaagcccgtcagtgtgcttgaatctcaaaagggatctgaatgactgttacatatatgatttcgactgacatgtttttcattggtattttatcttgtgtttcattcttattcataactggggtttctatcactcaaagaggtcgatacggacaaagatttaggtcagatgtctcagagtttccaaattgcgtaagtcccttcttcctcgaatctcagccttggcattgtttcttgactatttctgacatcatttccttatacgaacgacctcagtccgttcgatgatagttggcaatccgataccgatggttcggtaatctacgatgcttccatcacaaagtggaactcttaccttggaggtccctaccaacaagtgagctactgatcatgtcttcattctcacgttgttcttggtcacaaatctaatatagcttttaataccctttctcctgtccccctaggctgtctctgggttaacatacgtcgattcaaacaaagcctacaagggcaactaccagacttacggtcttgagtactggtccgatgtcaacaaccgagctgacggcttcatcacttggcatgtcggtggcgtaccgtcgtggaaaatgacggctgccgcggttggaccgaactcgaaagtcggagtgagccaaagaatcattccagaagagcccatggtacgtgcccttttcttttttaccttatgatgtttggaagatcactaactcttcatcacggatccaaaataaaagtcaattatccttaacttgggaatgtctgctggtttccagcctcccgattttgccaacttgaaatggcctgcttccatgtacatcgactatgtcagagtctaccagcgggaaggcgaggaaaactttggctgtgatcccgaagattatccgacctcggcctatattgcaaaccacgccaacgcatacgctgatgccaacttgaccatctggtccgatgccggatacaaattccctcgaaacagtctctacgatggttgttaaacttacggggtgtaatttatctctcctcgagcattatttgtcttgatgtttcttctgttgtcgttgttgcgttttttctttttcttttcttttttctttgcattcctactcaattttttccttcgtttcttcctctcctgacggaacctctcaatacctccctcttcgttgtttatttctttgtatgataacaaacacaacaagcttcatgatcatcttactccgaactcttttgttcttcacttcctttctctgtctcctgctctcctacatacacctctatatatttctctatgggttttctcatcctcgttctttctcagtagtgctctctcagatggtacatcctctttacccctcttatctatctttacttcttgaagcttgttcaagtctttattgtctttttctcgtctacttgtttcatttgtgttcttcagtgcgcggcttccggaccctttgctgtagtacccctcatccgagtttcttcgactcttgttcctttcctcaatcaccatttactcttatctctctttctctctcttctcttatgtctgtccggtctgtgccgtctatcgttggtgctgcaagtaagatgcatgctatgcctttgtcgagcgacatgcgcatcggtgagacatcagcgaaacaacaaagggagaacgacatgaattgacgacgcgggccatttctctattcttgcccgcggttagattcggtctcatccatcagtcttccatcccatattctaacccctccctttcatcctccttcgcttctttcccttccctcccttctctcccttcttcccagtagcgaaggagacagtctttcgccccctctcgtaaaaccataacaacaacaaaaaaacaagaaaagagaagaaagggatgaagaactcgtcgacagcaggtttcgtagcctatctccaatcccagcctacctttcacgtaaacaccgccggggactctcacgtctctagttcgagcctcaacctcggtctcaacctcgacggagcaatagggatagggaacggcaggatccactcaccctcgacatctgtttcaggaggatctgacggagaagaagaggaagaggaagaggagggcgaatcttccgctactggtggtttagtaggtgtaggtcgagggaggaacggaggaacgcgaggagcggaaaggcgactgttgctcggaggttcaggttcgggctcgggatcgaat

SEQ ID NO: 463 - DNA, 5625 bp, Xanthophyllomyces dendrorhous
cgggatcgaatacaactacaggtgtaggttccagaagagatggatcttggaggatgaaagaaggtcaatatcagagatcgtctgccttgacttctggatctggatctggatcaggtataggtctgggtgggagagaacctgggaaactcaaagaaaaagtcctgccgagaaacatgctggatgtcttgcctttagatgtttggctacatgtacgttctcctcttgttttgttcttctttccgcttccatggttgtatcaacagagaagagaggagaggaaggaaggcaagagaaggattgtatgctcacgtgcatgtgctcatgcgtgtttcttttgatatgaacggcaacacagatagttaaattcttgtcgactcctgacttgaagcgatgcgtcaccgtctgtcggttgttcgcctccatagcagttgagaatctgtggagcaaacccacattccgaacttatcgagatttctgcacattcctcaatgtgcttgatccaggaccccaattagcgccagacgaatttaaaaatctctcgcttcaaacgacatctcttggtgacgaagacagtgaggacgaggacgaggacgaggaccaagagcccgatagactaggattaaacagatcaggtccggaatcaatgttggtccctggcatagtaccccttcgtgtcccaacaaaaatcgaccgaccgacatacccttacgcgtcgtatgtccgtcggatcaatttatcaaactttctggcagacgtcacggacgatacgttgttccgacttagaggttgcagccggttggacaggttgaccttgacaggttgttcacttttgggagactcgatggtcggcatggtcttggggttgaagttgaatgcccttgtcgcactggatctctcaatggtcaaaaacataggggacgccgcattgagagggatagcgatgggctgtctgaaactacaggggttaaatctgaatgggtgcaataaggtaacggatgttggggtgactgcaattgctcagaattgtcgatcattgagaagagtaagtctttctgtttgcatatagatatgtgtggttaagtcttgtgcaatatgggtgctaattcatgccggtggttgttcgtggaaattcagatcaaattggtaaaatgcacaaaagtaacagacgcctcagtcgttctcctcgctagaaattgcttcctcctcctggaagtcgacttggatgagaatccaaacataaccgccgtctctattcgagagttttggctatgctgtctccaccttcgagagcttcgcctggcatcctgtcccaagattaccgatgctggattcccatatttgtctcctccgctctcgatctcggcttcatctccttcagttctggatcgcccattccggctttctacaatagaatacccacctcgctcgcttcatccaccaacaccccgtccgatctatcctgacgagacggtctacggagcttattcttatgagactgcctcgttcgaagttgttcctccgccaggaccaagaatcatgttcgggatccaaccacctccacattggttaaagccttttgaccatctgagggtcctcgatctgacatcatgtgcttccattacggacgcagccgttgacgcaatagtgacgaatgcaccaatgttgaggagtttagtattagcaaaatgtccagagttgacagatcagagtttgttttctatctgtacactcggaagaagtttgcatcagttacatatggctcattgcttcaggtctgtccctgctttcagcatatcagctcttataagaagtattgtctttcgaaaatggcgcggctgattttctctttgatctctgttccacagaatcacagatgcagcggtttcgagactggctagatcgtgtacacgtcttagatatgtagattttgcttgtgagtttcccattcttatccggacgagctcgctgagattgatgatcggctcatattttgtctctttcttacccgcacacgctcaggctgtcctgaacttacggatatgagtgttatcgagctatcccaattgacaaaacttcgtcgaatcggtcttgtccgagtacgtccctatcactatatcgacatagaaaacaggtgctctactgatccctcattgtcattcaattggtcgaacggaaatgttgataggtggccaaactgacagatcaagccatccacgcccttgttgaacgaccgtcctctcttgaaagaattcatctttcatactgcgaggaaatttctgtcgaggccatctattacctactgagaaacctaccgaggctgactcatttgagtttgacgggcgtaccgtcgttccgaaaagctgatctacagcgttttcgccgacctccgcctgctgtgcgtctttcgatttctcttctcaaatctgatacttataagcccaaactcaacgtttgacaattcatttatctttttttttatcttttttttttaatgatgatggtggtgagataggacttcaactcgcaccaaagagccgcattctgcgtctactctggagacggagtcatcgctttgcgaaactacttatcaacgttatatcacgttccacccgcaccgtcacccacttcctctgcgttcagctcgctagaagatgagccaagtcctttacccggtcaacagaacgttcgtcctcaagcttttccctctgttctcctgtcttttgtctttattccatcatccttctatattgacaatcgtcatgttcactctgtttaatgaagcaactgcgctctgcttcgtgaccagcatttgccaaagtcagaattcaaaatgttacttagaattattcgtcttctgtttccctctttcattacgtttcggttgcttttattttactttttttgtctcatcatatgtcttcatcattgcctgcatccatccgttcattcatccattttaatttatgtttttaaattctctctcaattttcttgttcgtctccttgttgttctccattgtttttcgtagtgttctgtcccatcgttatccttcttgcctattgcgtccaaggttctcttgtctcccgattcccactctacgatcaatacacctgacttcttgctacctatccaagtacatccatacaatcttggaagtactgatcatttcagctactatcgttctccgtttatgcatactctatctcttcagtcagggaaatcagacaaaacaattctggacttttcggtttgcttctagtcaaagttgaatcccatgacattcagattctttatttattcacgaactatcgaggttcaagtcttagggatcgctcgtataggtctatcggatcatcaagctcttttttcgccaatgactactcccacaccagttcatttgtcagcaatattgaaggacgagaacaaggcaaatcaagaactggaggctcactttcgacaagaacacctgaatttctgggacctcaataaacgtgaagggagtttggtatggttcaactgcactgatgattctccatagagcatggtattttgcaaggttgattaatggtcgagatgatgagtatggtgcaggtcgcgttgctgggtttccttctgcgcacatcgttaggtctgatagtacggcgcccaggtaaggaagcgcaggagggacagtttcacggagtcgggtgcggtactgtgtagcgaccggccagaacacaacgatgaggagacgaaagacttttggtacacaaacgtcatagagatcaagactcgacgaacgtttatagaattccgagagacattgaacaagtcttgtagaacagctagtgaatccttcgtctttgttgataaagcctttatgaagtaaaaagttcaaaactgcgtaaaaaaatggatctgtgacggccaaatcatgtatgagaaatcttcgaactatatcgtacctcgaatgtctttttcaatcgggcgacgctagcactgttgaacgcgcccaaaatggcgtaggcagcactaaaattttgcacatccgtcaggcgagtctattgaacgatatcaacaaccatactcagtaccttgatgtttcatatgcagatgtgaagaaaagactgacggcgagcttgatgaagtacttgacaaccgttgctcgtttcttggcgtcggcttcattcaagatggcttccgaaatatatccagtcctgtagaagtattgaacacgagtcggaggtgtcaatcagaaaaaatcaatctatcaatcggcaggtgagagagacctacacttgagtatgaaatgtgctcatcgccaccagtgcaggggatgtattttttccaaactccaacaaatctttcattctgacctgcttaaacagtccaaactccatcaacgtgagttgcctcgcaagctccagaggatcaaaatcagtcacttggattgtcgggttattcgatttaagatagtggaacaacgatcggctgacgaggagcggagggggaggaacaaggtcttcaggagggctatcaattgatgaaggttgttgggtggatgttgacgcaagtctttgacctttgtattcgggggaactagatcgaaactcaacggaagccattacctgaagagcgtggctcgaaagggcaggattaaagactcctcgggcaaaggcatgaagattgggtaacacgacgtgatcaacctcatttctccagtgcgtatctaaccaagctttgagaaacagcaggatcctcagtcggataagaacaacattctgggtctgtgatgattgttggttttcttcactctccaatgaatcaagcgaaggtcgtttcatatcaaaccgatgaaggagaagggaaacgagctcctgaggagtagtaaacatccgaaaagtgagaaagaaaacttgagcgagctctgagccaactgttgaactgtttgatatgagtttgtccactaaatccggtagagtagcaccgatgatttgaccctctggattgagcacaaagtcagccggaccagtttcatttcgctctacataccggacagatgtcctagtagattgagtagcaacggtggtcaaagaccgagaacgaagcacgcccgtcggagtgtttagcttggcagatgcggtagaggcatgatactgtcggaaagaaacatctgggcaggatacatccaggagtctgggagggctctgagaagattcaatccggattaatggtggccgatgtggtgaatcgaaagacacccgaggggtggataatgttgaatctaaactcgtggtatctatcacggacatagatcctgtttttttgtcagcaaattcagagccaaatcaagtcaatcaacaacggtcggaacctggtgaaaccctaaagctaaatttgactcacgcagagagggcattgaaggtatctggtcataatcaccgtagtgatccctttccttgaaacgtacatgagaaagtgaagatgatctcggtctgatcggcgtcattaacaaggatgattgtgcgcgcccttcgttactatctttgataatgcccacaatgccaagtccaacagagtcgaaagcactagggttgatagtacattggctgttccaagcagagacggcttttcctacgactgtct

SEQ ID NO: 464 - DNA, 13886 bp, Xanthophyllomyces dendrorhous
tcctacgactgtctcctcctgcgccttctcatcaatagccttgattttaccaagatcgctcgactgttgttgttctgacaaagctccctcgaaaggctcaatttcagaccccttgtttttgactgcactcgtctcaatccaaggcaaacaagacttgaccaggatccagacggcctgcttgtcttgaacaagtggtgcaacacattgctcggccaaattcttacagagtcccgcagattcaactgcctcggtgacagcgtggaggagggccactttctggcctacctcttcagtatcatcaacgtcggcgtctgcgctagaactggaggaaggcaggggttttctggctgaagcaatcaaatggtcgacagcataggagagccgattgcctgactcatgaagatttcgaacatcacccattggtctctttctttggacctccgggctcgaagcgatggagaggatgagggagagaagagaagttgccttatcgagacaagtttgagtagcttccaaaaggtgtgcttgatttgaaggataattacggatcgaatgaaagtgggtatggccaattagagctgctaagctggtcacaacttcttcgtgtaagctgagaacctgagtgatgatattggcagccaggaaaaacccggaagcagaaacgggagcagaagccagagcctgagaggaattcttagatgattcaagggaaaaacttgatgagcttgtcgacgagatcgagttgaatcttgaaggaggggctggagaggagacaggtgcaaagagtgatagaagtgaaacagcgggctgacgagtttcttcttcattgagaatcaaaccagaagcgctggatgtttgtccaagactacgagaccttcctctaaaggatccagataaaatgctctgcgtcctggtggacaacaactcagggcgctcttgtgtgaaagagggttgccaagagatcttcgcggggagtcctattcgaagagccgactgttgaccagagaacccttctccagtattacggttggtctgagctactatatgcggcccttctttaatttcctcatcttcggaagcggagataaacgactcggactttcgtctctccggtatcttgataccacaatccgccgccgttcgaaggaactgctcgacatcggagagcaactttcgagccatcgatagcatattttcaatctcgagttctcgcgtagattcatccgttgtcttggcagatgccttttcctggtgagccaccattttgtgttgcgtttggtgaattttttttcgggctcgggcaagagacggatatttcctcatcgaatcagattccttattgaagcaatccattatggagagcatagatcgcacagaggtgttgacgcaggatgtggacggtctgaaatgctgtcaaaccatatgcggctcaatcagacgaggatactgtttaaaagatggagccgcagctataggtcttggactaaccgatgttcttcctgccgtggccgcgtcaaacaggagtgaaacagcatgaacgatgggatccaaaacttgatttacctccttttgggaaaattgctgggatgaagggcctgcttgaagagcaatggacgatggtgacgaacggctgttggtttcacaggacgatgcagacgacaaagacgagctgccgcaagaaacggtagacttatgggatgacgttgcaaggtcaccgtcgggaggtggattctggatcaaagatgagtatcaatgtctgcattacatccgttaaaacattccactagcgcatatacttgaagagcaaaaactcacttgatcaggttgtttgtgagcactcattactcgagctgccttgctcggactgataccggtcacgtaattacttgagacataatccccaaaatgatttaataccacatatcgacgctgtacattttgccatgttcttttcaagtaaagaagcagtcttaccttgggaaccaccctctctttccatctgccaatatttctccgtcccaccaccctgagggagccttgttgaagaccctgatcgtctgaccctttttaaaaattaaatacgtcggatcttcagatatccaatcatgcaacgcttccaccaatactatcgccggtaaaggcggtggcgcggttcctgaattcatcgcagccgtactggaagccgtttgaacattggcaggtgcggtgcctggacgattggcgaccgatcgatagcctgtttcaaatgttcctgttaacgagcatgaaagactcgactgaccaaaggccggtctcgtagacacactgtctgacgctattgatgtcggtacaaaagatgctagcaacggtggtgagaatgatgaatcgagaccaattctaggtgtgctcggtctctgatgccggcttttggcatggttcgacgtgttcatcttcgcagaaccagcggcgagagacatctgagcaaccgggagatcggccgcaggtacggacgatggaggagaaactatggatggagcatctgaagtggacacgatgactgaagcacaagcagaatcaggtttcactgctaattcaagaggaggtggagctcgagaacgtctggaaaagtaagaggatcgagatgtcatggtcgagactggttcgatcagcttgttaggataaagaagagacggaaagaaggagggaaaaagagaagaaggtcaaatgttttcaaaatcagcccatctaaataaagaaaagcaaggccatcagcttgttttcttaaacatcctggttagaaggcacccaggaacaaaggatccagctccaaacaccaaacatggacacgccgcaatagcgagtcatgcatcaggaccagaattagtggaattatataaccccgacccatcgtataagcagaattctgggattggtatgttttgacacgagcaatatgacaagataagataagatacgatagaagatgaccgggacgaaatctagagagacatttccacaaacacagatgtgttggaacggtagcagaggttacacggttggtcttgagtccgactggcttgaccgaggttccagccggagggactttcggtacaatccattcaaggagacagatcccttctccgcaaggacctgtcaaaaaaggtacgagattcaatgataagggagtcagcttccaagcgactttttttacgatgagagtagcaaagaccgagcgcgaccaactttgaccaagaatgtctgaatctctgggacttctactaatgtatacgggacctgaaacttctggacaccactaacaatccgccaaaccccttggtattttgctaagttgatcaacatcttttcaggcgcttgaggagatggtcgagtgtctgggtttccatcctgacagaatgtaaggtcggtcagagcgatccctaggaaaggcagagcggaagggttcgtctctcggagtcgcgtccgatactatattgaaaaatgcctcacagacggatcagaggtattagagaactgatcattcaggcggatagaggaagacgaagaacagacgtacgtttgagtgatttcgagatacgtcaaacaattctcgaagtctcgctagcgtgtttttcgtctttgtcgatagcgcctggcgttcggaagaaaagatggtttaggttgaatcagatcctggaatcattctgtttggcaacagatcaagatagaaatgagaagtgatcaacaactcactccaaacgtcttttgcaaccgagtgatactcgcgctgttgagtgcgcccaagactgcataactcgcgctaaagttctgaagatcaaccagtcgggcctttaagttgtcaagagacgaacagtcatcagctcggccggaaaacaatcgctacaaatactactcagatcagaaaaggaacgtacggcgagcttgatgaagaacttcataagagccattcgtttcttgaggtcttcctcgttcaagagggtttctgatacaaagcccgttctgtgatgaagccgcgatggtttgcctcccggtgagctttacatcaaaacagatgaaaccacaacaagtacctgggacatacacttggttgctaaacgtactcatcgctgtcaacgcactaccttgtcccatgcttctcccctttccggtcccgactttaacaagatcctctggtttgacctctgagaataatttgaactcggcgaccgtcagctgtcttgccaactccaacggatcgaaatccgtgatggacacaacggctgtaggagatcgaaggttattcatcaaagaccgattcactataggattcgggaacgacgtctttcttcctatcaatccagaggtaccggtcggttccaatgtcgtcggggccgcaaaagactcggagaaggcttgctctcgagcttcgagtgatctcaccaatcgaggcgtatagttcggtaacgcctgcttgagtgggccttccgcgaacagcctaatttttttcagcgcaaccctatcactatcgtccctccaattggtatctaaccaagttctcaagaactgatagattctaagttgaacaggtactgctcgggcttccttccattgaatcagttcatttgagacgagttcagaaggaggcactatatcgaaccgtttaacgagctggtcgacgacttcttgcggagaggtgaacgatctaaacgtcaagaaaaagatcttgggtaaattaggatcgacgactgtttcgagtggggtcattttctcgatcagcgccggcaaggtggcaccgatgatatgtccttccgagttgtgcgccaggtcagttggatgataatcgtgcgttgcaacccatcggtgtgcatttggtagcggaaagaccgagagagacgtcgttgaagatagtgagggtttcttctcatcattattggcgctggagaccgatgaagtcgaagtagagtttgaagattgtggacgggactttgcgctttgtatgagtttaggtataggcgtctggtttgaaagtatgttggaccccggggtgaccatatgaacggcctcatctatttcgctggtggagtcttccgttccgatcaaaggttgatcgtagaactgcaagtcaatcgatgatcgggtcggggtcggaagaataccggagcttgcggtgtttgttgaaaacgacaatgagtctaatcatcgatcgacaagatataaaacctcatgaagtaagcaacgagagcgaaactaaatgacgaagcagatagacgaaccagtggtcgatgtcgatgacgctctgttcatcagttctttcttacccatcggcattttggctagcgtcgcttttaaaggcatgggagagagcgaaggcgaagagcccaaaccggatccagaactagaactcgcggtgagcatcgaggacgtctttctgcctctcccaatggttctttccccctcctcctcgctctcgccctctgtaggttgctgcccagtggatctgggtctcactgtgagttctctttcatgcaactctttgaaatcctgccctaccttatcttcatcctcgctttgacgacggatcttgtctaaggcgagcgctttcctcatcaaaatcgataaggttttcatccgaggcctcaagtgatcttcatcaacttccgatattcctgatgcattgtgcctgacggtatcctgttcttcgtctcgatcttcttcatcttcctcctcctcctcctcttcttctgctccctctgtgtcatgggagtacgaagatgacatccgagagccagcggttgtatcagtgaaaggacgaacccatcgttctacctcgtctctgcaaaccccagcacaacgagcagtcgcagttgcttcattgagcaaccttgttctgcgattgacctcatcttcgaccttttcgccttcatctccactagcagacgggtctccttgttcacccttgactccttgtgacggttggcctgtcatcggcagagctgcaatcttttgcgctgaggaaatgaggctgtcgacagactcgaacaggtcggatcttgcgtgttcgagcgccctacgctctgccaacgatcgatttgctccgaattctttctgggcggcgaccgtatcaaccagacctagtagatctgtcacctttgtcaggcaagttcgagcgacgtcaagaatgtgagcgtgagatgaagggtggctagtggttgaatggaagtgtatgtgacctatgaatgcagcgaggattgagacaacttcatcatggagtagatgaacgtgatcaacgacactcggtagagctgaactttgagagagtactcgggctcgctcatttgaagttgaggaaaacaacgaagccgagaatcgatcttggttaacctgatagaacgaccgaggactacccactcgctcaccgaatccaagtccggcgacgacttggccgtctttggccgagtctgactcggacctcttaatgcgatcagtatcaaactcagtatgtaagagacctccagatctgagagacacaggaccgggaaatccagaaggtccagacgaatgaggcttgggcgttcggtcaagatcaatagccaatctcccatcggttggacctgtcaaggagagtgtttggtctacaccttccgcgctgccaccctggctttccccttcggcttcagccagtcggttcttcctacttgtagcctctgccatcagtgctttgggcatgtcgattccgcacttgattgcggcaaggaggaaatcctggatttcggtatgaagcttgcgagcgatggagagcatggcaatgacgtgttctggcctatcaacctctgattccagggggccagatgctgttctagtttgagcgacaagtttactgagatttgcaaggatatgtcttctgccccgagcgagcatggggaaagctttgagatgggaagattttttattcaggcagtcggtcgaagaaagaatcgaacggacggaagatatcacgcaggccgttgacggttgaaaatgctaatgaaggaagttacacgtgaaacaacgattgagcgcaaggcaagatgtgacaacgttcgctccaaaaaagaaaaacaggcttaccgagacccgaccagccgtagcggcagtgtgtagcaatgcaattgcgtgagagatcgaagcttcgattccaccatgcctgacgttctgcatggcactatctacgtgtctatcgagtgaacggctaggtcgccgatcggacgagcgaggtggtaggattggtagggtggacatggatttgggagagctggaataaataggcatctcagaatgccgactgaggaccgggggatgagcagaggagatgggggaagtcgaggaggaagcggaagaggaggatgaggaggacaatggtctgccggcggtatctggtgaaagtctggatgaggagctcgccgaatttgcacgccgaactgaactaacgaacgattctgtattcagagtgatagcttggacgtagttgctgaaaggatcgagaaaaggacaagtgacaggttagacaaagctctctgagaagaatacgagagcgggagaggacgacattgtccgctgaaggtaaagggaagaagtcggacgatcacgagaaacctagagccaaggagagactgaacgaatgaacactgacctggggaaccatcctctgacactatcgagctcgccatcccaccagccagatggatccttattgtggactctaatgatctgtcctcgcctgaagccaaggtacgtcgggttgtccggtttccaatgatgctgagcctgaacaaagataagctgttctacaggagaggtagacctaggcgagatagtccaaggatcaggagtcaaatgagtctgtccatgttgataagagtagagggaagatgatccagaggggttgcttggactggactcgtcagtatcagatcgggaaggaccgggcgccgatcgtatagagtcctggaacgtggatgtggccatgggagaaagagtcgagagaaagttgaccggacgaggcaactatgtggacaagtacgatatctagatcgagagaaagaggagaagaaagaaaagaaagaacgaattccacagagaaagagaccaagaaaggaacggcttgggtggaaagaacgaccaagagaagttgagaacaagaagaaaacaaggaatagaggttgatgaattttctccatttttctgtagtttcactagataattttgaagtttgaatatattctttctgtatcgatctatacatgatagtggtgactacaatttatactacagaggccactagccgatcgtactatgaatctaccctgtatgctacagtgcagtgcaatgtactgtactatactgtgccgtacttttgattcactatagagaactacagagaaccatagtatactacgatatacctctacaagccttatacccataccatgacactacgctcactcgacatcctaactacagcgcaacgcagtatgacaacacatcattactcaccacatctgccatccagaacacaacactctacggtacaagtcccggagacagaatctcgatctccgcttcgtcgtatatgtgaatcttcttgtttacatctttacttgtccttccaagccaccgacgcgtgtaacgactgtgtttcgaagctggtcggtggttacgttacggaacacgtgcaatctacctctcgccctcaccacagccaaagatagcatacactttcattaactatacactctaccttgaattgtcgctcttttgatccatctgtccttctgtcctctcgttctacacgtccagatcatcccttgaggaataccagtcagaatgggcttcaaggcaaagtggaaaagagagatcgtaccagatcataaggtttgcttctgtctttatacccagcctcggtgatcagagagcatacaaccgacctaatccccttctggtccttttgtcgccttcttgctttaataaacctgcgtacacatctctttgttccctcaattcaagtttgactttatcaatgtatggtgtctcctttttctcatcctgaagcttgagaaatcgttaaggagggcaaggatttcatctcctgatccgtcagagccgcggcgtatctgctgttagctctatacgtgacgaggcccgtgccccgaatcttgctcaactcttcatacgccatcagatcctaaaccctgcaaaaactgaccgctggatacccctttggcctgaaatctctttcgatgaatcgtataggtggccgaatatcgagcgaccgggtttctaatccgatcaaagtcagtcctctccctgttgttcttcttaccctcggtcttgcactctgaacatactgatgtccttccgactcaaccgtagatacctcttcctctacatcggtgttctcatctcgatcggcgttcattgcgcaaacatctacacggccatcactatgctccttgctactggctggacaaattcgatatataccaaatgcggagacgactgtgttcttcacgtagggttcctcgtcacaaagtggatctttgtgggctgtatcatcgtatcttttcttctggtaagtcaattaggcgagctcggcgctgaaaagtccgagtatcgattcagaaagaagaggaagaggaagaggaagaagagcgctgtctctcgttcctgatacaaacatactctcttcttcctcataacagctcgcatacgaggcgaacaaggctcggaaggtgatcggcagtcgagacatctcgttcgcgttcacgaacctgatggcaaaccactattattcccttcgtatgtccgctccttggtgtcttctcccaatactttcttcgaggtgctaactgtctcgacccatcaacttactcaggatcatacccacacttttgcttctttgaccatattcaaagctcgactaaaaagtcggatgattttgcatttttcgtgttcttcaccttcaaatgtgattagcctctctgtgtttttgcgcgtgttcccttcctctcggcttgcactgtgactgagactgaaactcatctgtttctcatatcatctcgacgcaataggctggaagacactcttggtagcagatgcgccgagacaggtcattaacgcgctcacattgtattcgtttggcaaggtcaacaaatggcagacggacgatatctcgctctactacgacggaaattgggtgacagccatcatgttactcaccatgatattcaccgttgtcgtttttgctgccaacctgatacttctcatcagcgcggcgattttgtatattccccttcttatctacatccaaggcaacttgaaggtgagtaatctgctgtcggatagtaaaatcatcagcatctttctctgttcatgaccaactgacttctttttgtttaccttccccaataggaatactgttgtcataagattgacaaggtcagtcttgacctcgcttcgttggctgacataccgtttccgtgactgacagcctctttgtctgctcttctcactttcagcggattgcagagctcatcaagcgcaagcaaaaacagcggattgcccgcaatgcagcgtacgaaaaacgaatggcaggagctgatggttccaacggtattattggtctgaaccaaccgacgttgccaaacgttctccttgatgaagacgagggcgaggatgaggaaggagatatcaagaaaccactccgacgcctgggtgcgcctatcgatggcttttacggcaacccgtctacaagccaagggcatttggttcacagtgagagcaatagctcattgaccaaggtctcttcgctctcatacggccatgttacacccctgccttatcatcaaccactcggcactgctgggctacaacctcagggctatcatcttaacggaggaagagactatctggcgtacggacaaccaccacccatgccaatgtatcaacctccaggcactacatacccaatccatcaaccacccagtttgtaccccccatcccggtctcaatcccggtcacaactccaacttcaacctcaagcccagtccaggcaggtaggtcgatccgaatctttcaaattgaacgaatccgcacaggacgttttggaaggctactacgccacttcccctggtggatacgatggctacgaacacaaacaacctaccgaacaggcccagacccaggcgcacagcaactaccatctgccaaaagcatatgtgccatctcagaatatcaccagacaagattcgacctcggcctatcgaaaaggttttcttcctccaatccaaggccaagcccaagctcaatattcacatcaactccaacctccaacatcgttccattctccgccgaaatcacaaaaggactcttacgaacactcttctaccggtcctttggtcactcgtaatcaaacgatgaacgataactctcgatttggaggagtcgacagggtcactgctggtggagagagcagcaaaggacatcccttgtctctatcgccgaatcacgctcaaggtgttcagtggtcagctagcggacaagaagagaggactcaaagtggtagggtggaccaaaatttgacaccagccggctacatcaatgagaaagcggtctacaagaagagcaattagatcgtgtacatcttctcttcacccactgttttttttcttgttttgtgttccgatttctgtttgtgttgcatcatcttggagacacggctggatccgttcaagtcttacctcttttctattctctctctcctcctgtgctctgtaccttgacgtcccatcttatcttgtctcgcgctttctgctctacgtctctttatttgtgtttccagtacatcgtccatcgcacgccgagctgtcctggtcgacgctcactcattctcgtttttgtttcctctttccttcctcttgtccttttctcatttgtagccctttctcatacctcacgagaaaccctctaaacaataaacatacacatacacatacatacacacacacagcatttcataccataccacaccataccataccataccacaccataccgtaccccctcgaggattatcatttccctactctcatgttattctttctttgggacactcttctctatacctttctttctagtgttgactttgagtatgttcctctccgtattctcagatatgaagaactgtacagaacgaacaaaataatccaagggaagccaaatagggaactcaaagagaacccagtcgacgtcccaaagagtgtggaaggagaaaaagagaggggagtagaaccctcgtcgggaagcaagagtaagccccattgtgttacctcttctggtttacttcccccgaagaggaagaaagaagagaggcaatcgcagaaccatttgactatgaggaacaaggtgtatgttgctcgtgaaaaaaaactcaagggtaaaaaaagacgaggttggggggtgcagtacatcgagcgtcccaatctactgagaactccaactctccttgaacagagtcagacagcccacctcggattcttaaagcgagactctttccctagatccggatttcacattctctttctcagtagagggagacctcaacatctcgtttgtgcaatgaaagaaagtgaagaggtttcaggcaggaaaaagcagctcatgtcttcgctgaactctttccctaatctcttctactatcctccatagtaaacaaaaagggatctcctgccaacaagaaagagagtgaaaggccggacgtcagacagtaggaggactttgaaaaaccaagacgagatcgacccgttcagaggatagcaggagtcagttgatgcaagggataggattgcccgcatgacgcgttggggggtgggaagaaggaatccagggagaatcaatgggacggaggtgcctttgaggggtatgaacggacggcgatccaccaaaggcgaagcgtccatgatgttctgattccctcaaacagacaaaagaccaaccaagaccactgaacgatcctccctgccgaaaagaaaagagcttccacctaccctgcttccaaatctctttccgcacctagaatcatcaacattaaaaggcaaacgctgaacccaacatcccatccgacctcgatgtaagatctactctcgtttcgcccgaccgctctcagccttggaaaccaaaccaaacgggagagcaaccaccttgctctgcgaacccccctatacaatcttataagcagacttaatcaatcaaccactcgacatgtacggaaagaccataacccagaaaggtcctactccgaacaccgtgcttaggggtgtcagctttccatgtaggtaaaccaaaatctgagcaggatctttccgcaactgactgtcgagctttggaatggaagaaaagatgtaagaacaccggtgggattgtacaagtttgggactggggaatgcagagacgaggcaggcggatcaaccaaggaaaggtaaaggataagaacagccggtttgggatgcagaaccagagatcaccaagtcgaggaaggtgcccataaaaggcttaagacgtggagcggaaaccctagaatgaagaagatcagggggaaaagagacccaagatggagaaagcaggggtcagaacagcgaaaggtttatggactgatcgggttgcatcttcttccacttttttttttctttcttaaactccggggactttcccagcagacgagagaaaggtgtgcagatccaagaacctgacgaccttgtaggtgtatctgcgaaagcgattctttgctcgacgagggttgggagaaagaggagaaaagagagagcgaaaaaaatggtctgtttttgaggtggcacggcgccctggtaatcatacacgtg

SEQ ID NO: 465 - DNA, 1849 bp, Xanthophyllomyces dendrorhous
gcacagcttcaacttgtaaccttgactcgaccggacgttcttccttttgttcctttgccagggttttcaaccgactgacacacattaatattccctcttcgatctatttctgagagaaatgaaatcggacttatagatgggtacaacatgtcaatcatcggatcagaagggaacggaagagacacgattctgattccggtataataacaatagacgtacaacagtgtcaaaaaaacaagaagtgagaaagaaaaggtataagagaaggactagactatgcgacgatatatgatgggagtgaaggaggatgttcaagacggcctatgctagggaatttatacatgtatgattggaaacaagaggaacagactgatggaggagagagagaggggctattaggtcaagacgagcgtgggagaaggactatcaagcgagctaggcaacatgaatgtttgggggcgcctggacgaagattaagcaagattcgatcagtcccaaagcaaatcgagagacacacacaaaaagaaagaagaaaaagacaagaataccactcacagtcggttctccagcactttcatgctcttgatctcgtgcatgatgtctcccgagccaagtcgacgagcacccgaactctgcgcattggccaccaagaccgagatgtcgagcggaggagagaatgacgcgatagggatggacgagtcgttcaacctgatggatgaaaagggaattgctgcaggaaccaatctgtattttgccaaaagctatcaagacatggcgatgttagtaagcacgaggaaggaccacaacacttgatcatcagagagaaatagtagtttttgactgataaaggacacgtacaccttggactttgagatcttcgacgaggacatgaagcgttgaaagagttcgcttcctaagctcatagcatgaagagagatctaagtggaacataaagacaagaaaaacacgcgcgaaagttagcgtcgccagcacgacagaccggatgggcaacgcgggtaactccggctatcgacgtgaatgccaagttgacacctcatcgggcaacaaccgggatttcccaaggcccacccttgtttttccttcttttgccttgccgaatgaactcaccatcccagttctccgaatcccacacgggaaggtcacagatgagctccacctcacagctgccagggaccatcaatgagctaaatcgtagagacggagtgaaacctatcagtcagggcactttctttcacacgcacacacatattcatgtcaatagacccatagggaagtagaagatataaagacaggaaaaccccaagatgtacctgaacactgaggattcaaactgatgcaaagccgagatcatcgactgggcaggcagctcgatagtagatcttggagaactaatcattgttattcttgcctacgtttgttttgagtctgggttgtttaacggggaaatcgatagattcaagggggtattggtggagaggatgtgtggagatcgagggatgagtgtggggttaacgtagaaggtgggtatatatgagaaggatcgaaagtgtacagaaagtcgaatgtagtcgagtgtgtgggaaggatccagaagaagggaaatcgaaaatcaccttgagctttaaaagggaccggacccggatgaagtcggtatttcccaaagaggttcaatccacttggtcacctccaagctatgcatgcttttgcctcctcccccaacaccccatccaccggatagttttcgacgccaatgacaaaagaaagcgcatgaaggagaaagcggatgtggaaatcgaacgggttgccgagaacgccgcgagtgccgcga

SEQ ID NO: 466 - DNA, 14354 bp, Xanthophyllomyces dendrorhous
cgagtgccgcgagtgccgcacatgtatttcatcgatgccgccggacgttttctcttctgctctataaatctccttccgtactttgtgtccattggtaatcaaattttctatctatggcctctcatgtctataagatcggttgtctcttttcgaagaaaaggctagaacaaaaggcttcgagcgttcgagaggaagacatccatgatgatatcatattacattaaactactcctctaatcgatctcgataatgttcgcgtcaggagttgacgcaggtgctccctgttgagatggacgttggtctttcacagcaccgagttgagaggatcggtacgtcttccatgtagtctcctcatcagacaacacaatcggctccctttcgccggcggtcgccagggtagaagattccatcggtcgtgatttactatgttgagccacagtagaatttacaaagcgaaagaacctgctggacgtttcagtttggacgcttgtagggttagactgaccagctcccgaaaactcgccaccctttttgacaacatcgacatcgttcatctcgtccaacgccgcccaatcatcctcgtccatcccctcagcctctgcgattgccaactccaaatctatgtcccatttttcttcagcgatcttcgtcgctgatctctttccaacagacgagttctggcgttttggagcaggttgcttcacaggagacggagcggcccgacgggtaggaagaaccgaggcaggaataggtgtggatgtcgattcgtatatgattgaagattgtccacgtggaaccgtattcaatggcatgtgagcaggcattagttcaaacccttccggaatatagtcttcttcttcttcctccttattgacatcatcatcgtcaaagtcgatatcgataggtccctgatgtagaggttggccttctgttcgggcccttggaggaagatttggtggcgagagagcgatattgtgctgctcaggctccggatcgattctggtatatcggaaaaccaatctgagtgcatgtaccccacaacgtcttgagacagatgaaaagaaaaggctggactttcacttacccaagccgatcattcaggcttctctccagcgcaatctcctccctaattccttcacaccattgaggtacgctgtaccccttgaccgagcagttctcaggtgtaagcagcaacaatcctctgagaaccttgacattttgcagaacaagctgtttgtatgaagtgtatgaaatcagaaacaaccgtatgatgcgtcaattctaacttcctgtcttcaagaatagacaggcaattcatgcacgaacaactgactttacatcctagccgagtctctcccagcactagattgggaatcttcctatactctatggcctgccaataagcttacaccgataagatttctaaacaaccaggataggatcaaaagatgacagagatatatattgaaaactcacttcgacctcgtgaactccatcacttagtgtgaacttcaacattgacctcgtatactttggtccagtgccttccttctcgtcttcctctctcccattacctgacccatcctcagcaccttcttcctctacaggtaatcgcctaatttgcgctcggccagaccgaacttctcgtttgtcattcaacgttcgtttgagattgtatgccgaagctccgatctgtggagagccatatatttatagccggagaaattaagaaggtgcatacagtcagtcttcattgagagaattagacttaggatgaaagtttactggtgtccaggacgggcgacaagatcatgtagaaaagaggtcgcacctctgtgatagccatgatcatgacgaggcagccttgtttctgcccttgatataatacctgctgatgcatcatatcctctccggtaatcaactcaagcggaaaaccagtcccatgtacagttgattgctcgagatcagactcgaggaaggcaaggtttacctgtttgatctgttgttgaagtgtcaggcctggagtcttctcctgaattgattgaataatgtttgtgacccattcctatggaaattgacagcaagtttcaaaacaacaaatatagaaggtttgagttcgaattaatataagtgcaagaaggttctggagagaaaatcggcaaccaactggatcgatagctggttttgggtagaggaacttcaggttattgaggataggtccgatctgagcagaatgagtggacatctatagaatgattagagggaatttttggatgcgatcactcggtcatcacccttcttgttcattctctcttgatgttgaagaaacggttgaggatggaagaagatggaaaatatctcggttatcagcgaaacgagcgattcctgcccaaataccacttatctccgtctgtccatctaacaatcaacatggcttctttcttcttttatggaactctcttggtgccagaagtaagcctgacaaatctgcaattgcaatttcgaacttactcatgctacatgttctccgtcacagatcttgcttcgagtcatcaatcgacctgggcgagatctcacgttccagccaggcattctaaaaggctactctagacatgccgtcaaaggtcaagactatccagccatgatccctgaagaacaatctcaacagttgaccggaacgtgagtcgtctcactatcactctttgtaatgtttatactttgtcgctgaacgatgatgcaatgggctgataaacagactagattctggccaagtgcgagggacgattgtccatcatctctctccatccgatgtcgccgctcttactgaatttgaaggagacgagtatgccattcggacggtatcagttgtcgctctttctgaaaaacgagtcacgattgaagcacatgcaaccgagcttatccttgaggaaggattagataaggaaggcgcgactgttcgggccgaaacatatgtctggatagcagagtcatataagttggaaaaaaaggcttgggagtgagtcgagtcacatcgcgttcttatacacaacgttatctctgaagttatcagttctctcttctcatttgctgatcttataagagtcacggtgggcatcttacttgtagttttcatacctttgtcacagacaaactccatctgtggacgatcccaataacctccttaccagataaccacgatcatccaaaacctagcccatcaactatgcctgaatccgtacttcctgctaacaatgccaatcctcctgtgctcggtcatggaatcaagaaatacttcgcattcagcccaggatatgtgaatctcaaccatggcgcgtatggagcagcgccccttccagttctcaagtatggcgaggaaatcaccgccgcttgcgagtccaaaccagacttgtttctgttcgtgactctttttcgaccttttctatcgttgtttgtctacttgtttaatattacctgtccaaccgtttttactcaaaacaggaagagagaatatattcctctactggcaactgcgagagcacaagttgcagagcttatgaaggccaagtccgacgatgtcgtcctcacacctaacacaagtcacgtcagtcttctttattccgtacttgcttcaatcttgcttcgatagctcatacgtgatcatcatccatatgcaggctatcagcactgtgttgaacaatatcgcttggaaagaaaatgacatcatcgtacattgttcgtgcctgcatgttttttgccattccatcgcttgatactcttgattggctgatatccaaacagacagcactacttacggtcctgtttataaggctctagcctacactgcggatcgattcccatcgcttaacctcaatgttcacatcatccctttgacctttcctatggctcacgctgagatcgtctctcttacggaaagcgcggtgaagaaactcaatgagcaaggcccaggaaaagtcagacttgttttagtcgatgcgattgcttccaatccgggaatagtgttgccttggagggaagttgcgaagatagccaagaaacatcaagcattatgtatagttgacggtgctcacctgattggtaaacaattttgcatgacaacgcgatgtccatcttcagtcgtgattgtcttctttcaattgaatcctgttttgtattgtttgttaaataggtcaacaaccaatcgatctatcggatcctgaaacgtgtgattttttcatctcaaattgtcataaatggatgtacactaagagagcattggctgttttatggtaaaccttcgtgcaatttggttcttacgttttctcttctacatgaagacaattgactcatgactcaccaatcctgttttgataaagggttccggagagaaatcatcgtttgattcaaagctcatttccgacgtcaatagaatagtgagttcattcatcattcaagtttgttgtaggatatttcaattgactcgcgtatgtacgttggtgccatagcacctctgcaacagtaagcggagatatattcttgctaaatttggaacgaccgcagactgaatgaatcatgtgtggtatgaacagaatcctggcgtaaatggtcctgctcccttccacaaattgtttagttagtgtcgacttttttctatgatttgtctgacgaatgaaagttcgtcctgattgaaacatgctaattcaatgtattcatcacttcagattggacggcgaccaatgatcttgctccttccctttcggtcactgctgcgctcgacttccgagcctggctagggggtgagaaagttatcaccgactattgtcataacttggctgtcgaaggaggcaagattttccaggcaatttggagcgatggtgatgtacagatggagatcatggagagtgaaaagagagagttgacggctaacatggtgtgtcctgactggtctctctttctcagatagagaagagtagattactgattttctgatgacttccctcgtttctgtatcctgggtttcaaggtcaatgtggagctgcctcttgtgaaggctcctacttatgcggatgccgtggctcagtatgatgttatgttggacatattattcaaggctaactgcttcgctatgcccttcgtccacaataataaatggtgcgctcttccctcttttcacttctaaatgaacacaaggcattccgactcattctttcgtcgtcatctctctttctgacattcgtttctataggtgggtacgtgcatcggcgcaggtgtataatgaaccggaggatttcacgtatattgcaaaggttttgaaggatcattgcgattcgctcaagcagaggcatgttgatgcagcataacgcgtcatcttttgatacacgagtcttgaattcatcttcatggactacattggttctctttgtctatttaatgagctgtctcttaattccaagaatgaagatggacttttcgctctagcacttgtttccgatgaagtgctcactgatttgccaaaaccatttataaaacgtccaggtgtctctctgaagatggatttcaacgctcttcggagagaagcttctgatacctcgcgcaagatctagagatattgcctcaagaggaagaagcaaaagatagtcgaacaaaagttgaatagaattcaagatggagataagtactgaaatgaaagggtgaaaacgaacttctcgttctggcacttgttcccaatcaagtcctcactggtttcccaaaccatatacacaccacccaggtgtttcagtaaaacggattgagaaatcaggaaaacaggagggaacccgctagaaaatctatagctcttcggaaagagaggcttgggactccgcgcaaacggaagtctgaaggtgatgcctcaagaatagattaacaaataacagatgaaaacatgtcaagactgttgaaacttcgacacttgtcaagaaaagcattttgaactccttatagttttgtaaaatgttcttcaatatagaagccgggctggctcaattggtagagcgtcagacttctaatctgaaggttgcgggttcgagtcccgcgtctggttaatagcttacttttttttctctagtttttcttttgctatctcgtcactctcaatccatttttaaaacccagtccattttttctggtcagtatgtcgaagaatttttttgcaagtggacagatgattgtctagattgatatcaacagcctatatagatggaggtgtggaagaggcatttgaatggccggcttaaccctaacatgtttaatcatactggtaacaaaatggatatcaacttcaatttctactgctgttcttacatcattaatcaaacgatacttcatgctacctttttagtctttctatcctcaaaacgatcgttctcgtgcagcttgtatcttttctttattccggagtccggaccgctcgggaatggaaacatccggactagtttgttccgtgggctgtgagactgatggttttagctgattctatattgatcaagggatttttttcccagaacggtccggattgaatgattcgtgatgatgtcagatgatcatctaatagtcgcatatcgaattggccaaagatttctcattctcctttacgcttcatgtcatcatatgaagagtgtataagtagctgttctatgaaccagatgtttgctactcatcgacatagattgctttacatatcactaacttcatcatgcgtttccgaggactgaccgttgtaatctcttgcgtggctttggtacaagcgttaccaactcttatcactggaaggaatcataaatgggaccgaacgtcacccgaagaaggtgatctggtcgttgggtcgaaccactttgagatggaatacaagacgatctccgaagctctcgctgcgttgggaccaactggaggaaatgtgtttgtgtatcccggaggtaaatatgtctctatttcagacacccagaccagctctaatcggtagattatttcactacatcgacgtacgttctagtttaccacgaacaggttgtgttgaacaagacgggaccgatcaagatacaaggatatacaagtgatgctcgggactataagaacaatcaggttgtcatcacctacggccttgatgcggtctccgtgaataaatcaaacgatctgtcgggaactgtcagagctgaaagcgcaggcgtgaacttgtacaacttggagtaagccatagatcagttgctgtccatcttgtcttcgttcgccctctgatgatgaataacacttttgtcggtccacatcagtatcgagaatacatacggtaagtgtactcatctgagtgataacgttgtgatgcatacgttcacgctcgtcttcattgctcttctcgattcatctttcaaaggtcattacactgcgggatgtcagtgtcaagcaagtaagttcacgatcctattttagttcagtcgcatcgactgacaatcttgtctgttttctaccttctccctaccagtcgctctctcagctcaagccgggaagcaaggctactacggcgtcaagttgactggatatcaggatacgttgcttgccaatattggcactcagatctattccaaggtatatcgtcttctcgtgctattcaaacaagcagtgactaattattcaattttatgctgaaatttagtcttgtattgcgggagccgttggtaagtcatttaatttctttgattcttagatggctccggttttctgtatatactttattgactagattcaaaatttcaacaactggtagatttcatctttggacagaatgcatctgtttacatctatagtacggtcagattgctattcttttgcatatagagtagtactcaccacagttcttgacctctacgtagaatccgacatcgtctctaccgctgagggaaacatcacagctcctgggggaactgacgagaatgctcatcaagtgttgtaagtatgatagcattatccacaatctcgcgctcaatagagaaggtacctgccatcatcttttgttcttaatagcgtttttcataagtcgaacatcatccctgcttatgatgctgcgaccaacgtcaccggaaatggaaccggaaacgtctttcttggtcgaccctggaaggcgttcggcaagacaatctatagaaactcttacatcggagatcatgtcaacgtgtgtatatccagcgcgatctatagtattttgtatacagtggtcttgggctcggattgagctgattagcgtctcgtatcttcgacagcctgtcggctggaagatctggaatgtagctacacctaacgtgaatcagagcaccctggccgagtacaaggtgcgttcttgtgttttgtttttctctttggacaacgtgacttgatgtctgattcagttgatatcatagaactacgggcccggatcatactacgccaacagagctgaacgagctagtaagatcctcatgctcattgatcaatccgagctctgaatgctgacaccgacttcttcttgatcataggctttgctcaggagctgacccagtcggaggctgaaaactacactatcacagctgttcgttcagtctctcctctatcatactctcaagtcaattgctgactcatttatgcatgatatctctatgcctaggtccttggacttgattatgagtcttgggttgatctggattatgtctgatctggaggatttctataatgtagcgctcggtagtgcaagtgctctgatatgatatattacctaagcgtcgggagaaacatagatacatcagtcacatcttcttcagtctatagcagcaagactccattagccatctccttcggtttctatctcgatacattctatcatggcagctccccagtacattgcagccgttagtaaaaatcgtactgtacatgagtagttcttgggtctgatatttaccttgttgtctcattttgcatcaaaaggatgacgacgacgacgatgtgctctcgtttgtcaagcctaccccaggcctggcagcagctacgtcttcttcctcagtcccagctacctcttcatcatcgagtggaccttcttacgcgaatccatcagctccccaggtgcctagtggagtatcagggcgtattggatcgaacccagctccctccaggtcaaacatcgcgggcgtccgagttgagaccgtacgtgtgtcacgtcccgaccccaggctactgattgtttgctgagcataaacaaccgaccccaatctttctttctttgattccctgttcggcacgaggctctctagagatatacaggaatgaacactcttgatgaacccgtgtcggaaactattgtacgcctcttccatctatatctatctgtcaataactttatacctaccgccttccgtgtccttactcttctttgctcatctatatcagcttcgggatctgaaaagcatttatgcaaaactgcttcaggttctataccctccacgaacaaacggaatcggatcccaattggatctgttgagagattgggacctatggggaccgttggtgatatgtttggcgttggctatcatgctctcattagatgtacgcctcttgaccctttctttgatcgcgatggaagtctcgttcgtcgagcattggaactcaccagactgataccctgctattctttcatgtcttctcttaaccttctgtttatgacatccgttcaggctccggcagcgcaatcgattgaggctttctccatggtaatctcgctagtgacgattggtagtgtagtcgtaactgtgaatgcaaagctactagggggaaaagtgttcgtccaagcgcctgcctctcaacatattctagactaagcatgccaattctaactctttgttctgtctaaaccaacaataggtcgttctttcagtctcttgtacgttttacatctcaaacgattcctctttcaaagagaaccacgtccgatgatgttcacttgttgtcttttgcttcaacaaaatctttttagtgtgtacttgggtattgtgtcgctccactgttgctggcatctattgtatcattcttccttcactcactcatcatcagactacccgtcagtctaggatgcatggcctggtctgtttggggtatgtcttcttcgttctcttctctttccttctctttgatcgaaccaagctgaatacgaccgtgtttttcacctcttagcttctgtcaactttctctctggcacgagattacctgcatcgaaacaggctatggctgtttatcctttgtttctattctactttatgctcgcttggatgattctcatccagtagacaacgtttcccctatctgttagaaaaatgtaataggatgtgctcgcttcacataaacgacttaaggatcacttaacgagaaggagtcattcaagggaagatcatgacatgtaaggtacagatgatggtatctgaagtagatcgtcaaacgtatagaagcatggaggtaagatacatgcatatgtaaaaagtagagaaagaaaggatagatacagtgagcagggtagcaaagaggtagatcgaggaccgaaatctcaacggcgctctttcagctcaaactcatccgtccttcttgaattcgttccggatgtagagccgatttcaatcccaatggttgacagaccagacttagacccactctggtcctgattcaggttggagctgataaaagccttcttgatctctctcgcgctcgccttgttcttgaagggaaaagaactcgtccgtttgtccgctttagtcgttttcgatagatgcgaaggttcctcgaaaaacatgcactatcaaacgaagatcaagaggtatcgaattagaatcgtttcctacaaaacagtccgcttcaacctaagcttccgaaaaagttagaggatgtatgctcactacccaagcaccatacactccaatgacgcccgtcacgaaggtaacatacagactcagaccggaaagagccgtgttgtagctcgtgccagctgagatgaagaacaacggagtaagaatccatactatggggtttataggacaaatccagagcaaggatgattagccgataggatgctgagtcaaaaatctggaaaaataaacatactagtctgaacccgctgaggagtttgcttgaatctagaccgtttggagtgaccggtggtggcggtagaagaaggtgcttctggttgcacagggtctaaatgtggagctggaggggcggtctattatgcacagtgatgatgattatgacgatgacaacaacatggatgataaattgatgagacaggctgaggcatcacgatactcagaacaagaagattgaagagaagacgaaccatacagaggatgagacaagccagcgcgatcaatctgcgtcaagcggccagcgcattaaaaaagggaaacccaggagtaagatcagtgacgtatcaagattgaacgacagagagcgagcaagatgacatacagcacccccatctgcaaacataagaatctctccagtctggtcaagccaatccggcctgacgagaagatttctctttgtgtacggccaattttccccatctgtgtgctctcctcatcgagacctcccatgaggaacatgattaatcttggaaaggtgatgagcgggatagctagcgaggcaagggcaacggccgcggtgtaggcaaaccaagataccgcatccgacggatcgaggtcctctgagggcggctgtgaggcctgccaaagtgtctgtgatggaaccttactatcattaattttagaagaagaagaagaagccatgacgacgaatggtgaatgatggtaaggatggatgatcgtcagagtgggaaggagcaagattgtgtaattgcctaagaaatttcgtatcatacatttatttaacacatggaatccttgacgataagatgatctcttactaccaacaacaataacgacaacagcagtaacaaagacaggtgtaaaagcatacagcctagaatcccagactgatagtgagcgagtctagccagaaactagaaacagcgtagaacgtccaatccgaatgcttcttcgtcgagccggccaagagctcgcggatggtctatccaacaagctttcaacaacattcgagagatgcaggtcggccaacttgaactatcttgctaaggatgtttgtcccatcttcttctcaccttcttgctcatctggatttactgtctggttctccttgtaaaacagtcggctgattgcttccttgatctcagtcatgccggcgtttacagagctcgccggtggttcggaaagacgtccaggataagtctgaggcgtttggtcataatgtcagtccttgaacatcaactcgaccgactcagagggatatcaacggctagatcaatcattcatcttcatctattgtgttgcaactctttctcctaggacttcatcttgtctatcttgaatgcttcgccatcactacgtgactctcggtcgtttctcgcctcgttcggtgcacctctgtctccctccgattctaaaagacctacgccggtagaatccgataagcaacagtccgcagcgttggtgtcgagcttgctgaaccaccaccgtcgccgccacaccgccgtagtcaagatccaaggtcctttcactgaccgacagctcgagtcgatatgccgtggtatggtctatcttcagcagctcggtctcgtcagtgtgattgtggtcgaccaagaaggctggcatcctgacggacaacaagggggcaaattcggtcgggaggccaggcaggaggcattgagagagatggagcgtgtcgtctccatgctggttgggcttgggagcgaagccaggcccgtcctgcaggtgccaatcaccgccagtccagatccagaacagggtgggcagagaagagtgacggtcgaacaggcgaacttatcagccgtgatcaatgcgctgaaggccggagagatcccggtcctaccaccgctcatcttagaagtcagtggagagaaaaccaaggttgagagaggtgatgcaaacgaagtcgttcttgctcttgtcaaaggcctcgctgaagctggaaaagccactagcctgtccaatgacaagggtaacgtaccgttcagagtagcatccgaaacttctctctccgaatccattgcaattgccgagtcggtatcttcgtcatcatcctcgtcatcaacgtcttccagttcatctcaatcgtctccgctacttgacccgttgaatttgaccccctatcggctcatgctcatcaaccgagagggcggcataccttcatacgctcgtcagggccttcctcacttgacaatcaacttgacatccgaatactctttcatcaatcagacgttctcttccgagtggaacaactctcatccgactgcgctacgaaatttgcacttatcaaaagaatgcctgcagctcatgccgccaactgcgtcaggaattgtagtttcctataaatcgccgatggccctaattggaaacctaatcaccaacaagccagcccactctccctcccttcctcatgcgctgcttgattcgcaaaagaagctcacccctcacacgccgaccttgatccggctaggtcttcctatcgagatcatccgaaacccaaggggattcgaccgagtcaagatgacgacactgttggaatcaagcttcaaacgtaagcttaaccaggaggcattctacaaacggcttgaaaaacacctggactttgtacttatcgccggagactatgccggcgcggctatcgtgaccaatgaatgggaagaaggaaccgagcttgccgattcgggtctccctcccatctcctatctcgacaagttcgccgttttgccttctcaccaaggagccgtctcgggcactgtcgactttctctggtcagctcttcgggacgagacatttggatcaggactgtcttctgcgctgaacacaacgcctggttcgctggcgggcactttgaaaggtcgggatcttgtatggagaagtcgtgcagataacccggtgaacaaatggtactttgagaggagcgatggctttttgagaatcggaggtgaaggagggaagtggaaaatgttttggtgcgacaaggaagatctcagtcacgggctggagagtatgaagactcaagatcaggagcagatagaggaggcggaacagaaacaagagcgagttgagctatcgacggatggatggatggatttgatgaggcgaaaagaaaaggatgccggtgggtttgatcggtggggtcttgtggtggacaagattcctagtgcttgggcggactagagaacatgagatgtatat

SEQ ID NO: 467 - DNA, 27005 bp, Xanthophyllomyces dendrorhous
gtatatgtatcctatgcatttctgattagacaaacgaccagctatccaaacagcatgcccattcacgttaaccaagatctgttgatgttgttaacaaacgattgatggccacaaagtaagagttcgcgcttccaggcgatttcgtcaccgccatcggcaagcttctttcctcgctcgctcactcctctgaccatcaccataaattatctttgagcgtctctgactctgagtttctttctttacctggtttgattgtttcctgttcaagcttctgtctggaatcactctgtactgtgccctcggacgagacacacacatatacaccatcttcttttctccgccttgggagttcactcagtcatgcttcgagcccttcgaaggccaccccctcggctatcatcagttgcccaacctcagcctcgagttcgctcaatatttgttcctctccaacgtctcaccatctccactagctctgggaatgcatccaaactccagcattcccttagacctctctctgtcagggcactttcattcggatctttcggtaggattcttggtcgctccatcaggctgcctctcactggagcagccataggtggaggagctatgagtgccgctgcatatcaagttgagagttagtcttttcgttcttccctccttatcatactctaaagacaatgtctatttgtctgataacgttcgcacaatccaactgcttttcattctgatttcgatagacttgagaacgcaggcgacctcctggcttgactttgctacctccaccatttctgacacaacctcgaccttgttcgactcggcatccaatgcagcttctgaaatctcgtccgctctctcatccggagtggattctgcaaggcaagggatcgatggacttacctccgaactgtctgggttagagcctccggactggttccaatccggattggcttggttcaaagaaggccgtattggtacagatgagcctgcacctcaaacagcatcgaccgaagacagctcaaacaacgagaccgaaggagacgaggaaggaggagatccgtcgcccgctccaccagcaattctcagtgctctagccgcattaacgtcgtcgtcttcagatgaggatcatccctcagcaagatccacacttgaggattcgacgttgcttcttctgacaaagaagctcatcgagatcagacaagtcttgctaagtattgaccagtcggatgcactaaagctgccaagcattgtggtgataggaagccagagctcggggaagagtagtgtgctggaagccattgtaggccacgagttcttaccaaagtgggttgattcatatgatcttgcgcaactatccttgctctcagtttctgactatcatccttacacatttctattcgttgatgatattgtagaggcgacaatatggtcactcgacggcctatcgagctaacattgatccatactccaccaacggctgctcggcctaatcctgtcgagcacggagacttcccctccctcggcatttctggaatcactgacttccgtcagatacaaaagactctgactgatcttaacctatccgtacctgcgtctcaagcggtttcagatgagccgattgacctccggatctactccccgcatgtccctgatctcacgctgatcgatcttcctggatacatccaaatcgctagtatggatcaaccaccggagttgaaagaaaagatcgctgggctgtgtgacaagtacattcaggaacctaacatcatccttgctgtttgtgcggccgatgtcgatctcgccaactcgcccgctcttaaagcgagcagagacgttgatccgctgggtcttcgaaccattggggtggtcaccaagatggatctcattcctgccgaacagggtgctcagatcttgaagggaaatcgataccctctccacctagggtacatcggtgtcgtctgtaaacacacttccaagggaatttttggatcggacaagtcaaatatcactggtgccgtcttgaggagggaggaagactttttcggaggcgagaactcgaaggtattcagacgaacggacgagaatagcgtagtggtcgggacggacaagttgaggaaaaagttaatgagagtgcttgagacgagtatggccggaagtttacatggaatcacgaacgctgttcagttggaactggaagcagcaacgtatcaattcaaggtttgtgtgtctcgtctattcatctctcgattggcgttactgataatgttccccgacgttttttctatactgaatgcttctataggtccagtacaacgacagacgggtatcgcccgaatcttatgtggccgagaccttggatacgctcaaatctcagttccgcgaattctccactcagttcaccaagcctctcatccgagctcgtctgaagtctaagcttgacgagaagcttttaaacattctcgatcaattgtattgggctgacccacggacggccgagttgtctgcacttggcgacgatcgaaagttgactgagaaagagctcgatgtcgcttggcttcacaagctcgagacggccaagtcactattgacaaaatctggtgtcggtcgggattcgacctcccttgtcgccgatggacttcggcaattgatggagacaattacctcgaccgaaccgcttttaaaccatccagtcacgtctgaacgagttattcaattttctcacgcgatcctgagagatcggatcccggtgacatctgatcaggtagaaaattgtatcaagccttacaagtatgatatcgagttggatgaccgggagtgggaagttggtcgagtccgagcagaaagtttgatggagagggagattgggttgatggaagcaaagttggcggagattagggataaagttggcggaaggagaactctagatggattggtcaggcatgtaggcgatattgagagagaaaagaaagaaattgcaaagagaaagttagagagaatgaggaaaggagaggaggaggtggaggagacagtgaccccttcggatccttataagtacaacaccgctcatcttgcagaaggtccgcttcatctataatcttttcatactcctgggtacatcatgtttgctgactcgttggaacgcatctgaaataaaatccgattgactagctcgacatgccatgatcttccaggacaggctccaaatcatcaagcttcggaagcttgcccttaagtctcgtcgatgtaaagccgggccggacgaaagagcattctgtccggaagcgttcttgaacgcggtagccgataagttggcctacacatctacgatgttcatcagtatgttttcttcaaacgcgccagcttgagatcgatatgatctgctagagctgacaccgacaatgtcccttttcagatgtcgagttactcgaccccttcttctatcagttcccaagcggcatagacactggtctacgacctgaccttatcgtacgttcatgtgttttctctgtttgaagctcgtatgggaaaaggtattaatcccgtatgtcatgcagacaaatcccgactttgcgagagaaaacccgacaatacgcgctcacctcgagttgcaagaacgtaaagacaaattggagaaggtcagacatcactttgtcccgttcttgctcatcccttgcggatgggttgtcatacagtttggacgaatggctaattgttgtacttcttgttctatatctctccacttgaaattaggtcatggcttcccttcaatcgctgatcgatctccgacaagacgctatgccagagacgaggaagcgaggagcagctggcttcttcggattccgatcttgaaaaggctttccgtttctctgcatctcctgtgaccttctctcttccatatcctgctcccctatacaacctgaagctttcattacagtctcttcctctctgatacttcttgtcttccctctgctagccatcatctcatatacgacagcctcctttcaatcatcatcccaaccatcttatcccttcctcctcgacatgttctggttgaactttgttttatataatgatccccctttcttgcatgagtttctccctggccagttattttgctgatatctcagttggcatctatcgtcccacgggttctcaggactttccttctgtcaaattagaatttggcgcacgacaagagagtcgagcagtagggtgcgcgagtgagaagaagaaacagcaagaccgggaagtcatgtatgaccagcatgaatcaaatttatatccgaccccggtttttttaactcgtccacttctgcctgaagcttctcaatctctaaaatcaatctgtccctctcagatctctcgtctgaccctactacaggctcactgccgtctccgttttcaggtttgttcagacttgggttcccgataggtccggaagatgaggaggatgaagagagcgcggcatcaggcatgttgagtaacaacaaaagtttgagatcgtgtgagagtttcaaaaggttcgttgtgttacgaagtaaactcgatgaacggagagagattgatagtggtgtaagcgggctcgaattgtttgtcgtctttatgggatttgatagatacgaccatccgaattatgagagtaagcgtcagcagctggatgatagagatactcatttctacgaaaattgaggaagaaacagaagaaacgaacctcgataccgaacccagccatgacttcacccaatccatcaccgagcccactaacttctctgtctaccaacacgttccattcctcctctgctttgtccaaataagctgttggatccaagctctgatcggccgaatgagatcctgcgtttactccggatgaggatgcgttggagtttggtccagaggaagaattcggaccagaattcgtcagccgatgagtcgggtttctgaaagatgcagacggaagtgattggcggggtgcatagtcgttctgtttgatcagaccggctggtggtgagacagccatttcgatctcctttgtgttcttgttcttgtcttcggttcttttgactgcgtgtttgcggtacacttgaggttgcacgtcgttgagttgtgtttgtaccgatagaatatgtgtgttggatggctcaaaaccttcttgaatcagggaggattgatgttatagtaatacgttcagcaattacgtaatgctagaaaggcatgcaatcgtttcttgatctacactgtccatcctgctccgtgtcgctcaactcatttggagacagcgatagctcttctcgatgaacgataagatgtcaatcaaaacatgtcatggtatctatctatcggaaccaagggcgatcacactcaagatcggagcaaagatgtcctttcatcatctccattctgagcgacgtgcccgtttccatcggacgtaaggggtcttccgaaatcatcgatacctaatcgggcttgtctcttcttccaaaagatacacatggtctgagacgatcgtaccaagatgggtcagtctataggcaggcagaattctgagatacaaggagaaatgatggttgagacaaacaagtaataagccctgaaggataccggtgatggcatatgggagccaggctgggtataaccgtcaaaagggtgatattcagctagaattttctcttataagcactttaaaatgatcagaaacttacaagaccaagtcgttccctctcggatggcgatactcaatacaaacactatggatccaggggtttgtatcctgttcaggtagagaccatcagcttgcctctattttttctagatcaagctgaagtagacaaaaaaacatacatcatcgtaggaatggaaagcgcgccaacaaagccttcgcgccaagtcagatgaatctgaggcgcatattgcgccacggcaaggatggtcgaaagaaggcccatgctttgacgggaagcgatagcaacaatataagctcccaacgcgtccttggaagattgccgagaacaacatagagactgacctgtcagctaagcggccaagaactttgtgtggaggttgcacaggagtcggttggggaagagggtaatgatttaacaggtacaggatgacgcccaacataacgactctgaaagaattcagacagaggatcgtgagccaaacgtctgctttgaatgccgagtaatccaaacagggtgagcatagaagtcgaagcaatcagggcgcacgagtacaacaaggtcagtccggcaagtgcgaccgatgttcgccagagactcgaacttcggctctttctggccggctctgtagacgtttctggaagggccccatatttgagatggtcaggaaagtagaagagaaagagaacaaagctagaacagtgctccggatggtaaaatcagtgaggcagtcaatgcgatgaaagagatctcagggcatacttgaatgagaacaagatccattgtaggaacacctggatgatgcccagtatcgaggccgtacatgttccaaaggactagatgtacgaccagacccatcaagtcagattctgctcgaactttagaaatgaggagacggatgaacttgctagtatcttgcagcaactgatcaaactccaaccaaggatgaaaatgttgaagaacccgctggcgctactcgtgctacctaaaaggagataccacggagagagaccctctgaggaacgattgttgatgatccgcacgtgctgaggcaagtaagaccctactaggccgacgatcaacagacttgacaacacgaaagctgccggattgtataccggttgacagaccgctggttcatatggactgttgagcatggatacgatgaagatagatggttgttgctggttcccagagagaacatgctgatgacgcgcagggtctgagatcaaagagatttcacagctttcaccttcttttgcccgtttgtcttacaagttgaccatcgttgctgtcgacctctctcttctcttttctctccgctccttgtccacctttcatcgatcccaaagaggtaagcatggggatggagagagaggacgctcttgtttgcatatgtctgatgtcttgtttgtgtgtgatcctctcctaggcctcatcatggccaatccaaggcaccatcatcctatcgccatcaggcctccgtctgtggccaacccattgcagccgtcgtgtctgtttcgtttgtcggatgactcacttgaagcacttcgaaaacttgttctcagtggcagccaggaattagtcgaactagactttggcgatgacgaaccggtaagttggtttctcctatgagtttctccagaaatcttttccttcctctcctcccttctggatgtttgtcacatccttctggatgtttgtcacatccttctggtcgtcaacatttggtggaaatttgatcaagagggcagctcacctgagcaaactgggtctacgtatatcattgtcctgatgacaagtcctggcgaacctcatccggacatgagtacactctcaggagctggccattggagggcaataaggatggtgtcttcctaaatcaaacctcgagcaggtttccctcatgtcgaaagctttgaagcttaggacgtcaagcagatttcagatccctacatattctctcgcaatctagcaaaacgccgaccattcatcagttcttgctaaacccatgcttattcttcttccttctctaaaaaatcatccattgttcttcacttagacactatacatccctgctcctgcagcctcatcccagccggcccgtacatactccctcagtctctctccgctatcaccgccgtatgagatcctaaatcgatcaacagctcatccacaatcaccatataccctactcaccattccagccaccagatattccatccgtcagacgaccgtctcagacgccgctcggcacaagctccgtctaggcgccgagctggccgataagaaacgagaagaccggaaaatcgtccagctcgagactgatccggtaaggagtcagtctagaggacgaagccgaggcggcaagagtcaggctgctggcagtgtccgcgtgagcagcggaagttcaattgatcgaatcaaaaaggtgtccaacgggctcggcaatagttcgcctctggccagagcggattccttggagagagaatatctgggccctgggtctgggccggtatcaactggcactaatggggggctatctgtgccgttgtcttctagtctgctgaaaagagtcgagatcggaggaggaccttctagaggaagttccatcgacaccctcaaaagaggcgaatcaagacgagcaggaaacggaggcgatcacagagagagctcctcagagagagaaatccttggaggctcgatgccctcttttaagcggaaggatagatccgactcggaagccggcttgaacggcagtcggtctaccgcggacaagaagaagagacgtacgatcgatgcttcgttcctcgcctcttcgatcaagaaaccggacgcgcatctatccgttccttcatctaccgtcagcacgacgtccgatcagggatcgatagcgagtcgtgggcgagtacccagtccggatctccgacatgtgcctctgcaatcgtctcatctaaatccggcaacggcaaggagtaaggatcggaagctttcaccagtagggtctccatcgagttcggcgcgccctgctatcacttcgccagcagggaaaattaccaaagcttcgtcctcggtgccttcgcctatgaggaaacagacaaacaaaccttcttcgtccacttccgcctcgatgtcgaccacagataaaccgaagcaaggctcgaggtcgacaggaggtagtaaagctagagacttttcttcatcttcctcctctgagggagaagacgatcgtgttcaaacgacaaagacagagtcctcaaagaacccatcgacatcatccaatactaacaccaccaacactatgaagaaacgtcggggatcgttttccgattcatccgcctcatcatctgcttctccccctcggcatcattctcgctcccgtcctctacaaccaccaccggtcccttcgatcatccccccttcagacccggttatgcctcaaagttcatctcctccttccttcaaattcgttctcccatcgatgtccttgaaggacctccgagaacggttcaaaaggctgtaccccacgtatcaggctctaaacgagaagctcgagatcgagaaacgaagggcggagagcgtgttggccggagaacgtgaggagaagggactttcatggaaggagttggagagggatgtgaaaatacgcggaaagttacataaggaattggaggaaatcaaagaacggctgaaaaagggcgccgagagaaggaagatgacctaagaacaggggttccaattagaaggagaaatgaaggaaactgaaatttattcatgtcttcttcccgttctctttgtttttttttccttgccttgcgcttctgtatctgtttgcatccctcagactcctcgtcaagcggcttttcttagaatgttcagacatattcatatactaataggcactgctgatgctcccgtcgacgtcgcaccgtcaaccttctccggcaaccagaaagcctaaaacacatacgacacatcatgaagaaaagttcagagcgatagtatcaacatctgctgaactccaaaacacaagacgagaggaacgaaacgggaagggaaagagagaaaaggaacgaaccaattcaccagcaccagtagcgatcatcaacgtccttgggttaaatccgacagttctcgaaggtttatcgtggcctgtgatcgatccgattggtttcaacgtcagaaggtcatctactctctgctgagcctgtcgagtttcttcgtctaatgcctgaagagcatcatcttggacgtcccacatgtgaagatctcccttccaagaacctattgagaagttgttttctcagatcagtcatcttgcaagcatctcgaagcgataagagaagagagaagagagaagagagaagagagaagagagaagagagaaggagatatagagtgaagactggctcgaactcacccgatatgacaaatttagcatccggactccatttgacttcttctccactgattcctctctgaggcgttccacccgagtcacccatcgggttcctacccaacccactatggccaacgagtcgcttgaggagttgtccagtaaatgagtccaagagataatgaacctcgccagaagttccgacgagaatgtacttcccatgaggggaaaaagaaagggaggtaacgattgggatttttggagggatcgactcgaggggtagttgaggatctacaatgatgaatgttgcgaatgggccctatttgaagcagcgcaaagaacatgacgtgacggcgggatatggttcagcaattcgttcttgttctttctcaggaaaacgacaagagaacaagatgcaagagactgaccgcgtcaaagttggacgaatcatacatatgaatctttgaataaggcagacagttttccgccactgcaaacacgattccttggttgtcatagcacactatcggagctgttcccgatccaatatctgtccgtccccgacaatggggagttcgaatgtcccaaagacgaacagttccgtcgagtgaggaagaaatgaattgatcgttcgaaggatttatcgcgagtgcgatgactctacataattcagtcgaggcaagagaacacgaaggtcgaacgacaaacgtcaggtcaaactgtaacagtggttcaaagacgatcaagcgaactggcccaaatatggggtactgacttgtctgtatgtccggtaaagtaagtcaggtatttgttgtcgtgtagagaatgatatcggatatcatctgattcatttggagcattcaagcagcaaatcccgggaataaaaccttacagacatcagccatcgcgcaaagcccaagaaaggaaggaaggacaggggacatctaccgtttattcttgtactggcgtgaatcaagttggtctttccgtgtgtgaacctgacgtgatcgattccgtactttttcgaatagaacgtctttgtatgcctgaacagatgcagacagttgaaccccacagaggcatatgaatgtcagtcccatactgagtctttcaactaaagacgtgttggtgaggtttataatgggaacaaaacaactttcgcactcactttcccgttcggcaattccataatttgaacgcatcgtcatctccgctcgtcacacagttgtcgcccatatcatcaaacgtgatagacgtgatggtcgatcctggttcgactgccgtaggaaacactttggccggtttgaatgccgtctattttctccccaaaaattgaatgaaccatgtggaccagacgcaaggcagagagagatacaagttaggtaattgattcgtgtgcttgttgcctagacctttaggcgtagttggaggtcggctggacgagctcgtgaaagacgcgtccgcgaagagaaagacaacgtaccattatttgaggagtcagtgttataggaacaggcatcggctgctcctttccagaaggagcctgaatagggggagcgggagccatgggatgagagagagtgagagagtgacggtcggaggcacctgatgtatgctgagctttccgcttaacctgatgcacctaagagattgctggtgactacactgcttatgtaactctcttctgattttctttcgcgatctccaagctcagattgggagcgaacacacataacgttcgaaaacaaatcgtatactacatgtcgtacaaagatcataaggggactacaaaacaaaagtgctacaacatacaacacgacctacagataggtatcagagacatagaagcccggattaaattacaaaaagaagaaagaccgactaagaggggaaaagaagagagttgaactcaagagaaatgagtgaacgtccagagcctaaagagtatattcaaatccttctcgaccctcgatcactttctctcccgccctgaccttcttgtttgcccttgaaaagtaggtggtgaactattgaaatagaaagaaagttgaaagtattagccaagtcacgttcatttatttgaaaggcagtaattgatgggatagggttgacgcgctcacagtaagtgcgagaatgatcgtcaaaaactgcaagccaactgttatccaaagacctttgagctattggtccagatcgaaagaacgttccgagcagataagtcaaacgatccatatcgagccagatgatcaattaacatggagagggagcactaacgtatcgaggagcatctttttggacaaagacctttattgcggtatcgatgtttgaagagaaccgtaaaacaacacatcagctttgttctcgactctaccaaggatattgtaatgttcagggaaagacgtgtgatacgaacagtggtggccaaaattcctccgatgcctccaaatccgatggccatggcacttcctacacttcgcttactggatcccaaaatagagttattcatccaggcaagactacaatcggaaggatcataagaaagaaaggaagaaaaagaatgagtgaagagacacctgagactgaaagaaaacatcacatgcggacgcacgtagcaggaacattggagttggctccggcaagacccataaagactccaaagtatcgtgcctgcataggaagagattctgttaggccagaaatacattgggctctgccatgaaaagataggagaacgtcaagtttgagactaacgtgattgttcttgaggtaggcgaccaagagcaagccaactaggcagcacgtcgcctggaagatgatcactcttgatcggttatgggtccgatccgaaagccaggcgagagccatggcataaggcgcgcatacaatgtaaggaggggccgtcaggagctgagagagcaagagcagtagggtcaggtggtgtcagaaaatcagtagagatgttgacccggaatatggcgggaggaacgtcagaaggttcgctgtctggtcagaactacgtacttgactctccttcacggtgtaacccattccagtgaggatcacaggcagaaagtacgcaaaggcatacgacggcctgcgatcaaatttaacaagacagaaaataaagacaaagataacaaacaggattagtactcggctaggaaagacatgttgacgactactggaagttacgatggacgacatacatggtgctggccatgaacatgagagcgaatccccagagtttgagatcagagatgtgggagcggaagagaggccaagtgagaggttcatagacggtatctcctcgctccttctcgattctggtgagaatcatagtggtctgctcggcagtgaggaacttgttcttgtcggggaagtcgacaatgactggaaacgagagggtatagtacatgttcgattcgaggtaaatctctatgttcaggacgacgatcaccaagcatgatttgaataagacgtacggaagtaagcggccattccaaaggcgcatgtgatgacaccctcgatgatgaagatccaccgccaaccctagaggtatagtcacagatgaaccatacttgtgagtgagtggattcgtcgtattgcgatcgaacaactgaagcgcttactctgataccggcagtacctcccatctgaaccaagccgtaggcgagaataccagagaaaccagaaattactaaggagatcaggtaaaatccctgcaagcaacaaagcaataaacggtcaaccaaaggcacaaattcgcatacacccagacgctgagagccactcaccgacattcgttttccagtctcgtatctcgtgtaccaagttgcctagatagggggcgatcggtcaagcctcgttcgtttctacagacacaagctatggagatactcacgatcacgaaagcacaggcctgaaggcgggcaaaacgcaaatttgaatcagccgctgcaatagggaaacaggttcttgagatacgcatagacacacaggaaagaatccggcctgagagggtcgaaacagaaagcaagaagccgtgagttaggatcctaatctgaggtatataaacaggcaaaaagacggcactgattatatctgggaagaactgacctcgagcgctcccaataaggctctgcacgctgtaagggcgccccaactatgaacgaagcccatgccgatagtaacggcaccccaggagacagaaatgaagctgtacgcggtgcgtttgtatccgaaacggatggtcaacatcaggccggtcaccgcccagattgggtttgaactgaaaagagagaatgcacgtacgtgagccatctggctgtgccgaactttcgcaatagaatatttgatggaagctccaaaatgactgcagaggaaggatgtgtttatgatatcgatcagcgctgattcctctggactgggcgaccgaagagaatgactagatgagcgcagaacaaattggaacgctcactgtagggtacgaagaacatgagggatactatcgaataccgattcccaacagttaactccaattcgacgtccataccagcaactcgggcgagggatatgttggttctatcaatcagtgcgatcgaatacaaggctcccaagattggcaacagacgaagatcgatcttgcgactggtaaacagatcagtcaagaaaggcggggaagtaagctatcagatcagcgggatctcctttgtctttcctgtatgagttgaaacgacagacaaatgaggaaggattacgatcgacgaacattgtttttctcaaaaaatctgggtccggagaaggggattctcctcgctccacaaactcctggtgttcgatctggttcttttcaaacgacccgttacttcggacgtttgacagatcgtccagcccagtctttgcaggatctcccattgtctagatggttgctgtgtattgttgagggcaagagggaatgaggcagagatcagaggaagaagggcagataagagctttctgcctcaagatgagatttcggttcaagagtcggatcgatagagagttgatgagatgagatgagatgagatgagatgaggtgataagaagaaagaagaagagagataaagagtatcgaaaacggaggcgatatttatctcaagacgaagacaagaagaaagacaggcaaccagggtctaagccaacgtccggttggacaccatctgggctgaccatgatttgatctcatgtggttgatgaagtctgaatccgagtataccggtggccgagagagatggtgataaccgaaggaaatcaacagacgaaaacaccaccggtaatagtcaacattgatagcgaaccggggtcagctgaaaggttcaggaatggggaagggatcagagaacagcaggatgattgttagtatggatggataaaggtccaagaagtgtgtcaggaagaaatatccgtgcatcagcatctcagcacactaacaaacggatagaaagaacccgagattgaatcagacagccggttgatcggttagaaccttgcagcgagactcaaaggaaaacaggtagaggcggtgaagagaggcaggacagagaacgaggcagagagaacctctggatctgttcttctctaaacatcgtgcgtgaccccgttcagagaaagtccttcggtttctgttggcagaggttagaatctccattcaatcaatgcctgggctcgctgctatatttgtccggtaacattagacgttgctcaacaacacgttgtgctctcttgcttttgctcttggtcttggtcttggtcttggtcttggtctaactcttcattccgtggataaggttgggttaggctctggcgtctctcggtgactaaagaaaatcgaaatgagccggaagtcgacccaatgtccgtgggccaagtgagatgaattcaaaaggtcagcagattctgaaaccccaacagaaccattagccggtcagtaaaactctgggcatccgtttgccgcctctttaaatctacaaaagaaggctttgaactttttgggctgtcagttcatcaggctatcctatgtccttcatatcggacgacgtggtttcattcttgttttcgtactcttcatcagagtcagtatcgagaacatagttagtcggttagcattcttgacgtccgtccatggtcaaagtgtgtgtgtatgtgtgtgtgcagagtagacgcgtatgggaagagaaaactctccgattgttccatccgtcacgcaccatggccacgtgcagaacagaggtcgtcagatgatgaaccggtaaaaagaaaaccccccaagacatttggacacagatgatcggtccagctagagctaccgccgtcactgccatctaagcgaactatattcgatacattccagagaacatgatggatataatgcattggatgaacagtgttgttgccgagtctactgggtatcccttcggtcgtagacgggcagacgatctctcgctttgcactatctttatcgaatggaatcagattgagaacgacactgaagacaagggagcagtgttctgcatctgcttttgagattttataccttctttgaccctctgtctgtctgtctgtctgtctgctcctctgcctgcctccgtccatccctgctaccctgattccatccgagataggttatcccccaaagcgtcctagagatggcaacaccataggcgcgtcggcagacgaggcccaccggttacgcgattgttacacgccatggttacgattgaaaaaaacggccgtactcggtagacgagaaggattcagaactttgctcgtcccaacactcactcacacatacccaacagttcaaccctcgccctcgttcatcatggcctccagagttgctcttcgatcggcacttgcctccaacagactcgctctcgctccccggtcggctcctgttcagcgacgaaccttcctcaagggattcttcggttctgcttctgtccccgtcaagcctaccgacccttctgtccccgccgagggtttcctccagggtcctggagccaagcttggatccgtcagtatctctttctttctggtctggcttgtcgtcgttggatcggttccttctttgtttgccgagtgaagatgcgatgtacaaccgtccgatcacagaaacttactttatctctcacttttttctctcttgatctttttttccctttcttttttcttcctacctctggcacctgcttctctctctcgcttccatgatcgcatctcttccggcttcgtaatacacacaggtcccaactgatctcgaccaggccactggtactgagcgatacgagcttctcggaaacatggctggtatcgatgtcttcgacatgaagcccgttctcgtcgaccgaatgggaacgatggccgaccccatcccggttcacgccatcgtcagtattcactcttccttttcgctccttctggtccttctctcttgtgttgtctatcatcatcatagaatacattcggatggcattctacggaaatccagctgagagaacaaggggatgagattcggcgacggtgatagtagaagctatgagctttggtttgaatgggattcgcagtcttgagaaacgacctatggtcattggacgcctacaaagtcgctagaaaaaaaaagctctggacttagactcactcatctgtaggcatcccgctgacgactttccatctgtcctctgccattcttcccttccttgtttatctccccctcctttcagattgacgagcgactcgtcggatgcaccggttaccccgtggattcccacgatctcctctggtacaggtaagtagtttccaactgatcacttttcgacaagtccttgttatcttttcttattctaatgctacgggtgtggatttcgttcttctccgcgaaacagcctcaagggtgaggagattgcccgatgtgcggagtgtggatgctgctgttcgtctctttcctctttttgcacttcttttttctcttcctcctcgccattattatttactatacattgtcatgtcaccgagaactcaccgagttcccttttactcctattcacaccaaactgacccatccgaaacatcataaacagaccagctcaagtaccacaacccgtggtccgaggtcattcccgagattgccgagcagcagaagaacgccaagctccttccccaccccagccacgcccaccaccacggagagggagagcacaagcactagatgtccagtgtcatcctctggaacgaccagtgtcagtgtcagagtcgtcgttggagcctgtcaagctgaggagagacagaggaaggaaggttgtcatgtatggtttttgtagaaggtcttattttcccgatggatgcgtttcttttcttaagtcttccctttctcctccttttcaatcttttctttccttcccccaaattgaaccgggcagcctttgttcgaggtgtctgaaggtgggctatgaagatccggcttgaacagaagaaaacacatatataggctctatcgatagtgttcgtagattgccgaaaggggggggatcatttctgggaggaaatatagactagaatgcacaacaataggagactcggttgagaggagaggagaggagagaagagtatgaatcaactatctgatagaagctggctcccgagccatcacttcgtccatccatctcgtcattccatcagcatcccaggcctgcattacgttcaacgcctacgaaatgaaacgaacccacagagaccgtgcattataaattgtttgtatcagtcatcagcacaccgaaagtgagagagtgcagctcgagataggatggagaagcaaaacacaacaaaacaaaagagggaaatgaacgaacttcgccgagctcatcaagttgggctttgtatgcttcctcttcgccttttctttgatcttctgtctttcgaagatcatcgtatagtaccgatatgtccgagtcgagctttgttgttcggttgcatgtacaccgcgtttgtagaaaaggattgagatagaatgaaccgtcagtttctgatcctcatccttgctgtctttctcctgttgcgtcttctttttctcctctgggatctcttagagcacatccgtcatgtgaatcaatcataagacttacatcgaccagttcggcttgcagtctagcgtactctgcgtcgtaaagtggtaagttatgcgtcgccgtgagagctgccggtgtgagatcagtcgtaattctaaatacgtttgcgccaccatcccaatggaaccaaagaaagatcgtttgagaaatttaaagtcagtacagtgatgatgaaggcgaaagatggagagaagaggacgaggagtgagaagtcgactgacatccattcgtccccatgcagctggtcgttcgaaccggccaacagttttcgctgacttgctcgctgaacggcctcttggacaagacgcaaccctgctcctatttttgcttcctctagtttgatctgagcgtttttctggttgaatgatcacgatcacgatcaagcagagagacgagtaggtcgagaagtcaacaatcttcagaacctcgacgcgtcttggtcgcttcagaaaacagaacgaacaaatcggactgactagtacggcctctcgaaggatctctcctgattggagccaaacacctttactttcctcttcccaaagagcacaccttagagggaaacaagatttgaagtcttcatacctacacatccgtccggaatgaatgtcgagcatcgaaagatacacatacatcagaaaaaagcaggacgcgtcagtgactgtcttgattgaagacgaacctggatagagacaatcaacgtgacaccgctaaacaagacagaactgagaagaaagagattcgaggagacgtacgtccacttatttgttcctgttcggacagccatctcgagtgcgttcaacagactctgatatcgacggccataatcttccttgggttctggtatgggttccggggcatgggcggtcgtaggataactatcagaagctgagccagaggtgaatgcaggagctgatgaggtgttggagtctgccatagctcatagaatatgtacgacgattgatctagtcctcaaaacgcaaaagaagaatgtcgttcgtgattgataagagagaacaggccgactccaaagtggaatatatctgctgatgattgttgactgttgaagcgcgtctgtaggacatcgctcgagtatcgctcacatccatgttttctgataggtttctcttgctcgttcactccctacagcaattgaactgacttgtgacttcaacagaacttgttcgactgcataggctctctccatctgattaagaatattgcgatatgggacggtcatgattaacacagacgttgcttgtactcgaatttcaatttgacctatttccttcctgaatcctcttatactctaatctgacctatttcttcgaaaagaaaccagctagactggtctgaccttttaacggaggttttcctttggtacccaccgtcgccattgccatagccctcttcgccggagccggcttggtctcagcgacagcaggtgctgaagatttcgacttcttggctggaggaggcttggtctttgacccttcctcatccgaaccctcgtcatcctcgatgtcggctcgggaaaccttcgccgaggctctcccttttgagtttgcagacgcaatagctttagactttgcctgtgatttgggtctagaatcggtggattcatctgagtctgtaaagtgagaaacaagaggatgagagactctgtcgattgacaagaacacagagtgatactcgagataataagacgatgacttacagtacgattcatcggtcgagacatcctccgtgactgataaagttttggtggaaggacaaaatgtcagaaggacgacaaaataaaccaagaagagcctgacttgagaatcaagaaactagcgcaaatgcaaaagaacttgatccagacggaccttcataacctctcttattagtgctcgtcaccgtcttgattattctccgaactttccggatcttcttcttctcagcaccctccgactccagcaacatgctttgttccacttcagcactgggtgtcgctgctctcttgttagccgatgttttcggttttgctggtgccttagctgcagcgcgtttgacgaccgacttggagtcttcttccatatcggattcttcctccagagagatgtctctctttttaccttgagtgacaacagaatcaaaaccgaacgttagcgtcgagccaaaaatatgatcttcggccaagagccttgaagaaaacgcaaacctttctggcctcgtcccgaaggggattccttggattcatctatgtccatatcccaaagtccttctagttctttcttctgtgcagccaccttactctggtcgactcgcttgactgaggatggttttgcaaccggtggcgatggtggtgatgaagaaggtgctttggctcctgattttgatttttgtataggcgcttcgctttcgtcatcggacgagaagattgggatcatgggcttcttgataggtttggacggaggcggcacagtcttgacaggttccgtaatcttaggctctgccttactaaaccctaaagttccgcttccacctgacgtgggctttggaccaggcttcaaagtcgactttgctgttgaggcagcaggagctagaacatcgctctttctaggcgcggccgccgtcaaagctgattttgacttgagagcgccgttagtggatgacgaaaatgcaaccgttccgtacagagaagggttattgtaggctttgtgggacaggagagtcataaaaggaagaaccaaagaggaagggtcctgtacgtgtgatagagatggtcaatgcgagtcctgacaactccagttatgaccaaccttggaagataaatcttactcttgtctcagatggggataatgaatacagcttaattgaagccgttgagggatcaaataatcttgtctttgctggttatgacatttcacggaaagatccatagcaatcagccggtttacagcgaagcgcaacgttgatgtgaaccgaacgtaccttccacctcatctggtttgcaaacgaccatccccgcccttgaaacttgagcctcattgatctgttctacagtagcctgactttgacttccgtcgacatccatggccttcgactcgtcgggttttgataaataagttccagacaacaggtacgtcggatgaagtgactgatgagattcgtagtactctgccagaatactaaatgtatcaatacagacaaagttagttagaactagataattcacaccatgattcagctgtttctataaggaatctcacgattcggcctgagcggtggatactccaagttctctcgaaagagatcggtaggtcatctaacaaagtcgaacgcccaacaagagccagccaaagagatcagtgagcgacaaacagtttcttccctgatcacagaccaaatgccgacgaacgtacgatcttcttatcctgacctatccatacgtccagacatctctttgctttattatccatccttgtagactgcttacaatcgatctggtcgaggtttacggagagaagcgcgtgttgattgatggagtagccgtttaatgagggaggtcgcgtttgcttaagtaagcatttacatcattcctcttcttttaccactacttgctcgtccatccatgtagtcgtccatcacccacaacgatggcggtcattatcccacctcctccacctctgcatagcatcctggtctctctgcagcctccagagttccttcctccgcctcatcaagatcatactaccatttccagatcggagctcgacaaatggagggagtcgatgacgcgtgccatccatcagactaaagagcttcttgagctgggttcttccgaggggaaagagctcgaggaggtagagaagatcagtctggctgaaggactcgccagatgggagactaggaatctgtttggagaacaagagctggaaggttggatactacctgctgaggttacagaacaaattaacggttcatctagttcgactacctgatgataaaccgtccacagggctgaatgtgttctctttttgttttagaactgctatcaacaaagctaccacctccttcgctcgaatccttgaagcccatattctcatccagcgcgcctgcacagatatccatgtcatcgttccgaccgctttcgaaacctatcattagtgacgaggtggccccggaaagagagaaatggaagcagagggcaggatggggttgctggaacattctgcgaagagctattgagggtcttgatgtaagtaaatcttactttggtctccccttcattgcgacttctttagtataccactgatgagtctttcttctctttcttcggggtgcgacaactacacagcctgcgcaaccccctccgtttcctctccttcttccgccgctattgaccttgatggatgacccagatccgatattccgacttcgtgcacagtgggcattctattcccttctggagaaaaccaagaaagcctcgttgtctggttcgtctgatataaaacgaggctggggcggaaaatggctggttcaaactggaattggagcattgtttttcaaagtttgtgcatcattgatcctactatcatgtatcctaattacctgacactggctttcttttctgcattatttagtccctcaacacgtccttgcatcttccttcaccctcttctttgccgcaaacactgacgaaccatctggcgctgacggagctcttgtatcctatgaattcacaagccaagacggatgcactggatgagttgatagaacgaggtctggtcggaacttggatctaccgaactggcggtgaagaaggtgaaggagcacgggagattgcaacctggttgagaggaggcgaactcgtacgcgttctcggtgatctaggaactgtcagagtcttaggagtgggtactttcttctaatctccgtagcatcaccggacaatggatgaggagactttcttcgatagactgatgtgtttccatctaacttcgctgcacattgggtctcaagataatcctaccgtctcttctcttaccgctaggaactctctcaccaacatcccctcgctcgacggtgttcctatcagacctcctgcaagctatctcagtcttcttagttgcaaccttgaaagtcgctcccaaaagagttgcggcatggagaggaaaggttttcaacgggttaggaagactttgggtggcagtggtggagaatgaaaagattgggggcgagtgtatgtctcggacttttcttttgatgcattgtaaaagcctcatcctgcttttgtttggagcaggttgttctgatacgtgtttttcgttccatttgttgtcttaccttagtaacatcaaccgctctctcactcaaacaacaaatatctcagatcctcggcttgttggctcagtcctacccggcatttttggttcgtctttatctctaatacttctcgcccggtggctttctatatttggtactgaataaagcatcgacgacgttactggtactctttcttggtcgctcttaggacgaagtgaaagctgtcgcttctctagacccgtccatatttgagggttttgtggaatctattcctgacactcgcctggatgttgaaaacaaacgaaacccaccaaaatgtgtctaaaaaaaatcaaaaaaggaacgatcgcatctaatgactatagtataaagtgctaagcaacggccggttaacgctgaggtagagattctcttaatttccttctctcatcccaccctttctcaagggattcctcaacgaccttgtcgatcgcgacattccatgttgctcgggtctgaagactagggaaccggtcgtaggaaggctctcgaccgaacgcaatcacagcggtttctatctataaagtttgatgccattcgatataaaatttgataggcacggagttcacgtcgccttatgagatcatatgatatatatttgaaagaagaaaacagaggaaagcaaggacataccaggatatctgacgagagccctttgataggcgtctctgtcgttctgaatctatgcattcgatagatcgtgtcattctagagaaatagtataacgagataatcagttaagctccaacagcgcaggaaagggaagacaacattgaaggagtttgaagatatgaacttacaagccaaggaatatcactcgtcgagtaaacatcttcttcatataaccaatcctcctctccttttacactcaactttgatctggcctcttccgtctgattcccccagaatgccaaatcaagcacgctctccagcggaagctcccatatccgatcgacctcatccgggcttgcttccagatggtcgatcgttgattcatcagaaacgaacacgacgtgtggatgaacgatgaggttgtatttggataggaagggttcaagagtcgtcaaagggaatatagtagagtgagttggatctagtggaaagtttgtttcttcgtatgcttctcgacgctttcaaagcggaacagacattgaaacgatggaagagaggtgggagaggatcaggaaattgaatttctgattgacatctaggtatcgtgatccattgaagaaggcataccgctgtatgttctacacttgtatcttcagaatcaaccttccctccaggtaaagcagactgacccgggtgagagctatgtcaacccatcccgttgaaccccgccccaagcaatgtcaacattcagacttattcctcagatatcagagacagactgatttgaagaaccgaccgaagttgctgagaccgagttgtcatcaaaactcttagcccaggttgtgatttcctctcgtatagaatgactagaactgctgctcgtttgacctttccaaacctttcgaaagcatacaacaagttgtttgtgcccagagttcccgcaagcatgggagaccgaaggtaccgtcgtgatggacatgattcgaaggaggacaaggagcaataagtaaaacatgatcttctctcttctctctttatttcttcttctcttcctctgccttgcctattcagatggatgatggacttacgaccgtcccggaacccaagacggatatttttccacattcaagatacattctctggctttctcggatagagcggcaagggcttccgatggtactccttcgtgctttttacgttgtgtaggttcagattcgggaacggtcattgtatcgttcaatgtcgtcgtcgtcttcttcttcgttatgtcggtcggtcggtcggcttggcttggctatacttaatcttgctgcgttgggggttcaggcaaaaggggacttaaaatggggtaggattgccggcggagtagaccgaaacgaatatctacattcttgacacagggcggcttgagatactgtatcgatcactgatacttcgtctgacgaagtactttttcacgacaaacacgccaagatatgatgttaaacaaacatggtataatagtttataactttttatttatgtgagaaaagcaaagaagaaacaagaaggaccgaaatagagaagaggaggaaagaattctacaaaagtaccatgctctccgaacatgaactcagtgaaaacttttccgaggaaaagacatctaaagagaaacccaatcaagggcacggaacacgaagatctaggaagagaaaaagaatgggttgggaatctagatggtttaccatcgggatcctccacctcctcctcctcctccgtagcctcggtctcctcctccgtctgcacagataacaggtgaaatgtatgtcagatggagaa

SEQ ID NO: 468 - DNA, 83767 bp, Xanthophyllomyces dendrorhous
tcaatcagacatctgaaaaaggaagaaaaaaactcacatcctccccctcctcctcctcctccacctcggtatcctcctccacctcggaaaccgcctcgtcctcgtcctccgcctcgtcctcctccaccaccgtaagaagccatctcctcaagctcccggggaacttcagagccggactcacgaagaataccgacaagctctctagagtttttggagttctcagtagtgaagtaagtgtaactcgtaccagtagtaccggcctgtagaagaggaagagaacatcatattgaatcagcatatattcgaaaagatgtgatgatgaatataatcaactcactcgaccagttctgtttatcgaaagtacaaccaaaagagaagacttggtttagtgggagcaatagaaacacaaataaacgaagcatctacgaaccgtccaattctgaaagggagaagaaaaattcgacataggttagtcacatgcactgaacgatcaaagtgtttaaaggaaaactgtgcgaacctgtgaatgtaatcctcgcagttgttggggaaatcgtagttgatgacatacttaatgtccttgacactgttaaaaaaagaagattagataatttttcatcagtacgggtttcatcacaagggtagaacgataaacaatatgtactaactctgtagatttaaaatcgtgagtttaaggatagtcgaaagaataatgagaatattcaagagcgaaggcaagaacggcagtcaaggcacacaaaaatgattgtccagttaaagaaacaacatggtgatcatgaggaagaacgggcaaggtcaataaaccgtccgaagacagagaaggcgagggtgagaagggtatttccagcagcgttgaaaaggacaccaagccagcgagaaaacagggccaatatgtttgaccctaatccaatgtggatttcggagacggccaagcatcaacaaaggcgaaccaactttcaggctctccgtttcgtcagtcgacagcacagcaacgttccagacaagagttttggagatactctccagtctagcgaccgcctctcaatctcgacctttgatcggctgagcatctcgaggagatagccaagtgatcaaaagcagaagaggcaatgaagcacagaaaggaagaggacacctcttgagtcagtcggaaagaagccaagccagaatcgactcggaaagagttataaactccatacgagagatctaggcgagtcacccaacgaaggaccgagaaggtcataaactctgttagtgactagaaagccactttgtcggaacgcatcgtgtgaagcgaacaaggaagaagagggaagagggccctcttcctcggatgaatctaaaaagacttcggagaagaagtccttcagaaattcagacgaacggattgtgacgagcgaaaggaagcagacacggtgtttctgtaggggctagccaaaaggcgttttgtcgttttctcgcagcgggccagctagatagaaacccagaaagaaagtggaatgtggtaaaaaaagatgataagacacataccaagaccacgggaagcgacctgatgaaagcaaagaacaataacgagatgagtacagtgagcatcggatgaatagtatcgagacaagagaacgtacatcggtagcaatcatgataggggatcggccagctcggaactctccaagaacccaatctcgctcctgctgctgtttgtctccatggatagcaagcgcgggccatccatcttgcctgaggtacttggtcaagtcgtcggcaactcgcttggtagcggtgaaaatgatgaccttggcgttctcctgggagatggtgtcaaggtgcttgacaagctttcctcgcttctcgaaatcagtgcagacctcgacaagctgcttgacgttgtggttggcggagagctccatggatccaatgttaacctgaatggcatcggtcaagaagtcggcagcaagtcgctggacctccttgggccaggtagcggagaaaagaagggtctgtctatcgggtcggatttgggcaacgatctttcggatttgaggctcgaaacccatatccaacattcgatcggcctcgtccatgaccaagtaggtcactcgcttcaaagtggtcttgccagactcaagcatatcgatcaatcgaccaggggtggcgacgacaatctcagctcctcgctggagatctcggatttgtcctcccttgggaacacctccgtagacggcggtgtttcggattcgggaagactttccaaacttggtgcactcggcctggatctggacggccaactctcgggtaggagcaaggatgagggcgatgggtccatctccaggggagagcaaaggctgggcgttgatgtggaccatggcgggaagggcaaaagagatggtctttccggaaccagtctcggcaacggcgaccatgtctcgaccggaaagggccataggccaagcctggcactgaatgggggtggggttggcgaagcccatagccttaatctcagtcataacataatccgggaaaccggcctcgtcgaagttggtgatgggcttggggatgttggcaccgacgaccttcatctggtgttgggctcggtaggcatcgatctcttggatggatcggtctcggacccttcggtcctcgatgtagaagttcttctcgaactgtgaggatcgaaaaggtgggtataacgcgtcaggataaataaccaggggaggcatcaggagttgggagaacataccttagcgagggtctgagagttccagtcgatcttgccaagtccgtttccaagactggacattcggtctcctgtgcagacaaaggatgaatctgttaagtttgctgttgataaaggcaagtgggattcaagagcggacacatacctcctccacctccgtaccctcctcctccaccgcctccgtatcctccaccgtatcctccacctccgccaccgccgtatccgcctcctccgccaccgtctgttgaagagaaaattttcaaggtgagtcagaaaaaaagagcgcgtagagctgcctaaagtcaatgatatcaagcgtacaaccgccaccatcttcaagaaacgagaaggaagggtgggaatttttcgagggacaggagaagagtagtgtcggatttcaacaagttttcgctttgggaagctagacgagggaaacaaggaatacttacagccaccaccatatccacctccaccaccgtctgattcacaagcgagtcgtcaaatggaacagaagcgggagagaatgtcgagggatagaagagagaaagacgcgagaaccaagtcgaagggcgagaaagagaaaggggaaaggaggcgagaaagaaagaaaggaccgtatgggcatccgctgatttgacaatcgcgttccgagcaggaaccacagagatgagaaagaaagaaaaagacgtacatccaccaccaccaccggaagagccaccgtatccaccgccgtaagacatgtttcttgcgagtaaaaagagagagaagggaagggagagggagaggagagttaagagaagggctgagaaaggctaaaccttgaaactgcagttgggttaaacggtaaaagttttctccaaaaaataaaaattatgttaaggcacagagagaagaaaattggccagggcccgttcggttcctgaatcacgtgatcaatatactacaaaccggcctacttttttgtagtgaagcattagagacactttgtaatgtcctgtgtctctatatttctctagtctgtactagacttatgttctaatgtctatactacagatatcggataacctcgactacagatagtttgtattagtcgactacaggatattcgtagtcaaattgtctcctctaacaaacccctctttctacatatacactcaacccacgctgaccggtcttaccctcttcatctggatctcatacaaatcgcttggcaccgtttagagagatggatggcactcctacggttggtagatactttgatcattttctagatgacgtatattctgatcgatttttctcgccgatagacaagttcgatagatgccttgttggctgttcttcgaaacgtctctgctcttccaccttcaactgagccagcaagagatctcacgtcgataccggctacaaccacggctcaaacagagacgtcctacgtcacactcactcctcagcagcttccggagactcctgtacaagagtactcgccctttgcgcctcttttcacccaacaaccccaggtttacactcctgatgtcagttggacggccggtgtgccgttgacggcgacggcaataaagtccgaggatccaaaggctgatttgaaacatttaagcttcaaggacagtttacccatattgaaccgattgatgtcggatcaggtctttgtcgaccgattactagctgtttgtctccgttcttcatctgatcgtcctttcttcgtcacaaacaaggcgaaagcacaaaagaattgaccatgattgactatagatgaaggccgaacaagatgcgctggagaagaccctgtcggaagagagaaccgcgctgatacaaggatggaaacaaaaggctcagatggcgcatacagtgtaagtacgcgctttcgtgtacttcttgttctatcgtctttgacctgttcaactaatcgagggcagctgatctgaatatttcaaagagcaacgatgaccggtcagaagggaatttccgagttcgaaacgaaggtttgcttctctgccctcatgattcacttacgtgtccattctttgtgattctaccgctatctgacaagcccttcattatttgagagaaacagtcgttggtcgacaagtttcaacgtgctcttgcccggttctatcacgatcgggtatccgtaagactacctcctttcttacctcttttctcgcctcatctgaaccaagctcatataccgaaactcggccaaatccttacactatacttaatattcttggtttctcgtctagatcacctgggaatcccatgtgaaatctcaacaagcagaactcgacagactaggcgtgcccaccatgtcctcagacggagatagaaatcgtcagaagaaagtcatgggtgctttggaaggaatgatagccgattgaagacgggcggagggacgtggggggagggtgtgaaccatgctgtagcagtcattcgggaattgtcccctttagccctttcacctatgttctgtctcacacacggagcgtcaccttgcgtttttgccttcgcaaaagtaaggataggttatttaaattaaaaagaaactagggttgttgaaatgcacctaacagctgggtgatgttaggtctgtgggtcggtcagttcaagctgaatttatttgcaacggaatagactagcttgatccaactcatcatagagactacaacagaagcgtcagcatgtggctcgcaaaatgatttcatgaactatacctcaaatgacgttgcttgattcaggacctgctcgaacgatgtatagatctttcgtttacgtctgagtgattggctaagagcccaggtaatacacattcatacagataatccgtaaaacacagatagacgaagaacgtccatggaatggtagcttgatcgatgatctgataacgactgagagacaagaaggcaaagagagactagacggcacatcaaccctatacaattcttctcaagtagagacaagtggcccattcaggcactggaatcccaaggtatcaacatccgccggtttcaggtaatcggggttgcaaagcacacttccagtctttcggttcgaagtcacaaagttgtgtacgttttcaaactttatcccgtcgctgtatgatggcaggtcaaatgtaatagaattcaatgtcagagacaggagactctatgcgagaggagcgtggaggagcgatgtacattgggaggaatctgtcaagctgaaggatgatgacttgggaaccatcagcaccttcaacatagttccagcacgggtccgtgacgcagctaatttttgatcgtagctcgtatgttagttgttcgacgtgatgagatagttgcgtggtacaaagaaggacgtacgtagcatcagatagcttgggggcattactatcgatatccccccagaagttcttgaaagtgaaatcaattatctttgtcgtttgattcagcgcgtcctttggttttccaaactttatatccagcgcgcaccataaacatgcatccagtcagtcaatgactcagtctataagagatcagatgaggtgttcacctgttggtcatagtaggacgtagtcacaaagataggctggatcacttgccgcgcctcgatattgacccaagagatgttggaagctacaacgatatattcgcagaaagtgaacgaaagagtacattgatactttcagaaaatcgaaacgcttgagatgctagataaggatgaggtggatgggacataccatgacctcctcctccaacccagcttttaaaccgagcggcgtaggtgctaatatatatatcgaatatcaattcaactaatcgtctgtcagaccaagaaaacaaagcaaagacaccaacctcttctcgattcggacatcgctgataagtacatcttctacggttgagtttgccccatccttgccaagggaaccgatggagagaccatgagttcctcgacagaaagcgctgaaaacatcacacaaccagaaagtgagaaagagatcacacggatttagcatatgagttgtgatggatgtattgaagacttatacgatcaactcactcccggaagactagatcttgagcacccgatacaattgccacacactgtacaagacccatcacaaagtcgatatgtgaggatgtcgagcgcgagaggaacacgttcggtgagtgaaaagctaaactcacatcgtcacctccgtaaatcacactgttctcgatcagagtatgttcggacttgacgttgactccatcagtgttgaaaggatacctttgtgagaaaaggtgatattagaacgatacgtcgagctggtataacaaaagcacgataatacatatagtatcgcttacccggtactctcgctaaccccccaaataaaggtgttgttgactgatatgttgaacagaattgaaggcttatcaactgctgatgcatatagaacagtacatgactcttacgaacggtcttcaatagaaacacagaagaatattgattagatttttgtgccctcatgaacagtctgattaccgagtaagatatagaacttacagatgtgctctccgagaagggcaatgttccaagcgatctgcatccaacatgtactcgcaaagataagtctttttcctttatatgtacggcagcgcaaaacgcacctcatcaggatgtatataaaggaaagaacacggacttgtttgtagatcttcaaatcaagaattgaccccctctttacgtcgaaagccatagtctgcggcctgttggcagagagatcattgttcgtatagttggtggtctcaatgtcccaccatttctgaccgaagcagttgagccaacctgacccggaatccttcgagccttggatcgtgacatcttgcccagtgaactgcatataagccttcccatacgtctgcaattaccgagatagaaacaatcagtgatatgcattgaacttctgacaagattagagacacttacagcgtaggcggtgatgttggcaacttgcttttgaatcatctctcggtcctcggctatgacaaatccagaggaatataagataacagcgatataccaagcatcattagtcccagaatcaagttgctataaaatgagattgtaggcgtacagaactggaggtttcctttaatgctgaaatgaacgttcgagaggtttttaagttggaaaggcgaataaatgttatacagtatgccctcttcgaacacgatctcgacatcttttgatccacactttgcgacggcctcaagtaaatttggggtgtcatcctgtccttctccactgtgctgtacaactggtatgattttggtgtttgtttttatttttttttcaaagatttggtatagtcaacgacagactgtcaagcggtgcgcgtaacagaaaaaaggggagtgaagagtttaacgaaccacaggatttcgttatgttcttgagagcaccgtactgagaatactgctttgtgagatgatcgcccttgacctcgacagcatcatctaagacagaaggaccccagctgtctcgaagttgaagagaatcaagtgggatcgcagagaccgctgtggcagtgatggccaccagaagagggaagagggagagcatggctgacacaaaaaagagtgtaagtacgacgaagttgttagcgaacggtcagatcatttcttgttagttatcttgtcctttttatctatctccgaaagtagatggccttggtcgtaagccgagcacggagccattgtttgaatctgggatcagttttgggggaaacagatggtaagatgtatgagcggaacgtccggagtccgcccggaacttgtccggaacgaaagaaatgagccgggtggccatacttaagctaaacaatgggtttgagggttgtcagttgactatgaatcatcagagattcaatgtttcgaacagctaatataaaaggcttggcgtccgttggtttcgaagcatggatggattgctcccggtgactttgctaattgaatggaatctcgaggttcgttgttttctccgttagtctcttttcaccaagactttctccaatggcaggagaccagtgtgaccatctagaaggcaatcctgctgaagcactttgcgcatgcccccaagtagctatcatctgcctgccaatttactcactgaatagactatcaaccaaaatgaagagtcaaacagaaagagaagagacgggttgattctacggcccgggggtctctcctttccaacttgatttgcaaacgagggcacagaacaactcttccgttgcaaccggtccggcggatgacttttcactccggcatatccatccaatgaggaccaggattgatccacatatcttcaacaaagtcaaacacaagaagaagtgctgacggacatatctcgtcccgtagtcagctggttcagaatcggtttacatcgtttctcaggaaggtcaaggagtgtgtcgtcgtgatttgacggtgatcgagtaactctatctgttgtctttcttcagtcttgatatcgaaaccttcccatatcgtgttgtacattcaatcaagggagacagactatctcaaccccatcgagatcgcttgtcgtctctcctgtctttttctctatccctcaacctgtccctctctcgctttggttctctgattccgccacctagactgtccattccgacgaaagcatacggtttccctccgctctcgacgatccctcgagcgggtggattttttgatatgtttgatattgggtatggacgagaagaagaggatgttgagggagcggaagaggatgatgtggaggaggtgaaggggatattcgttcgaggctgggatggtcgttgagagtaggccttttgcaaatccgctaaaggaaagaaagacattatgtgttgagaaagaaatttaagatgtcggccgatcatctcatcatcgtgagacttcctccgcaaaaggaaagagaaaaagagaatgtaaagagacaaaccaattttttctgcgctccactccttactctcaccttgatcccagtcccatatgctctttcgaaaccctctgcgttcatccacgtcgacaaactcgacaagctttttgtagatcgtcggattacggaacgctctagacttcatgagtgaatcgttgaagtgggttccctgtgctttgaggtttaaaaactgggttaccttagcctgtgatgaggcaaaaacgcatccaaacgagacgcgtcagttttttcttcctcttctcgactccaatatgattactggcaacatggtaaggaaaagataataagaacgggttaaagacaaacctgtagaataggatcaatcttctctgctgagctcgcattccctcctgcgagcccgtatgcctcgtcccatccatccccatttttcagtggtgccggtcggacaagtcgtctaagggtctcttcctccgtttcaaactcttcgccctcgcctggtccgatgtgaccaagatgaaccggatcgggagactctggatgagtctgatcggaagtacgcgagtctttccgcaaaggtgagcaaggttgtgcttcgttaggtgtgtttgacgaggaagatgtaggctgggatgatggaattcgccggattatgttaggaggaagatgcgatttcagttttgatggtaaaggtatggctggtgatgacactgttgctgatggtggtggtggtagcaaggacgtggcatcttattgatattgtttttgggtgatggcacaaaagacagagaaaaacgacgcgtcgttagcaagtgttcacctaactgatgaacacagagaaagatcagaaatcacctgttggaggttttaagcgaactttagatccattctaccaaaatgatttggcccctcgaatagaacagcagaaacgaagaaagaaaaaaaggtagggaagggaagggagtgaaactttgactaatgttcttttctttctggcaggtcttcgtccacttttcctctgaatcgtcatgatcgtattttcgaggtcgaattcgtgagggagacgtcatgaactgggatgagaacttacggctatggcgctcgaaggatgaattgtctcatcctcctcgtctgaataagaaagaagacctgtgttgtgcattagaaaaacccgaggatcatcaacctcactgctcacacattggaccaagatatcttcgctaaccttgcatagtgatgttgttactgctgctgtatagacgaaacacctggtaaagattgaccggagagttgagtggtgcggagagaatactgttagggttaaacacgtgacgcactgctatatcgtcagccccacaatagtcttggctttgaatgtttacctcagtaggatgtaaaagcgcgttgaggaattccgtccacatgagatgattctttccgattgttgtcgtgaagaatacatgttcacttgaaggaggagaagagcaagctgatgtaggacatgggagtcgagctagctgatcgttcatcaagtcaagaagagagagtgtatgcatgtgtgtgtttgagtgtgggaaagcatgaggaagcgattccgttcaatctttgtttacggcctgattcgtgcacacactctcagacccatacacataatgaacaaagtgatcaaaccatcatgctcctgagccgatgggtatattcaagcatatggaacagaactcatcattgctgtgtgtgactgactaactgattgactgaccgaccggccggctgaccgcgcaacagaaccaaaggagctgacggtatttttctcaatttatttttattcttgatatcccccctttttgctttttaccggtcgatctttctttttctttccacccgtataagtttctgttccacgtccactctcgttcaacttcatctagctctgtcctggttcattctgggttgtagaaacatcttgtttgttcgtttcgatcctcaagcgaacgaagaagcacaatcttctgtctcattgcacttggcaagcgatcatcgaatcagccttctcgcaacagccttgctttaaacatcacaacgtacggattcaaccctaccgtcctcctccactcccatcttctctaaaaagagaaagaacagctcagggcacttggccaccgacatggttctttccaaaaagaccctgctagcatctctagctggcttggttctctcttcgtttgttcaggcagctccttataatgagacctgggctgactataacttcaacaccaataccagttagtcactaccgttcattctgtcttgctatccatcaggcacgcccgattctttccacaggtcccttctcttgttcagtttttttgccccttgtcattctctcgtttgtaccctatgctcgtccacgaactgctttgcaaggacgggcgaaagtagaggttcagcctatggttgcacagctttcttccaaggatacctttggaattagccaagattccttcgacgatccatcaaaacaccaagaaaattaaagagaagaaaacaagaagaaggaagaactctgggcgctcatacggcatcactcttactgctaccccgtctatcatatacaatcgcttacactatgtaacaacatctgttttcgcatacgaccgactaacacgcgcctttggattgtcttcgcagattctagtgctacaatcctggaatacaccactaaaaggtttggcgccaatagttcctaccacccatctcccaccaactggagagagcacccggtgtacaccatcatgctggacaaacactttgacggagagccgtccaacaacggtatgtcgtccagacagggtagttggtttctatacgcgggcttgtccgacttacctctcgcgcgcgtcccacaatcttagatcacttcaaaacacagtttgagtgggcacctcaagagtatgtacatcacgtatgatcatctgcttataagatacataagactgatgagatctgcctgttcgacagaacacaactccgtcatggaggagatataatgggtctagtcaatgaccgatctctagattatctccaagcactcggaattgaggtcatatatgttgcggggacacctttcttgtatgtcgctcttttgccctcaaattgaagctttatcaacaaatatctgccgcgttctgacccgactgtttatcatcgcagaaacatgccctggcaggccgatggtcggttgctctttctcctctgttctctgatatttatatgaattgcagtgatgattgatcagcccctacgcttctttctttcattaaccaggctactccgcccttgattttacacttatcgaccctcactggggaactgtccaggactgggccaatgcgatcaacaagattcactctagaggaatgtacttcatcgtggattttacgattggaaccatgggaaatctgatgtttgtccacattcccttcttagaagagtgacctgacatggaaactgacatcaactctcctcttttgaacgctcgtcgatgaaatagcgccccgacagagtaagcgcatgtagttccttttatcaggttttccgaaggttctgacgtccgaccactttttcttgaacgtagccacctcaatgattctgcgcctttcaatgtggatgaatgtacgttctgtggcagtgtttgttatgatgatctataaccagactaagatgttcttcttccatgtcaaatcacagatgacgtccagtggaaccgagctccttatggtccttggaacctgaccgaatatccagatttcaaatttaacaattccatgaactacacttgctcttttcctgcattctataatgaatccggttatcagaacacgtccataagtacaacatcttgtaaggcatctgttttcgatcaatacggagatatggaagcatttggtgttcagtacgtgtctcctctcttctttcgattcttctgttgatgtgaccgatgctgactgatattgtatcaatactcctatttctcatccatatgatatcatctaaactcgactttcagtctcgactggcaacgtcagctgggaaaattcgcaggcgttcaagaccgtcttcgagaatggaacgatgatgtccgagcaaccttggaacatcttgcttgcatgtttatcgaggcgtttgacgtcgatgggatccgaatcgataaagcaacccagatcaccgtgtcggcctcagctaattgggccacggcaacgagagaatgtgccacaaaatttggaaagaagaatttcttcatcaacggagaggttactggaggagacaccgttggttcactgtacgtcaatccttcttcgtacatccggcgtctgttcttgatgttgaggttcaatgttccttctattctgcatttcgaattatatagatactagtgagtccatgtagacaaggaatcttcatgacgatcgacgtttctccactaactattctttctcttctcaaacgtttttcaattcagcggaagaggtagacaggcacaagatcctgcaaatagccgaacctttgacgaagcaatagaagcggcgacaaattcttcgatggtgtaccttcgggagagtgggcatggtggctgggacggtagtgcgttccactattcatactaccgagcaatcactcgactggtgcaattagacggaaatctgtaagcgaacaatcctcatataaagtgacgagaggtttgggacaacttttaacctaaaaaataatcacgatttgtcatatcctaaatcaatagcgaagcagcatttgatatcggagtcgaccctgtcaccgcttggagagaaacagttatgaataatgatttggtcaattctcagacaggcgaatttgatcccagacattgggtgagtagctgatcgatcaacagcttcattctttcatggtaattcgaatacggtatggaacactcacgcccacgctactctgcagatggctatgacgaaccatgatatcttccggtggcctgcgatggtctgttcctttcttatttttctaaatatacaacattctagatagtactaacccatttactgactacctttcacaccgtaaacatcgcatatcaggtcaatgggtatgtacagagatgctcgctatcactttcaccttcattggttgacttactgaaaaagctgtcgttctacaaaacgcgctggtagaacccacaagatggcatttggacatcacctcggaatgcttctcatcccaggagtccccttggcaagtcttttgactttctgtctatcaactatcattgaaaaatcctataaccaatctaattgtctttctgcgtgtctataggtgtactatggtgaagagcaaagtctttacttgttggacaacagtgcagcaaattatatctttgggcgtcaggcgatgacagctacgaccgcttggcaaaggcacggatgttacaagtcagtctttttccacgggaactttttaggcaccatcaggctcattggttgaatcgtgttcatcttgtttaggcttggatctacgcaatatcacaacttccaatacggaaagtccttattcgggttggtagcgacatccttccttctcaagctgtcctcgtgacttgttcctgattctatctatttggccaacctttggtcttgttcgatttaccagatgtgacgatcccaacaactccctggaccattacgacccttccgccccttacttccgatatttccagcggatcttccagcttcgaaaggtttactcagttttaatggacggattccaggtcctctcgcactcgaaccaaacatatgaggttcagttcccaggaagtagcggaacggtcaccgatagtaggtatagactcctttgttatagaaatttgactactgctgatacagcctttcttttctcacctttttcttcagttggaattcgatcacaatctcgaagtgcattggcggttcaggcgaatgaggaaaagttccttcatggtttgacggactacgtttggtttgtgtggcacaatgagaacgtcaccatgagttataataacccctgtggtggctcagatgatgaatcttggatacaatctccttatattgctggcgttaccgtgcagaacttgctctacccatatcaaaagtgaggctgtctcgagagtgtctgtcgtcagatctcgtctttgtcacctgcttttgattattgactcttcaagactctcatctctaatcccagatacgttcttgagaactcaacggcctcgtatgacggttcctttcggggatggtacgtatactttgctgtatggacgcgttatttcagagctgatgccaatcttgatttgtggtttctaccacaaccacagtctgcgtaatgtcaccctggctccgtttggtttcatggtccttgttccagaagatgtctggtatccccctgcaccctctctgacaaagttttcgcccggacatgatgctcgacttttaacggtcgatggttcttccaatgagacttcatttggaatctcgtgagtaacctctctaataagatcttttgcctttccactttattagagctgatgttgagtcaatccaacatacagattcgagtttgaccaggagatgaactggtcagtcatcggtgcctcttgttaattctctttcgctcaaattgactgagatattcaagatacggctacatatctttcctttcctacagtgattcattgacccagagtctcaacatcaccttccatggcgccccagggtccaccgccaaacctaagataagcggtactcccgtctgtggatctctgaaaggccagagtccgcctgtagatctccaggtcgtccctccttcgggctggcggtggaacgctactgtggctgacgctgaggatggtatttatgagattagtttcaataacgtggctacttatccggcggccgtaaacttgaccgtacgtatcagtattgaccctctgcatcttcgtcccttgagttgtttttcttatcccaaaacaatcgttgaccttgaattgtgcccaatcagaccaatcaccgatttatcgttcggaagggaaaacttgacaatccgcttgtcttcatcgacgaggccgactacagcagtgatctcctgtccggttcagctggttcatggaccttgaaccacaaggccgctggtgcagagtacggtcttaacctcttcaatctctttttctcccttgtaggatcaaatcatagaactgatgagatcatgatctctatctgcacctgcttccaatagtctgttccgttactctggaacctatggaattgactggtctgattggtttgcctacgagaacaccacgtctctgaacgatagtgtgtttgatggcaagttttggtctggacaggtacgctgccaccactggctctgatctgtggccatttacttgcagcagcagcgctgactttctgctcaatatctacatctgaaactgttgtctcaatcagcacatcatggtacaatattactccaacatcagtggctcggccgctcctatagttcatgctgatgctgactacacagggggacaacggagggtgcctcgagttctagctcgaggaacctacaatcagtttggatacgatcaaggacttcaggcatctttcaaacaggtggatgatagcggaaactgggagatgcctgtaattacagcattctactttttaacatgcgacccaaagattgatatctgacaatgctgcgctgatctttttctgaggtagcttttgaccatattcccgacccttatgcaaatcaaccacttcggattcgacgactacttctatggagacgccgacggagatggtgtgcttgatcgactgccccctaattcgctaagtacgtgttcatcacctgacgatctagacatcgcatatctagagttagtgttctgaccatcgatccattactagcccccaactacctcaatttaactgcacctccaagaaacaaacttggttggaccattcaagttaacgatcagactggaaaatggacgttggaaccacgaggtcatgcttgggtgagcctgatcatctggatactggtctgcacaatccctcctttgacggcagtgattacagctgtctcgttccgtaagtcttgatttcgcagcagccagtacatactttgttctcacttcaacatgttttgggctgtgttgtcatccatttatcactatctgcaggcaagaggttctacgccatcaagatcaacaagtatggagtcgcagtcagcaaaatacaggatgacaacaacgagaaggctggccgcctggctcctggacaaaaaatcatcgtaagtaaacgatatttgttctcatacatccaatattatgtgtctcatctaactcttgtaatcttaataatggtagggctggccagaggatcccaacaagaagcgcaagatgatcattgtaagtcagaacttgaagtttgaccaatttccttttctttgactaacgcctttccccctcccatcttaccttaaatcatttcaggctactttggagtatgaaatcctggattggaagatcaagtaagtttctccagattgaactcaagcaattgtgtgacttatacagtgtattccccatcaacctcagagtcaaaattggtggactaggagtcatgtcaagtgagccaaatgttctcttcttttttttcttctacgaaacatatcgattaacctgagggtatatcctttactcctctctttttcagaacttatgggaactgccatggaggattgcgatctggtgagcacgactgaaattcgtgtttcaccactgtcatgttcccagctcacatttctatctgttcttctcaataggtttggctgattcctaaggttggggatgttgagtatcctcctggtgaacctactgagccgattgaagtcatcatttttggagagccgtatctcatcgagtgcgagattcatgtggtaggtcatttcactcaatttccgcgtgtcaagaccattctaactgaattgttttttgtgctcgaatatcaaatagtacaagaatatcacgtactacatcctggacagtccagtcttccgagctcagacaaaatcagatccctacccggctcgaatggacgatttgtcatctgccgtattttactcgacttggaatcaagcaatcgcagagactatccgacgaaatcctgtgatcgatatctacgtaagtaaattctgtgagcaggttgatcacagactcaaaagaactcatgtgtatgccttttgcgacgatgatagcacatcaacgattaccacggtaccttagctccgttatatctcctccccaaggtgttccctgtctgtctttcattgcacaatgccgaatttcaaggtctttggccgctacggagcaaggatgagatgaatgaggtttgcgctgcattcaatctgcccaaagaagtgacaacaaaggtgagggtttagcaatcgatttgcaccctgtatggtttcaactgaagaaaatgattcggtcatcctaactttatttacgcattgattttttaaacatgatagtatattcaatacggaaatactttcaacctgctccatgccggtgcctcctttatcgcacaccatcaaaactctattggtgttgcaggagtatcagacaaatatggaaagcgatcttgggctcgatatcccgctctttggatcttgaaacatatcgactctttaccaaatcctggtaaaacttgtttcccaaaaagatcaaaagatacagagagcctttttgatattgtttactgactttttcgcacttaaaacttgtctttctactactgtatccatacgaacgtgtacagatccggatgatgtagaggccttgagcgaacaggttattgacgtcaagaacattggcgtagatcaagcagctgaggccaagtgcgtattcgacgtcaagaaatagcagctatatcggtattatactcatgtactcttatcatttataggcggcctagtctcaaaagacaagctcaggaatgggctggtatagagaccaatcctaacgcccagctctttgttttcgtcggtcgatgggtaagccgtctttcgttatggacaaggcatctccacccgttattcactaacctttcttctcctattgtataaatcagtccaagcaaaaaggagtcgatatcatcgcagatgtcttcccggctcttctcgagaaacgaaaggatattcagctgatagcggttggtcctgtgattgacttgtatggtcgatttgcagccgagaagctggctcgacttatggaaatgtatccaaaacaagtgttctccaagccgtatgtattgttctgaattcactttcgttcatgtgtgtttttatcgttgacgtttttctctttatcattcttagtgaatttacctctttaccagcgtacctgtttagtggagccgactttgctttgattccatctagagatgagcccttcggacttgttgctgttagtacttgtactcttggcttagtttctttgaacacatccgtccgttgttctttgctgacggccttcaattggtgatcaatataggtcgagtttggtcgtaaaggagctctcggagttggtgcccgactgggaggtttgggtttgatgcctggttgggttagcagatcttcttcatcaagtgcgttgggatcaatggctaattttgatttactgtctttccttatagtggttccctgttgagagtacaaggtaacttccactaatcggtctcactctctgcttcatacctgtcagctaaccagatgtttttaaaccggtcgatatttgcagtacttcgcacatgatttctcagctccaaaagacaatcgttagtgtaaaccaccatctcttctcatacttgagcctgacactaatgtgtgatatttgtgcatgtgttttttgtctcttcgattttgacaaaacagaaactggccttgaagtcttctgagcaggagcgtgcggtccttcgagctcgttcagccgtccaacggtaagtatcttatttgtggagtttaattcagctccaaatatagagtgccacagtacaaaactaacatctttcttttcaacagattccctgttctagagtggcggcaacgaaccgagatcttgcaaaagcgatccatccgcgccagtcgaaagggtgctggaagtcacgcttatgattactctgaatacgttcctcctcagcaagttgttcatggtgatcgacagtacgctatcttctcccttttctgatctgttgttctacatatttgaacatctgactaattgtgcatgcgtcgcatacttcggctgatagctacggagatctcacgaggattgaacgggttgattggtcgaatagagtacgtgccgtgatagtccactagacaacacctagttgcacatgctcaagtactcataatccttgtatagactccaatggacgaaagtcaaactgcttatgcggagggtagcattcgaaatgctccggtcattgccgaccccatggaccctagtcgcgacaacgagggcgggttcaatgctcgccgctacggtgatgagggaaacacttactcgcctgctagctccgatcatagcgatggtccctactttagcgatgagggcagcccggtgcaacatcagaaccagtctgaagacctggcaggagatcgatcttcgtcctatggggctttcctggcttcagccaataggtaagcgctgtctatctaaatatgtcctggcattccaacagcgctcatactttgtgtcttgttcttgattagacaaattgcaaagcagacaggaagtacacgcgatcctttcttctccaacgcttcacgaatcagtttcgcagatgacggagagcttcaagcacctaaccgacctttcacgatgcattcgcgaaactcgagcatctcatcgattgtggatgagcatgggtcttcttctcctctaaacaaggcgatggaaacatttacggatgagaaaggtccgtcgccgtttcttatacaaccgagttgccaaccagaaaactgatgtgcttccgtatcactataggtttggttgctaatgaatttgttcagaaactaaaaaatctcaactctgacaactcgaagggcgacctttgtattgagaagtgtaagcaaacattctgtttaatccggcaaggccagatattctgctactgatatgagaaaatcaatatccacttcagacctggaaaaagcggagaaggcccacttcgttgagcttcgaagagaaaaggtttgtttgtaacaaaattatcatttttgatcaaatgctaagtgtggatattttcacgttgatagatcgatagctccaaggcttctggttatggatccagccttcatgagaactcagtgtataccgctgctggcgaactcgatgacaatcttatgccggacataccgatgtctaggatgcaaatctttatgggccgtcagatcggagagtggcctctgtactctatcgtcatgagtgttggtcaattactctcggccactgcgttccaattagtacttctctctgggtccgctacccaaactggtaaatgacatctttaattgcctctcatatttctgacgttcaactgaaatccattcgattactgtggtgtatctgttcagatctcgatctctacgtcatcggagctgtcttctttacagctagtatctgctggtggtatgtcagtctatttgtcatattgcatcaaatcgtatctcacctttcttctcttcttcaaaagggccgtcttccgaactatgccatccgtgtacggactatccttcccatggattttgtgagttaatacaacatcaagattaagtcttgacctggagggtgcattgctcaaaccgcttggtctatcacccttttaactttgtattttcatctactagcttctccatcgccttcttcatgattggacttccttcgttccatggaagtatcacgtcgaagcaaacttatatccaggcggctgcgacttggtgctatgcctctgcttctgccgcgaactttatgttctttggaatgaagtacgtcaagtatcctcagagtttatcaagtgcattctgctgatttcattccatttccccttagttttggtgaagaagccggcgctactactgagtcttgggtcttccgagcatgtgtgatccaaggtcttcaacagtgttggactgtacgtcttcttggtgctgcagctaggtactgatatgcgactgacccaagacttttctttccttatcaaggctgctttatggtggtggggtagtttgctggtcaacaatgaccgtaagtctagccagttcattgctcgtgcggaggatcactggctaactttcttgatattgcctttcaaactctccagctaccaagtacatagctgtgagtattgattacctacctcgaccatctgggtcgttcttgactgatacggagtttatacctttgaatctttcagcctcgagcggtgttgtatgtagtatggcctctagctctcataagtatggtgttcttcgtcacgacttggtggggtcttcctcaatactatctacaggtcagttcacaatcttctagtaagcgatagggaagttcctttcgctcaatgcagatcttccacggactttttcatcgaacagaaacctcctactgtgcccaacttctacgctactctcttccgacggcacattgtgcaatggtttttggttgctgagatccttcgagacttttggctggctcctccgacaggccgaagctggaagttcctttggaataacacgaatgtaccagaatgggctaccgttattatgatcggaattttctttatcggcgtacgtggttgattcatgattggcagtcaacgaaatccttctaattattcttttcattcgactgttagatttggtctatcctgctgtacactctgacccgtgagttcatgtgtccatatgaggctatctgtgacggagcttacgtattccttctttatcttaacaggatatgccaaggttcattcgtggcttctcccagtcttcgccatcggactgggtgctcctagatggtgtcagatgttttgggctatctctggaattggagccaacgttccatgggctggatccgtcggcccgtacctctctaccggaacatggctttggcttggagtgctcgacgccatccagggtgttgggttaggaatggcgttgctccaaacactcagtcgattccatggtgagaagctatttcgtttgataaattagaatgcatccactgatcgagattgggtgaatcctttttcttctcttcctcttcttagtcaacgctgctctgttcttctgccaatgtcttggtgcccttgtggtgatcgtcgcccgtattggtagtcctgatcgagtgagttctcctcttatattttctttaccctccaatgatatatataaactcttgtattaacatgttggtgttcgtcatcacagcttgggccttacactgtattccccaatatcggtctctgggataaggcaatcgatgggttgacaggtttacctgtgatctacccactcttctggatctgcttggcatgtcagattggaatcgtcgtcggctgtgagtgctttcattgagaaacaaatatgttgttctattctgactggagattatcttgtacttgatccttgtaagacctctggctattccgaaaggagcaattaaccaagccatagcagtttctagtgatacaaatctccatttcaattcttttcttcaaacagtcaacgtcatatttatttcaattctctcatctactcatggacattctttcaacccaccttgtggtatgcatatgcatctgtacctgttttcctcgatagaatgttctaaatagaagctcgaaattagatgtatcttttctttgtcaaggacatcattgcgctcatatgtttaatcataatatttgtcatcaccagttccctaagcaattcatggtcaatcgtgcggttaaagacaagtcgttatggcggagggatagtttcaaaactgaggataaggtggtattcatcttccctcgttgcaccggatttcttcacatatctctaaataagtcaaaaacagctactgctcataccattctatggcgctctcacatgtttgtggtttcaatcgaataaaaagaaaggagagaaaaaggaaggaaagaagtacgaggacaaaagaatctatagaatccgaccaactaaacgatgacacaacgagcaagttctccagtgacagtaatacaccagtcttcctcagtttttgtggaggtctccttgtagaaagtgataagccgatcgggtcctagcgaatttgatatccgtaaagagaggaataaatgaattgacgaacaaacctaggactagctgaagacatgaaagataagactactgacctccacaaatctcctgagtagtttgacacggcagacagtccattccagcattgtcagcaaaagaggagcgaacaaaaagaagacatggcattttcaaaacatgatgataaaatcttactctcttattgcctgtgcagaccatgctacattcgtcaaagtctgcaacttcagaagaaaaagcagaaccacagtaacactctaaacacaataacaaaggcaggaagtgaaaattgaagcaaaggtcagcagtaggtatattggttgaaaatgtacggaaaaggtgaaggtgttgaagttactgaccggaaccatactcggcagcggcgtattggtatcctgcttcttcgcagaatgcgacacaactaaggaccaaaagaagataacgtcagtaatatgcagccaagttcgaatatcaggagcagaacattgtttttctttttattaaagagaaagaaagaagacaagagtagtaacaaagaaggacgaacgattcttgactcatctcatcttcactagtgtaagaagtggctcccaaggttcgagagttttccaactcatgcacgcacggaccaatcttccaaccattagaaatcgtatcgttctttgagaccataagcgactcgttctctgttagaatacgatatgcgttgtcaaccggcatgatcaaggttgacagaagtaagcaaaaagaaatcaaggagctcacggagtaaagataagtgcgaggctccgccctgtgtggttacgacaaagatgagtatcagacaagcaaacaactatactatcccctccttgttgatgcacctcatagcttgcattgcgcatgtactgattttaaataaggaataacgtacacagatctcagtcgggtctcctccacaagaatagtcacaattagagttatcgacgatagcaccagtagcgccatttcggaaatcaaaatcacaatagcactcggctgatgtatcgaacaagatgtggaagaatagattaaaaagataacatcacacacaagaatatcaggtttagactgatcgaggagggttgagaatggccaattcagaagaaacaaaattactgttatattcgagtccagcatatggtagctctcttgaagatcagcatcatatcagacgtgcatgagacgcccatcagccagaaaggatgaaccgtcaattctgataggttttattttctcagcaatcaaagactcactgggactgtggaattcgaaggaagaaatgatataagtgctacatattatatgatggacacggcaaggaaccagaaactgcatggagctcttgacaagaaagaaatgaactcacctcgcaaaagctagcacatgcctccagggtcatgttgtccgctttatacacagcggccgccagagctcgtagggttaccgtggcttcagcgatgcatcctacgctgttccacccagttggtaaagtgtgatccacagaagaagtcacgggaacggtctcgttggctgaggtgccgctactcgtagtagtgttggcggcgggactgctgatagcagtactgctagagacaggattactggtagtggtaccattatagttgataccagtagtcgcagtattattgttgtaggtagtggtaacattatactttgtacaaaagtcaagtgaggagacaaaatcagtgattgatttttagtcaagagcagtgtgaaaggaactcagtccaatttggagaacaaaacgagtcaaggcttacagttgcttcttgtcgaccagccaactgtcgagatctgatcgtcgaccgatgtatgttttgcccggcttgagcaggaggaattgaccaagcaaaagcaaggagagtcgcgcaatgaatgactgattgggtggataacttgaaggcaggcatagctattgatacgagggtgaggattataggagctaaagtgacacgagaagtagaagtcaatctcgaggcagaagaagggagaatcgtccatattggacactagtaagcttctcggctttatacctgcctaaaaacccgttcgatcattgtcaacgaagaaaaagctcttcggaattctaagtgcaagacttgcgccgttagtcttgaatgaacccattcttgtatcaatcatcatcgtcgtcgtcgtcgtgagctgcatacacagaggagatggtcgattgtgccaaccataaacgagacagaggagatttctgaacgggatctgaacggatcaaccctgcgtgtgcgctcaagaatacaacaccggaataaatcttgaacaagtggctgattggattcaggagtattttgacataatctgagtgatttccgtcggtgtcagttttatgagaatgtagaagacaagatcggagatatgaggccgacacgatggaaatggtgatcagagaaaacacgttcaacaaagtgcgcctgcgtgttgatggaccattcaaagacacagagggaagcgagggagaaaagaataagagaagagtattcaagagaagaagcagatattgaaaacataacgtgtcatcaacaacgagacttcagaggtcacaaaacgtttcactcagtcagttaagattcggtcagctctgtcaaattccaagaattcacgctccagatagaagactatgggcagagagcaaaaagtttgggctggaataagagaaaaacgagcgttgacttgtttcatttgagtttgatgcaacacaagagtgatcgtcgttgtcaaggaacatgtgtgtggcgtcggaagtcaggtgatgccaagacaacactgccttgattgtcaggaatcaggattaggtaacatgtacacgcacagtgtagccattcccaagttctattagtcatcatgccttccatttcattatgctccttctcttcattatatgcgcttgatcattcttctcatcgttgtttctttggattgttgatacgcttagtgatctgttgctcgataacctccggcttcatcgtcattctggttgataatcctgtcgtttagtaatcgagtggcaaccaggttgccacttcatcttaggtagaacactgaacaacataagaggaacgcttgcgcgctccttcagatggggttctccaagttaggatcttgttaactactcctattagctatttgtgctattcaattgtgatcattccctcttccctgagccctgggagcctaaatctccgagccttgtatttccctattcaaccccagtaaccacctcgtaatcttgtaaccacggcttctatcattgataacccacagcttcggtcacgatacttatctgccacaaagcagtacgctgactcgactaaccccgaaattatctaccactttcccatcaacgttgagacccaagatcctcggatatcatacgcactcacccactcgcagttgctcaactatctcaaagcatgcccgctagagctcatacccataatttcgcagctggaccttctcctctgccaacttctgttcttgaggtcagtttttcctaccaatgacatcacgtactggttacgttttttttgttcttgagcggagctctttgcgaagcagcaaataagacgagagaacagaacctttcaactgaatagcttcttattattatcatcgtttctgttgtcatcgttttttgcattacaggaagcccaaggtgctctccttgatttccaggggtctggaattggaatctgtgaggtcagccacaggggaaaagagtttgctagtgtcatcaaggaggccgaaggtttgaccactttccaaaacttttcagccctttatacatgcctctgatatctgactcgactcgatcacagccggagttcgagcactccttcaggttcctgacacccaccacgtgttgttcacccagggcggtggaaccactcaattctctgccgtcgtactcaacttgctcgctcactatgctgccgctcacccggcctcaaaccctcccaagatggactacgttgtcaccgggacctggtccaagaaggctgcttccgaagccgctcgactcgctcatgctggaaagcacgctcaagtgaaccttgtggctgacacgaagccttctggatatacccggttgcccaccagagacgaatactcgttctcccctgctggtgaggccgcattcgtctactactgcgaaaacgagacgatcaacggagttgagttccccggtacaaccaccgagtccggagcatttcctttcgacctcgttcccgagggaacacctctagttgccgactactcttcctcattccttagtcgaccgattcccaatattgagaagcatgcgctcatttatgctggtgcgcagaagaacttgtcgcccgccgggttggtggttgttatcgttcataagtctatccttaactttacggatgccgatgcaccgattcctatccccgagcttctggtttacaagaacatggcggactctgcttcattgtacaatactccccctgtctggccgatctatatcacctcgctagttgtcaggctgttgcttgccaacggcgggctccaaggcaagcgagacgaaaatttggagaaggccacgttactgtacaacaccttagaggatagtgggaatgttgtcctcaaagttgagaaggaggctagaagttggatgaacgtcgtttggaacatgaaaggtggtgaagaggccgaaaaagctttcttggcaggagcggaggagaggggattgagacagttgaaaggtcaccgatccatcggaggttcgtacttccacctagtctaccctctctctatttgtgttgtcgacagcaactgaccgagaaagaatactaaacatatggctacaactgataccaggcatccgagcttcgttgtacaatgccgtcacgcttgagagcgtgcaggccttggtcgcctggatcaaagagtttgactctcaggttcaaaactgagctttgactctcttgaattaatccctcttcttgtttcctctttccctcttctcagcaagactttttcatcttttgcctctttcctagagtcatcctttcgtctttttcttagattctttaggttttgcttgattttcttcttctgtactctgttccatccttgccatttgcaccagcaaaagattcaactcccctagcatttacttgacaggatcaatgtcatcgagtacacgatactttgtaaccaaacacctggaagagtcagattctgggacggaaacgtaaagctacatggaagccgaaaaagaagagaagggacaaagaaaacatgtatctgtatattgagaactgtaagacaaaaggataaaacctaggaaatcagaatgaaagaaaggaacaggctacaggattaatatgaattagtgaagagtcgaattgctgtatctgtttattcgatgtcaccacaagaaagaaacccatggttaacttgatcaacatagaccgtaaagaaaacaagaagaacatagcacgaacattctcttaaaactgtctcgttcaatccaagccgcccaaaacatcttcgtcttttgaccaatcttgaagtctcctgaactaacgttcttgagagacgcaagaggcgcatctgggttctgtggtccccgcatcgccggtgttccgatcgttccccctgaagcagtggctgcacctccgctgagaccgagaccgatccgagtgcctgcgatctgcttctccaaagcctctaaaccggcaggcgtaggacctccttgagaaagaaacacgattcgggcgagccaggcgatgatgtgtaggtcagcaagagactgttataaccgagtgaatatacgtcagattttttgtgtgaattgaatcataaatcgtcgtcagctcgaacaacaggtccaagatcatgataaaaagaggacgaacgatttgatcccctaatgtatacggcccaacgatgtttgattcaattatatccaaattctcgaccactccgaccccccaagcctttcgagaagcagcaaaaaacgcttgtcggcgggcttcggtttctggcccggtatgaggagaataatatacgtcgtagactatctggttcgcttgcaattctgtcatcggtttgttaagacacacagatacgatcagtgaagggaacttgaacgataacagaggtcaggataagttcaaagataacatctatctcactatttttcaaaaacagatgggtcgagcttccttcctcggattctttgatatacctgtgcagggcctcctgtcttgctttgatccagtgcccggcaaagcccttttccttcatcatgagctcatgcggcgacctcgcgcataacagtaggaagttcggatctgcagtaggaagatggacggctaggatgagcgtgtcggaaagatgcttgccttctatcgttgctggagagagcgcaggagctggtgacgatgatgaaggagttgaatgaggggtccgagaggagtccaggaacgtcaagatggactaatcgcggaatgaaaaattcagcaagataaattcaggttaacaagaggcgtaggtgacaaggatcagataattagagcgcacaatagtgtcctggatggatttataacgtgtctctttacctgcttcagcagccgaaccatcccagacagggacgaccaaggtgggtatagttcctgaatgttgtttggcaaaacaaagacggtgtcatttccgttcattcaagataggtgcaaaagatcttactcaccatgtgggttcaatcgaagatagtccagagaaaaattgtcccctctcgcttaagtaataaaggagtttgatgaatattacgacaatatacaaacctgaaagatgacgctcaaatgagacatacagatgtcgacggtcaccatattgaaatcttcttcggagtatcctttttctcttagagccagcaatggaacggttgaccagacgctggttggattcctttgatagttgataatcgacggtgtttggatcgatgaagaattagaaccgtttgatcaatggcaagttccatatcgcccacgaagcgatatgagatcaaaattcaaacagagaagaacaaaaatcataccagtataagacagctttcggtatactgttagaacctgtggatgaagtgctcatcgtgtgtgtgtgtgtgtgtacgaatgtaagtgtgagtggaagagaccgtactcgtcaagcttcaagatggacggctgaagatgaagatgatacggttgacgtcgccactggatggttacacggctacagattaaattgtcagggatgtgacctgagtgttacacctcagtaaccttcttttggttctgttgtttctcctgcctcggtattccttatgctctctcattacatcaacatgcaggtatatgaccttccagcgcaggtgcttctagcaccttctatgacctgttctcttatgcataatcgttggagtctaaggatgatatataagacgggtcccctttgccacccatagcataatctaccaagtctggatcttttgtcattccttggttccctagtactcttgttccattgttgtatcaaccttattcatacgatttccctaccttgcgctctcgtcacagtcaccaagctagagagcctgaacttccttcttgccaaccctattccctgcctggttacattattgtaaccttcccgttaccctctgaacccggaccctgacataaatggtataaccggtcacgtgagctcagtcaggccggccggttaaacccatctccggagattcctcaccttacgttgagcactcgccattgaccatcgatcatatctcggaccactccgcactcatggacactgctactctctctggctcccagatcatcgcaaggtcactcaaggatcagggagttcaagtcatatttggtcttgttgggattcctgtcagttcccacttcccaaaaggcttgattatcaactcggactaattatatattccattcttgcgtgcttgttggcctgtttgatccatctcttatgaaagaataggtcatcgaggtcattaaagctctctcgtttcttcaatggtacattcagactgatttaaagactgatacttaaagtaatccatggtttatataggttgccgaagcctgtattgctatcggcatccgatttatatcttttagaaacgagcaagcggcgtcttatgtgagcattgatattcagcttcttagtatgaggccgagaactgaacagtccccttcacgtttctatgagctaggccgccagtgcatacggatacttgacgggaagaccgggcgtgcttctcgtcgtaggaggtcccggagtgattcatggtaagctttatgaaagcttgcaagatttaaacagagaagctgacgccgcaccttgtttgttatcctatcataaccaaaagctatgcctggtatccatcatgctttatccaactcattccctctagtcgttctcgccggtgcgtctgagtctttccagcaaagcatgggcgcttttcaagagctcgatcaggtagcgtttttaaggaaggacgtcaagttcgtatccactccttgtgcctgacttccttgattgccatgtgagcatttactgatgaaatttttcgatggacatgctgacagatttgcggctcgaccagtatcaatctcacgaacacccgtatttgtcgagcaggccttccgatcagctctttatggtcgaccggggccaacttacatcgatcttcccggagactatattcaaggatctgtgttggagaaggacgtcgaatggagaccgatcattgatgattttccaagaccacctgcgccaaagggtgctattcggcggatggttgaccttctgatatcagccaagcgacccctgattgtcatcggaaaaggagcccaattctctcgatctgagctagctctcctcgaccttctctccgttctacctattccattcttgccgacacctatggggaagggacatcttcctgacgatcatccgttgtgtatcgcttctgctcgttctgctgccctcaagggcgccgatgtagtactcgttcttggtgctcgacttaactggattcttcactatggtcaatctcccaagtgggcttccgctggccaagtcaaatggcttagggttgacatttgtccagatgcaattgacgataaccaacgggctgaagttggcgttgtagctgatgtccgtaccgttgtcgagcaactatccgaagaacttcgaagcaggaataggaaacccgatttaactcatcaggaagactggggaaaaactcttcgatcctcgatgtctgtcaacgctcacaagaccaacgaaaaaaccatcatcgaccgtaagagccagccctcattaatgaagtatcatcaggcgtttggaattatctttccgcttctgccgaaagatcacatctttgttgcagagggtgccaacacgttggatattggtcgaagtttcttccctgtcgagaaccccaggtcgaggttggattctggttcaacagccacgatgggcgtcggcatgggtttcgcgattgctgctgcgatttatgaaaaggaacgggtgaaacttgaaggtgaaaccacaaccgaacggaaagtggtggctgtggtgggagatagtgcgtttgggttctcagcgatggaagttgagaccgcggcaaggaacaaactaggaatcttggtgatcgtgatgaacaacagtggggtatgttgttgaatttgattcgacttttggatcgaaaaaaaacttaaggaattcgacctaatgcaatggttcttttgaccgaatttggtcatctccaggtctaccatggactttccacgtcggcctatacttcaacgcctctctcgtctctccctcctacagcgctcctccccggggtccgatatgatttgatatctgaagcctgcggcggtaaaggttttcttgttcgtactcccgacgaacttgctacagctgtcaaggaagctatgaaggaagaaaacacggtgtcagtcgtcaacgtagtgatggatcctgggaaaggtggaaagttggagtttgcctggttgaaagatacaaagaaggagtcaaagctataaggttgttccgttaatttgaacggtgcatctcaccttcttggattgcctttctcattacctccttttgttacaattttgtaggtttttgttcttgtatatatgcgcataagttcttcagaattctttgtgccttgatgtgtattgtcattcatgttgactttgatcagtcgttgctaatgagaacagcacaacccctcatatattctcgccctcaaccatcttgataccagaagaagcagcaactcttccgcttcttaatccttcacctgcttcatcttttgcaagacccgccgcagcgacgatggaaggtacgttgaacttcttgaatcggatgaattcagcagagggaatcaaaccaatggataccgtgttctgtaattccatcaagattttcatccggtcagacttgtgggcttggagttcctctcacagggatagagcaaagaatcaagggcaggaaagaagactgacccggacaatacgaacgagaacgatccattgagcgttttcactcaggtcgacaatatgtcctctatcggcaggaacagcctctgccattccttttagtaacgtcgctttttcaagcgtctgattttgcactgaatgatgatcgattcggaactattccgtatgtgaagatttacgaatgagactcacaagattagcccgaaagaacatgaaaacggagagtgagacatcattagagaaagaacaaaaaaacaggctaaacatactctcaggttctcctgcgtctcgaaaacaccaggataaactttttcctttaccagcttgatgacttcatccagctcagctcgacacgaatagctcactggcgtgatgcgctggatcgttcgggtctgagagacaccggtgcgcaagatctgattggcgtagtgaagaacaagatgcagtggatcgatcggtgggtgaagcgaaaagaacatgactagtgtccgtacacgagaggatgcaagaaggtaaatcaagttaataataagttaggaccaagtagtgtgtgaatgcgtaggaagaggacatgctgcaatcaatatcggtatgcttattcactttagtcaatacaaaacaatccaacaatgcaagtcggcgtcaggtgttgcaaaaatattctcacgcggcttgactctaaaggttttacgagactcaccaatcagactagccttcttctttgtttttgaacttctctccaacttcaactctgccagttcctttgccaattcgtcttcaaaatcgtcaccctcctcagcggcagtagcagctaagcgagctttttcttcatcggcccaaaaagattctctaaagattctgtatttctcctgttcccctggatagagttcttctactagctgcatcctcccaccaaacaagtacacagaagagatcgaccgacgagggatatgattcataacgagggctcccgtcagttctaatgggcgtccgaaagcaatggaagaaactatacgaacactttccagaacttgatacatctcggctacgctctgtctttccttacttcgaagcccggtcacccagacacctggtccagacaagttttgggtacctccgatatacgtcccatcctagagggtaaatgaagtgggaatcaaaaagaggataagatcattttacacgaccgaaacgaaagatactatgcacatacagatctgtactgcttcttctttttctgcctattatcaaccgccatgatggtccgtatatgtctgtatatgtgttcgttctacatgtccaaagaaggtgaggattcttattgaggtggctgagcctgagataaattcgtgtcaggctgagagagctcaaatgaccgtcacctttcagttgtccaacatttccatctatcggcaacggcgacggcaatagcgacggcaacgaagaagacgatatgcgacttctaactcccctactcgctctccgcatacgacctcatcctcatcatatttctctgtttcgtcggaacccgtctctttctcggtcctttgcttcgcctggtactcctttcaagccgcctcagtacggtcaacctctctcgttgacacacccacacctcgtccggcccggtcagctgactccagggatttcggtgggcgagtatgaaaagaggagaaagcagctggtggaaagagtcgaacaggatgccattatcgtctccatgggagcaaaaactatctactgcagtcagagtaagtagaaagcactttctttttgtctgcgctgctcttcgtaggtcgctgaagagtgaagactaaccctatctcggttacccaacgggttttatcagacatcttgtaagcaattgtatcagactaaaagtcaatgtgagcttggctgatcacctccatgatgggctccttatttaaatccaatacaaaacaaccactactacaatcaagctacaagtttcgacaaggtatgccatgtctgaccagttaggctgctgtttctctatactttggattgactcatcatttttgatgatcccaaccagggaccgactttaactacttgactggattcaatgaaccggaggccgccgtaatcattcgttagtcatccctaactcattgatctactttcttacacttgtatcggacgacagcaatgactgacctgtaaagaacgaccaactttgcacatgtgtgtatatatgtacaattcatttcaatttcataaaatcaggaaaggatgcctcacccagaggttatcatatgacattgttcgtccctgtgcgctcggccgaatctgatctatgggaaggaggtagatctggattggatggtgctgttgagtttttcggagcggacgaggtttgtttcctatactttgcttcgtcaggtaaacgaaaaaagtatagtataagctcacgaacttctccgcttgatctatcttctgaactgatctggtaggcctatccactatcgtccatgccctctgtactccaagaccacctgtactcagcaccttcgatttatatcgacctgcctccctccaaatccaaacgatccttcctatctggtcttttgtcttcatcctcatctgcgacgtccgatattgaaagccaagttgctaagcttccacctgggaaggtcaagccactcaacatgctcgttcaagcgctcagacttgtaaagagcccagaagaagtcgctttgatgaaacaggcgggtgatatcgcgagcaagggtcatactgaggttcgataaatggctctacttgtcgttcgtgaatgtaaagggctgacctcctgacaatgcgcactcacaggtcatgaaatttgcccgaccagatcttcctgaagctcatcttcaagcacattttgaatacatttgcgcgcttgaagggtctgaacgatccgcttatgtgcctgtagtggcgagtggagcaaatggcttggtcattcattatacggtcaatgactgcttgatgaaagacggcgaattggtgttgatcgacgccggtaagtaggcctttcgccattctcttgttaatccttcatatgactttttctaccaagggctttgatcctgatcatccaaattctctatggtaggttgtgagctacactcttattgttcagacatcacccgaacatttcctgtttcgggcaagttcagtcctgcccaaaaagatctttaccaggctgtacttgaagtgaacaagcgatgtgtcgctctgtgtgaggtcaataatggttggacgatgaacagtttacacaccagaagttagtctcttcttgctctcctcactctactatcctggcacagtctgacgtccttgcttatggggaaaatgctttcttacgataggtgtcactttcatgaaagaagaactgaatcagatcggatttggtttaagccacgaccatgctgcatccattctcgtaagcactcctatcgtctcgctcatactttcatagactcaggcttgtctctttcgagttcgtagtatccccatggattatcccactacctaggaatggatctgcatgacactcctcttgcctcaaaatctactccgttagttttactctctgcattcgtacctgtttttcttttttctcttgaggtttctggatgagaaactgatatacctcatcgcgctgtacccaattttcgttcgacgttcagccttcaaaacggacatgttttgaccattgaacctgggtaaattttggtgtcgtacttatttgatgggctacattcgagtacaacaactgatatagaatctgttcatgtatctctctatcgtgaaatccgacagggtgtacgtcccgtatgattcgcgttaccccaagcatttccacgggttgggtatccgtgtggaggtttgttgagatatttctggaatgcttaggaaggcaaaagactatttcctcatgctaacgaaacttttgtttcatctttgtgtctacaggacgacatattaatcactccagagggacccctggtcctgacttcacattgccccaaggaggtggctgatgttgaggctgcctgtcaaggacttctcggatgagcaggttcactgaaagaagaaaaaaagaaaaaaagaaaaaaatgactatcaatgatcccctcatccatgcaatattgggctacggtattcaattcttcagcctgatcgtaaagagagaggaagaaagtcaaagaaaagaaagacaaacttaagatgatctaatataccggcccggatcaagcggtccggctgcttgccgctttacggccaaatacgaaaaatggcgattataaaaccacatccatcggctgtcttcatctttcctctcaagctatcatcaactttccaccgcatcgatccataaccgcactatgacactgcccacttccttcaaactcaagtaagtcgtctttgctcgattcgttataccatttagggtcgacgagaaggaaacaaggaaactgacctcatcttgcggtccatttctgataagcactggagcatccatcccatctgtcgggcttggaacctggcaagctcctccaggcgaggttgctaaagctgtcgagcatgctctcaccgcaggttacagacatcttgattgcgctttcgtctatggaaacgaggtttgtccctatctatatacagtatactgcatctcttccactgtaggcagagttcgttgagtctaaccgtaagattgtgatgggctcgggtttaaggctgaggttggacaaggtatcaaggcttctggaatccccagagatgaaatctttatcaccacaaaggtttggaacacctaccaagaccgagtcgaggaatgtctcgataagtctttgcaggctctcggggttgactagtgggtttgattaatcaaagtgataattcagtttggcagtccatctatagtactgaagcttcgattcgaccatataatatctcagtgtcgacttgtttctcattcattggcctgttcgactagttcccaactcgaacgaacctgatgccctcatccctctcaactcggatggcagtagagcaacagatcgagaatggaaccagcagaagacatgggcccaactcgagaaaatctacaaagaggggaagaaagtcaaagctattggagtcagcaacttttcgattccctacctcaaacagttagtctctattttttctatcgagatccaaccttcgaatatttcaatgtcaaagtctaagatatcactctgtgatctgctcaacgttttttcagcttggaagaggcgtggacggtcatccctgctgtcaatcaagtggagaaccatccgtattgtcctcaacatgatcttgtggagttctgcaagtcaaaaggcatcattgtccaggcttattctcctctaggatcaacgagtaagtctgtttgcatataacatgaaatgcatgatatgctctggtcacgggagcccctcatttactcaattcaaatgaatctttagactccccactcttgacagactctgtcctcaacgagattgctgaagcgcattcatcctcacctgcgaaaattctgatctcttatcaggttcaaagaggaatcgtcgttctgcctaagtcagtgacaaagtcgaggatcgaagataatttgcaagtgatagagttgaagccggaggaactggaaaagctgaacgaactggccgcgcaggggaagcagcaaagagtcaacgtgagtcttcggcctcatgtcttctttttggtttctggtaagaaggcttgaggctaaatgcattaatccatcatcacgggctttctctgctttcatttatcggactagactcctgcatttggatgggatcttggcttcgatgattggtatgaacccaagaagtagtcacatcagaatttcttcttgctaggatttcataactttctgtatctccgcttatggtacagggacctgtatggctagttgttagaatctgtttgaagtgtattgtggctcacgtagctgataaccaacagcgcccaaatgagatgatgtttgtttggacgaataaaagttcgcatccgtcgactgataagattctcgagaacactcatgagaatcaattacctcccctggaatatgattccttcaactttcctaatgcatgaccgtaagcctctttgaaaggttcgagctccttctcctcaaccttcagcttctgaagtttttccaggtgattgaaggatctcatgagagatttgaaatgacgagcctgcgtatacccaagggcagatttgaacagacgaagaatacaagatgagacatagacaggctgaatttgagaaacatgaagagaagcaggcaattgagatgaagaatagaagcgaacggacctcttgagactcgactaaactccaagcagatccctctcgaccagctctagcagttcgaccgactcgatgaatatactttcgagtgtcaactgggacatcgtacgagatgacatgttctactgaagcgatatcaattccacgggcgatcaggtcggaacagaccagactatggtaaggttgagatcaagattgaatgaattcaatttgatgttagtcggatacaaagaagggattataagaaaacaccacttgagcaaaagcaacgaacagatcgatctggccctttccaaacgcgctcaagacttttcctctctctcctctttcacctcctccaccaagatcactactataagccctaacaaccacgccctcttcacctttatgttcttttacccattcttcctcgaacaactggagaagtcgaacaagtcgagaggcagaatcaaccgatttagtgaaacagattgctcggcgaagtttgaatgtatcagagtgaagtagatggagcaagtggagtggtttcagtagcgtgggtagaaccaagtatgattcctgtatggtttgttcgcaggaggagacggttaaactcgtgaatacattaaactcaaatgtttagggaaaaaaataggctgaccttgagagtagcaggcaaactgaaagactcctcggcgaactctttggggttgctttctccttcatcctggacgatgaagtactgaggatcgttcagcttcaaggctgcgatctttgaaggatctctcgtgagggtagcagagaataacagcttctgacactgagaggcagatcctatatcttcaccttcccacctaggttgggctgccaaccaagccttccttcccatgggaaacaatatatcatcttcgaccgattgatctgctttgccaaagctgccctccatcaggctcggttcggttatcgaatcagagacggcagacgattcaggagtgacggtgcctcggatgttggccagaacgatctgaagccagtcgttgaaagactgattcaagagtcgatcagcctcatcgataatcaaaaaccggagatctttcaaggtgaatccttcagtctgcgcgagatggtcgatgagccttccaggcgtacagattagaatgtcgaccacagaagattttgttgttggatctataagtaatgacttttcgtgtgagaatgaatgagatccagtgatggtagcgatctaaatcatgaacaaatggttggaaaatttttgagaaaagatatacaggctgagggtctgttgaaaacaaacagaaagcacatccgtaccttgagaccggttcctttggccagcgcctcaaatgcctctcttccttgggacacgagatctctggtcggcaggatcacgagcgctctcaatctggtaacaattcgactcgataaaacttcaaccactggaacgacatagctcaacgtctttccgcttcctgttggcgcgctgacacagatatctctgctcccttttcttcccggataaagtccttgaaggctacctctacctgttccagtctctcctccgaaggttggaggtaataagaagggaaaaacagcagtttgaacggcaaaaaagttttcgacccccatttccttcaagcgaagcaccgttcgctgagataggttgattcttggcgatggagaagtagtatgttctgctggtgactcggatggtgggagagaggtggacgcagtatacagaggcaaagtgtgagtggaagggatgagacgagcggtttgaagcgcagcgggaagggtgaggggatgcaacagagaaggtgtaggttcgggaatcagaggggccgacagagggaagggagtgagtgaaggaagctcaggagtatcttgtctagattgccgagattctgatgaatgcatagacgcgtccgagtcagattcagagtcggagtcggagagatcggaagaagatatcgagggtcgagaggttattgagagtgatgtcaaaccgttgtctccaacaggattctccttcttcttcttcttcttctttccgtctgcgcttccgtcaggaggtagaacagatgactccacgctcttatcctcttcttcgcgttttcttttccctctctccttcttctccttcttttctttcttctccttctttaccttctgtcctttctcattcgacgtgcccttcgcgtctgtattggcttctactattacgtcgattcccgaagaaggagcaagaagtgaagaagcctcgacgatctcgacctgctgttgtatgtcctgagcatgacaatttgaccgctcttccttcttgtcctcaacttcactttcactaccgctctcatctgaagatccctcgtcggcttcagctacagctacggcatctgatgccattggtgtcgaagccgatccaggcttattcttcggagccgctcggattgcggccgcttttcttttcttggacttttccttctttttcttgaggtaccttgctttggcttctgttttcggctttgatcccggctttggtgtcgtcgtagggattgccatggttgtgtgttatgttatcggatgagaagtgtgtagagttgaacaactgagagtgaagacttctcaaaatattcccaaggctgaagtgagcctgactgcttatctaaataagcaagcccaaaggtagtactcactaccttctcaccggcatcaacattcttacataccatccatccatctatacaatcatcattggtcgtcactgttcttgacatgtccgagcgcgtcagagtaagcaccatttttcgtgttgtctgtatgtctctttttaactaaatcgcgctgaatcctactttgccttgtgttgttccctggcttctaccagggaattgtcgttcacagatcaattgtctacggctcgttcgccagactcttgacacccgaagaacgcctaagatgcaaagatgagaaccgtatgtgtctctcaacttagcaggtgctcttgtcattatacccttctctctccttccttaccactgcctctgtcgcgtgtgcttccatcgaatctttgtgcaagcagacacccacacatggacgatctttgtccggtcggcagcctcaccatcacctgacacgtcagtccctgctcccaaacgagcggaagatagcgatttcttgccaggtggagcagatgatttgagttatctgtttaagagggttaccttcaaacttcacgaaagttttcctcaacctaatcgaagtacgtctggacttatttatttcgttttggatttattagattcaaggtgcttatccttggagaatgtgtatacgaacgaacaaactggaaacagatttagataggcctccatacgaagtaacagaaacaggatggggagaatttccgcttcagatcagactgacgtttgtacctgaagcaggagagaagccgattgtgatcacccatcaactcaagctgcatcattggatgccgcctccgttaccacctcctggttctgctgaggattttgtgaatgtcaacaatactgacggaggcgcaggcatggcagacctggggccaggaatagtgacgacaggagcatcgtcatcaaatacaccatcacagacattgcaacaatctataacagcatcgacatcaacaccaaactcggcagcgcctaccccaccaccgccgccgcctcccccaaccggaccggtatattcatatcagtacgatgaactggtattcacgaatccgactcagaactttttgacattacttcaaggtagcccgccgacgcctttacctgcccaagctagaaggtgcgtagccgtcatcgtttctttccagttttaggtacaatgtttgacgaaagaaacgtctatatgtgtttggcattgggaaatgaaaccttagacgagaccgaccagaattcacattacttcaggaaaaagaagagtccgacaagctagacgaaggtcgacgacaagttgttcgggagactgataactggcgtcgaaagtgagtttccatattttcttttttcaaagatagtacaggtctctgagatggttgctcatatctcgtgtaaacgtgcggggcaaggacagattgatcgaggccgaaagggaagcagcaagactaaaggcagaactagccagaatagatgaggtgtagtcggttgccatgttatgcgatgggtcgattgtcttcataaaaagctcagtatgacgaagggaaaggcctagaatgattgagcgagtgaacacgtttatttgcaattgacatcattcgataaaatagacaagatgaagaaaagaaacttgatggaaaggagaaacgaaaagaaaacatgatagagaatagatgtatgcctctccctcccagacgtcttcacactaaatcggacgccttttataaagtttgttattttaacgggagtgataggaagagaagcaagaaaatgctttagggttacgttttgaccgccggtgatcatgggtttaagcaaacgactctcccgaaggaaaggtgctaggtaagaccaaggcggcttcgaacgtcccagaaatagatttatgaggagagataggaaggtagaaaacacataagaggatgaatacaagactaaaggttagaaatacggtttcaattgaacgtcagctttgccatctaggtagccatacggttgaggtgatgatatcgttgaagagagcaaggcaaagactcaatcgacagaaaaaataagaagcctagttgagactcggcgtgacacgtgagcgtgacgagtgtgtggttacaatagagtttacatcggttccgtaatcatcatcggcacgatgtcggcccgatcaaattaccacgcgtggtgtgcaccgcgccaagaccgcgcatccgatgaacatcctgaatatcggagagaaccatgaggatcttatccaacagtcatgtgtactcacactcatctttgccggatcagaactgacctagcaggtatcagaggctgatgagacactgatagggtattaatgtgtaatcttagatttccaattttccttgacttctgtgatccttggttatcttacccgtcccctccgatggttaatatctcttcgttctataaactcacgttcccaaataaactaacccgactcctatctccatcccatacagtatcctgaatcaaaagaaagatcacgttgaacggaatgctagcacctgcagtcatcgccaatattgccttgcttctggcaaacatcactccttctttcgtctctgcttctcctatcggatcacttttagacggtcaagcattgattgaagctcggaaactccggatcgggcagcgagaccagccggacgaaggggaatggaatgtcaagaatcatctcgttagtcttgccgcccttctcgtgatgatgtcttcgttctttggctgacatatcgatcctcgtttgatcagggaaatctctcgccctatttttcagccccttctaatgggtataccactgagcttccagcaggatgtgttgtcgaccagtaagatccgatatctcctatatctcaagatgatccaatgggtctggctgttgttgatggctttggcgtgtctctagagttcagcttatgcacaggcatggatcccgattcccacttcctaccgagcttccatacattgaggccgtattcgaactcttgcatgagcatcatgatctactggccaatgtgtcggaaccgtttcaatttctaaaaagtatgtctcgattctgttcgttaatacatcctgtgcatttatgttgtctttgccgttgaatacctcaaaacacgtgggcttgtgtcatgtagcttggaaaccgaccttgggagaggacaacctgaccccaatgggtagacaggaactcttcaatcatggagttgaattcaacttaacttaccctcagttctcaacctccctccttctatctagccctcaagatcgagtgttcgttcttaaactctctaattcaacgatgtcttcttccttcttcatggtctgacaagaaaggtcgtttcgttcttcgtttcctgcctaaaaaaacagtctcgagagcgccaagtggtttcagatgggatacaacggtaggaactacgccaaccagtcaaaaatcgttcctctcacctccaccgttgccccaatctcttggattaggccttctgatacttgttcgttatggaaatatgactatggttcgtctttactctctccgtctcctcatccgtatactttgtagctaaatgaaaataagaatggctggcgtaatccacaggtctcactgcggtgaacgattggaatgcaatctacctccctccgattgtttctaggatcaacgatgacctgccaggtttcaactttactgttcgttttcctctctccctcctcttttcgattggcattccttttctgatttaaaccgtcaccttatcaactctaatgatcaggctgatagcattcatggaatgctctacgcgtgcgcttatgagacagcagctgttggtcatactccttggtgtgcagtgtttgaatccgaagaaattctagatttcgaatacgagttggacctcttgatgaactatgcttttgttcgtcttttctcccttggtttctgtgatcgaacatctctgttgatgggtatgaacaatctggaaatcttaaacagggctacggacttcctcaagagttaggcccaatccttggatctgtttatgtgaacaaactgattgagcggttaacaaacgctaccggaaacgcaacggatctataccttgagtttggacatgatactacgatcgatttagctttgactgctttgggcttggcaaagcgagttattttctgactttccttgcagttcttcgttgtttgtccttcttctaacacgtgtgtctttatattgactgcatccaataatgacgttgcagagatacaccaaacatctccgcgagcgaaagaggagcgccaaacgcgactcgacgatggatgacctcacaacaagtcccttttgccgccaagatggtccgttttatctctataatcttttgttcccaagtaaacactgatatactggaaggtttgtttctcgcatatggcgggaaaaatcgatagatcactgaacggatctcatgcacttcgtcaaacaccacaaacaccgatacttggattagatttttgttaaatgatgctccgtttccaatcttgacatgtggagacaagatgaattcgtctaccggagcttgtcctctggatgtctttgtacgcccatcctttctttctacctcactttgtctatgctctactaatcgcaaatttatggggaaactggaaggtggaagtcaacgcgccttctttggcggtcaacaagacaattttcgacacggtctgcaacaacataaggaccacataagaatggaatgtatcgatatgttctcgatttcttacaacctttcaaattcatggttcgaaagccctcctcgttttcttgacctttcgtgcggcgcgttgtataattgtgtcacttgctttctttcttcttcattgcaaaaatggataaccaagatgtcacatacatatatattttatactttattttcgttttcgtccaacgtgagtatgaatgtatgtcaagttatagcagacaactacgagtgggaatgggagggcaaagacaaggatcgtcatcgagcaaagtatgctccgtggagtgtgtggccagaggacgaggtcgtggatctcgactcaggctgtcgtacgcttctctcgacgaccgcaggagggctaggcatgtctcctgacaacggcgatctggccgagcacggcacgcagtggttgctctctcgtgattcatggaagcactttgcgtgaatgggctgagacgctcggaaacagcggctgtggatgaagaaccgtacggaagtatcaaccgctgtccgtggtaagtgccgctcacgctcaagctgactgtacaaacagccttactgaccttgcaaactgccttgcccatttcggtgtctttcttcggcttctttcttcggcgtctttctctagattttccttcgtccagatctaccagtctcgatcatctccgcgctgctcccgtctcgcactctcagtcctactcctgactcgcgaccttcttcgccgctcgacggtggagacgtcttcgctggggcgcacacatcagccgcgagcaatcataccacaaggtggcgctctgtctgtcagcaggacgtccacgcaccttcctgaccttcggcgatgccgccttctcgtagtcttttcgtgagcttgctcctggtcctgtcaagatgctgattgtcaagctgagggcctctccattgctctagattcgcaaagtttgggactgtcggacgtcgagggcgtgctccaagtgccatggcgagttttctggaaggggcaaagcgtgggcaatcaaggagtgtagaagcgtctatctagtgggtcagatttgttacatatttgttgtgtgcctgtcttgtgtctcatgatagtgtctcgagtgttgatcgcattctctgtcttctcttctatctatgcttgctctcagactttgtagaacagagatgtgaacacatcgcgcaacatactgcacctagccctgcatcaggagaagaacgaaggggcgagaatgctagggtttgacgctgtttcactgaggctgacgctgagactggcacaaactaaacccatgacccatgggatcttggtggttcgtgatctgagggcacccaagtccaaaagggccaggtatcgaccaccaccgattgcggttgctttctaatagccaaggccatataactagtctgtatagcagacaacgataagaaacacttaaacatggtaagactgagcttggtgatcagatatctgtttcagtaatctttccgcttcgtctctctccatcacgttctgatgcgtttgtgtttgagcgtcaagagggtcgaaacgagaagaatataagttagaatcaagatggaaagaagtaacagaaaggaaagaagaaggataggaataaagaattcttacatgaatgatgatattctccaagtatctcgcagctagcccccaattgccctccctccttccttcttcgtctgacccctcttgtacgccctcttcctttctttcgatgccagccagctcatacttcgccaagaacaaccaactctggaccagtacacctacacttgcacttcttcttcttcctacttcttcgccagcttctccttcctcttcaccttctgcgataccgtaagctaagagtcgtcggtgaactttggctgcttcgtccagatggccaagggacacatggaggttggacagggtgagaagggtgttggggatggagatagcagggtcgtttcctagaagagcgcgttcatgacattgaatggcttccttcggactgagttgtttccaagccagggttagaaaacatcaggaaacgaattcaataaagaaagcgcggagaaaagggatctaccgattcgtattctcatatacttgagcaagcgccgtccacattctgggatcgtatggtctgtttgatattcaagcgaaaaaggtcaagcactgacgttaccaaaagaacaaaagagcgacaaaatagatagagatgatcataccgaagagcggtggccttgttgtaatactgaatagcatattgaggcatgtctagtaattcgtatgtttgacctagaccataccatgccctataatctctcgggttgacgtctacgattaacatcatatcagtttacgtcatcaggacacgaagcatgtcgagttgaaacatatgagaacaacctaccaacagctcgtcgataagcttcgatagcagcatgactgttcttcatctctacgaattcatgacccatcagcgtccatgcaggtagataatctctattcagttgtagagaccgtttaaagtattgaatcgcctttggtctgtcgcctcttgaggaatagaagttccctatatattatcaagccagttcaacgtcagatatagtcattcctgagattaagaaaaataacaagtcgaaaatattagagttaaggagactttacctatcagacaacaagtctctgcccggtttcgatcgacggaagcatacgtctttgcaagctgggcaagtttggtgagctttggaatgacgtatagcatgtttgaatagatatcaatatcgtccaatctaaatgggtcaagggcttgcatattgtcgaatgtcctttctgcgctttcaaaatctgtcattgtcccgcggacgagcgacagaaaaaaaagtaagttcagttgtgaatctctgaggattatatgagaagatacaaacacatgaacataacaaacctctcaactgataggcaaccatccctctcatgctctctccccaaacccaaacttttttattccttcgcccttcgtctgtaagtccgattgagaacacgtcctgctcaagctgatccagagcgtgaccaacaagttcggtcgcgcaatgaagctcgattcgagtgtgtatttcaagaaggtcgaaaaatgggtgaggttgttgttcgttgagaatttgaatgatttgatccagctaagtccgtccattcaacataattgagacataatagaggaaaggctcaatcgtgtgctgaagataggttgaatcactgaggaatacaatggaccaactcacgttctcttcagaatctatgcaacgtgcgagactcagacagcaagaccaattgaacgggtatcgtttcaaactttcgataaaccactcggctgcttcgattcgtctatgaatccggaacagaattagccctttactgtttgacgcacagcgcaattagatgattgagaggtaaggtaagtcaggtaaggccaaggaagacgatgccggcgcacgatggaaatagaatcttgacggacagatatatcaagaatggatcatctgcgtctttcagctcgtctagtatgggctggaatgaaggagctagtcgatgtctatcatcttctggcgctgtgattcaagaaaatagaagcgaaaacgtataagggcatctttcggagggtgtcgcttccgctaagtagagggtacgatctaactcataacggtgggcaggccctcttgtagtcttttgtctgcgctctggaatcgagagtaaaattctataagatcagcatcatttgaattactagtactcaagaccgaaacgaagtatgtgcacgcacaaggtaggtcgcgtacaatctaagaaattcactcttcgcgctccttgctcctgcaagtacaaatgcgcatcgatccaactccttggcttcaaaataacaatgagccaactcaaagatgtcttcttctctcggatctgcaaaggtgcctttattgagactaccaagttcggtaggtcgttcgtgcggagggaagagcccgaagtccacatcgccatcgccatcgaacgcgcctccaacagaagtaggaatgaattcgctgggactcaacaccgacaacgaagttctgcctctaattccttttctagaatctgaaaccgttggacgagagggcgtcgatgtagaaaatactggtaaggccgaagcaagggaggatgaagaagcgattgggttcgcaggtagtcggagtctgtgcgcaagcggaatggcgttgagttgttcggcagagaacttggaggcttgagtgagaccacgttgacgtagctcagagattgactggcgaagctgggtgcagaaattgtggtccatttttccaagtaaatgttcaagtttgatcaggaaacgtttgaacgatattgatattgatctgtttgtcaggaggttcggctgagtgcgatgaagacgggagagatcgtgataaagatgcctgatgagaatttccttgggctgaagcaattgaacagccttgatctcgagagaagatgatactatcaaagctctcagcaggtggtgagtgagagtttgtgagtgaggtgaagatgtttcgatgttgttgacctgatggttgtgtgctatgttgggttcaactgcttttgatgtagattacaaaaccttatagtacttttccatgtaagtaatagggaggattgtagttcagggattacaccgctttgtggcgttacaacaatttgaaccttccttcttcctcatcatcaccaccaaagacagacgacagagaacaacctacacccaccctcgctcttccaccctatctcgtcttactttcctccgacttccacagatgcgtcagttaaagttccacgagaaaaaacttctcaagaaggttgacttcttgaatgtacgttgaatatgtctctccttctctacccttgtattctccgcctgtcctcggctgatttcagttggtcactttgtcttgatgtcaatttatgctctctcgtagtacaagcaagatgcaagtcttcgagaggtcaaagtgatgcgtaggtatcatatccaggagcgagaagactaccacaagtgcgtccctctcaacattcttactttcgttttgttttgtagacctgactgacgccttagctttgcttgctctttcaatcctaggtacaacaagctggccggtcttcttcgtgcattggcccacaaagtttcacaactgcccgctgcggatccatttcgagcaaagatggaagccgaccttctttccaagtgctacgaccttggtcttctcaacttggagaacaaattgtcagatgtcgagaacaaggtgacggtctctgggttctgtagacggagacttgcggtcgtggcttgtagactgaagatggcagaaaccgttggaactgttcgttcttctcattcttccttcgatatttggattcttcgtgtgcctgttgattgactcatttgctcgatcgccataggctgtcaagtacatcgagcagggtcacattcgagttggacctaatacagtcaccgacccggcctacatggtcaccagaaacatggaggacttcatcacctgggtggattcgagcaagatcaagcgaacagtcatgacctacaacgatgaggtacgcttctcacgatcctttcctcttttctcctgctttctgggaatcatacttatcatgctgttcatcattacaccttttagttggacgattttgacctgctatagaaagaacactcttcatttctatggttcgcatgctccgtttccggaccctgtttcattttcctcattgccctggtaccattttggctcttattcctgcttgactctcctcgttgccttcttttcgtcttgttgtactatcattcctcaaccctcatacatacactcccttatacgttctttcgcgtgcttccttcttagagaataaagacacagtgggaacgatatcacaaaatgataaattatcagtcaatcgaaatcattttttgaacgggatgatgaaatacggcggacagccaagcaaaagaataagaaggtaaagataatctctgttgccagagatattgattaaacgactggagacctatccgagactcgagtggacccctcttctaaatgtccttcttctcccttacaccaaaaggctttgaatcgaccagaactcgtcctttgaatccccagagatcgccacctcttccttttctgacggaccggaaaccggggccttcccatgacaagatctctcctggcgggttcagtctgggccagtttacgtagctgttgaatagcaaggcgctcagagtcagaagtcatgacgagccaaggcaggaaagtaaagggaaaggacaggaaagaacaagaaagaggactgaactgaattccattagtaagcatatataacaaggcgaacgccgtgataggtagccattgagcgatgaacaaactgattggcgcctctgtttgtcgtcatcgatggaacaagaaaatcgataggaagaagtgttagatttatcgagaagaacagatgaaacggagatatcgcgagatgaagaacaaaaaaacgaactggaatatcgaggaaggaagacagcagagagtaacatcaaaagtccaaagaaaaatatgtagggcatctgataagagtacagcacaacaaactcacactgttagcatatatatctctcaacatgaaggtagaatctaattaaatacatacaacacgctcggtcaaggaccgatcctcctgaaccaagtggttcagtaaagacttgttctcttcatttcgagcatcaaatgaccctgtaagaaggtcatatgcgtccttgaggaggcagtcccagagacaataaattcaatttagtcaacccttcactcttgaaaatccaaccttgtagtaatccttcgactagcgatcgaagggaacaagagggaaacatacttgtcggtttccatcgaagaagttgttgaacacatatcgttttacagaattaacaccatcctgcaaagcgcccgctttcgtcctctttcccgtcctggtgaagtcagttttgagcgcgcctgtgcctgaatatggctcggaaatcgtgtctgcgtggtcagcccagactgtcgcattccatgaaccgaatatcaagaagagaggttagagacaacatcagaaggacaagaagaaaagcggtttgtttctcaaagccattgtgaatgagatcagaggcagaggaaaaacacggaccatttcggaagaggaacatgaaatcctcgtagtcctcaatcgactgtgcagaaggaagcacgcccgctagtcgtagttgttctgttaacgcatgtttggccagagcggattgtacgacattcgtcctgtcgagcgagtccatacctttaagttgaatttttaaatagattgaaaagtaccatcaaacgtgagttgaaacccacaagactaggaaaaaacatcgaggacgcacagttggttcgaacaatggacttttgaacagatactgggttggtaggactttgtttggcagacagttggaagaatctatgatccaaagtaaaagtttgatcgattcgtcaatatctcaagatagtgtaaaaaagggatgcctaagagcagacaaatcaacccagcgcttacccttgctctttcagtggctgttttaatcggtcaaccaagccctgcactcgatcaaatcgcatgcctttgcattcagtatggaaatcaaagtattcgtaatgagctttttggttacccaaacgttccatcgcatgctcaaaagcctccttgactggtttctcgtagcccttttgattgacaagattgatgagatatacatctccatacatctccacttgatcatcaatatgggccttcagcgcagcggcctatcatatttgagtcaatcattgatgaaaagaacatcagcgctcagccacagaggccaaagctcgaaagagaaaaagagatacaacgaacagtttctggtttatccatcacctgcaaatcaggttgatatctcaaagtattgacctgcgcccagaagaccggaacacttcctctagtctggacataactaaacagttggaactcatccccttttccttcacccatcacaacgatttgttcagtctcgtttgagttggcggcgtggccttccggactgattcctcgggtaaagtacctggtccctgctctatatcgagatcgacgagagatgagtacgaagtcgaatggcttgttgttaacccgagcagatttaaccacgacggctaaagaatttctcatcaacgcaacgagtcagttacatataggacatgacgtgaaattcagatgcaagagcgctcacttccaaaaattaccggcaggatgaatcggccaaggtttgcgtccgggtgtttgatgaagtccttcatcatggccttgttccagaagaacctctcttcagtactctcccaaaaagcgtgctctcctttccctccttgatgttcttttctaaatgttctttctacagtgtttgtaagatctcgctcgtaactgaaccagagccggcctcgacaagcagcaaggccggtctcaatcaaggaatagaggtatctatctctagggtcggataaatcatgtggagtcaaagggaggatctcgaacgattgggcgttatagatttgagcagaaagcaaggtctgaggttcggacacgctagaaaccacaatcaacacgtcgactgtatatgattaagaggattatgatatcaggtctcgggactcgcagagggactggaagtgagacgaaccagtagccaagctgatttttcctaggattccatagattggcttgcccgggccgagatctttcagaaaattctctacactgtctgctcagtcaaaacgttcattcattcatttgtccgaaacgacgcggtagaggaaacaacacaatcagctctctccatccttgttttacgaatctacatgctaaaacagctcattgaacgaactgacttttgaagtacacatccccgtttcgccgacgaaagtgtagttgttcgcatccaacttctggggaggttgctttcgtggcttggatgatctataatgtgatggagttttcaacgttcgaatgaccatcaggtccgatcaagatgacgcgtctcttcttcttataatcctgatgagaagaagcgatggtttgcaaaggataatgagaacgaaacttacaaagtaatctgtcgtcttgaatagctcaagagactgatgaagactggtagagaacgacatgctgttgggcaggtcaacagaaaggaagcggatggtggttaacggcacctttgctccgttaacacaattgtcgcttgagactgataacctgtccctgttgttctgctctgaatattgatgtctggatgcttttccctcgtcctctatccctccttttctcttagtttcgtgagtgcttatcgttctatctgtgttcataaggactagaaactctagactatttcatgtataacaagaccctgtaaaaagaagtgatgtgcccctcgccggtaccttccagaggataaaggctttcttctctaccggccgtatctatagcttatagggttgaatgaggaaacaaaccagatgaatgacacgaccattctctccatccatcattctaggctaaaaaagcttcgagggagatggaccaagataatgctctagaattttgtctatgtcgttcatcttccctaataaatacagaccgtgtggagagaagaagaaaaacttgaggaaacagatttgatgtctaaaggatcctgaatacgcctcataagcaggggagctctaagcagatgaagcacctagcaggatccctaggcttcatctgataatgatgatggttgccatgggggagggaacgaacgttaatgtctaaggaatgaagacagtgctcaccgctctcgtccgacacgtcatcaattgccagcaagtcttctcttccaagcctcgtttgcatttcctgagaaaatgttgccttgatcgcccactacccaccaatcactcattcactcttcaagtagaatctagctatttggatcctactcgctatccacctgctttcatcagatccttcaagatgaggcttgaaattcaagcccttattgttgccacaattgtcgccgtcgctcacgcaagtgccttctcaggctataccaaagtcccactcaaatctatacaaaccatgtaagtcttgaaattcttctgagttgatctggaccaaacaactccgaaacttattcggctcttattatgtatacggcattatcaaaatcaaagtaccctgtatcccgaccaaaagacaaatgctcgtcggactagtccgatcccacagctgacatgtgtgggttcagcttgtcgacagtacgaacaatacgtcgaggtggtacaatgttcaaacatgggaaatgatgggtcaggtaacatacagtggagatgtcagacagatttgccgagtcctttgaagctgggcagggtgagtttcgcaagagacctttgactactgattcatatcaagagatttcatttgattgttgactgactagtgatcaacgcttctaggtcgaagtctcttgcgaaggatggtctgggccagatgacactgaagtactacaaggatcttgtggcctaacttacacgcttgtcaagccttccggagatattgaccgggatccaaaaggttcccacaaatctcgtaaggactctttccatcaaattgtcacgatcagcgagatgataagtttgaactgatattgttattgtcttgatctgttaaaaataaatatctaggacttgactcattcctccagttcacgttcaatctgctctttttctctattctggcttttatcctatactcaattttaaactcttgtatgagagagcgccgagcttcttctgacggtccgggtagacctggaggaggaggtaactatcccggcttcaatggcggtggtggtcatggtggaggaggaggtggtggaggtaatgaccctcctccgccctacgatccaaatgccaagccttcttctggggccacacctactccagctccttccacctcacgcggtggtctgggtgggttctggacaggacttggactaggtggggcaggtgcgatgggtgcggcttatctcgctaatcagcgcagggagcgagagaggtactacagagagcaggatccaggttacggagggatcggaagaactgaccgatgggattcggatcgaggtgaatggacctcaaggtggggctgggatcgtcaacccgggcagcaccacccaggaagatcaaacggctctggcggctcaagcaatctgggagatgtaagaaccacctctggctttggtggtagctctgtgaggtgaaagtataggttctggacttgattcgtcacttgaattatatatgaattgtatcgtcttaacgtaagcttcgacgcgtcgtcgctcttgtttttcccttaggggatcagaaaacaacgaatcctctgatctaccttgaagtgaagccataacccattaaaaactgcactcggccgatcgagacttgctagtcaaacgatccattggattgtagttgagaatagaacactagtctgtgttgctctagatggatcgctcttcgccaacagacgaggattggcctcaggagggcacgttttgcacgctgaaattactgaaaaaggccgatgggacggaacttcaaagataccctgtggatggagaacggacgacatttggaaggtgaatatccctttccgactagtgatagacataggattccatacagagtaaactgacagcatggatgtgatctatttgttttatgaatggactgctatgatggctttgctgattctttcagagatccttctaatgatgttcgtcagcgttcctttgtctggctatcagttgaatagtagcgagaatatcctgactaatcttcttgttttcgacatcggcgacctttcaggtccgaatctactatcctgatatatcccgattccaatgtgaattggttttcgatgttgatcgcaaggtctggctctatatcctcttttgcccaacgcgtgacaactagatcagactgacgggtcgcttttaatcttggtgcttccgccagcccttcctcaaggtactcggaaagacaggcttgttaatcaacgggaaacaagtcaaaccacccgccgaggtagagttgaaagagggagacacgttcgagatgagaaagaagagatggctactctgcttaccttcggatggtactattcaagcgatgaagcaagttgaggttagagcattcttttctttatctgctttctttacatgtgtaataatatcgttcttcgacatgacgacaaattatgatctgaaaaaggtatcaactcctcgtcgtcgacgtccatccacccggttttctattattccacctgacttaaccttttcaccgtacgcggctcacgatgctgccgctcgactgcctgccagtcctataggctcgctaaaagggctagaaacgcagtcatctacgcaatctttaagaagaccagtgccagagagtctatcatcgcaagatggtgaagaggtaaatcaagagaatgatggacgaaatgacagttctgaagagagctccgaacaggaacaagtggaagacgaaaaatccgaggaggaagcgtcatcgtccaagtcaactgcaactaggattcgagagtccatctggatggtgagcttgactttttgattcctagaaacctggaataaacgcgtctcaaatgatctatattatctcgtatatctgtctaacgcacgccccaatgctttcgttatttctcgacatcagcctcgacggttctccaactctctgccgggtaacaacaaagatgctgataactcgcagacagccagttccatccttcagccatccttgtcagacacacagctggataccgttgctggtagcaagagaaaatcgagagctgaagaagaagaggaaaccgaagtagtttcccatcagcaagcgactccccgatccatccctctgcctgtgtcattagagactccgtatgcctcagcagacggtacacccattaggaaacctctgatgcacaagacaccatcatcgacagctggtcgaacgcctcattcgtctgctaaggctccttctaacaaccgatcgtcactctacccagctctgccccctgcgccaatcagctatcggacggctcaacatccaaccaacactccaatttcaacttcctccgttgaacaagtacctgacgaattccctccaagacatgactcaccaacttctatatcaacggaaatctctacgcctcagtcaccagaggttcactctgtccctcttccgtccatcggaggctcgtctgtcaaacagcttgtagctccttcgactcctggtgcggtcatgcaacaaaccccgaaaaacttgactgctacaaaaggacctaactcattgaggaaggctatcttgatgaggagtgctcggaaggtattgttcggtcagaaagaggaaccggtggtcgtcaaggatcagatgattgggaacgttaagattcgtaggcggtctagtactgggccaggcaaccaggtgaatgtctccttctctttctgtctcaagttcatcttgtagattggaaaaaacttcttgatgctgtgactgatctcgagcgagaggttcgattgtgttcattaaggatgtattcgatgatctaccagccgaacctgtatcctccatcttcgattttgagcccgattcagaatcatcagatgaggaggaagagacagatatcgataaggaaaatgagccgacagaggatgtaaatccggctgctgcacaagcattttctgttggactggaagatgaagagcactctgatagaatcgatgagagagactcagtagagtctcctgaagaggaatacgtagaagataatctacttgatgaagatgtgtccgatgaagattcatccgatgaagattcaagtgaaatcaaggtagactctatcctcagcgaatattgatacgtttgtataactggaagctgatcgccgcttcgctctcttcgttttcttcctactttgatgaaagccaatggataactacgctgatcaggaggtctcgatcggttcgattggcgaatcagaaagtgatgatgaggcgttcgaagaggtcgaaaagaatttgattgtagaactcagtagcgggagcgagagtgaggaagagcagaaacctgacctaaggtcattcaagatcaagaaggaagaaacgagcctagatgatattttgcctccgggaccttccactccgactattttgagaacgcctcaggttggtctaatcttgtgaagtatataaaaaaaggttttccgtagcctgatattgacatatgacacgaatttgtacaggccgctcgaccaattcaaacgagattttacacaccgcaagccgtctcatccgcggatttcaaggtcaacttgtcaagaaacttgggtccacctgttcaggttccagcctctgcttccaagcccagaagtttgaacgcactttccaaggtttggaaagaagaggcagggcgaagaagtagtctgggaccgcctcttcgagtccaacgggtaaggaccgtggaagaagatgtagatgaggagaccaaggatgagcaggaagctttgagaaaggtcggtcgccggccctcctgctattgtctatcttgagtaataatcggtatctgacttctgttcacactatctacgggcttgatgtcttactaaacgaaaggctgccgctaaacgacgagaatctgcaattattcttgcctctgctcctcgacagctacctaagatttcggagtttgacatgaaagacttgcaatcccctcggaagaagcccttggggactcctctagccatcccagagttgaatgattcatcttcagatgaagaacggacacctcttcagcttcttgccaagaaggctgaaaagctaaagaggaaaagcatggctcgacataccttgttgggcgcgactcctttttctccgtccgctccaggtacccccttgagagcttccacattgttgacctccacgccaaagagcattctcaatcagtcctctgtgcctctccttgggtcgcccaatcttcagccttcacgtctctctgcccgtccagagccgcctactccaaatatgggcggcctgcgacatctgttcagcacttcttctgctgttccttctacccctcggttcggtggaatgagatctctctttagggaacctatcgcagaatctccgtcaacatcttactcagaaggcgttgaatcgatattccaattgtccgaagagacgggatcactcttttcggaattaccttctgtggtgaggccccttgcgtctagggacgagcttctgtctctaacggaggagcctttgggtcaggaaacggctgtagagaaccctgacgaaagtctgttaattgttttagaagactcgttgcttgatctcgagcaagcagcggacttcaacatctctggtgcggtgactgatcataaggaaattcatggagatgatgctgaaaatgacaagactcaggggaagcttcaagacaaacgcgatcaaatcgtgggtcaagattccacggaacacttgatcgatgtccgatctactactacttcatcttcgaattcggtctcaatcacaacgggcattgaggttgtcgacgagcacaagagtgggtcaacaatcacgaatttgcctagaccgaagactcgtcagacttccgcgcggtccaccacgaccgctgcttccgaatccgagtctttggtcgactcgagtcgtcctgacgtttcttcacctattgctcctccttcgccgcctcggacccgtcgagcgacatcgagagcagcaagcgagcagcctgcaacaacaacatctacttctctcacttcttcctcagtctcggtcagtaggcttcctgctcgtcgaacgacccgagctgcttcggtcacaccatctgtctcgtcagcccaggctcccgtgaaaccgaccagatcggctggtatggttaggaaaggaatgacgcctgtattgactctagcgtcccaggaacagattgattctaaagcgataggatctaaaacgagaagcggtcgagtgcctgtatcttccacgaccgggaacatggggtcgagggttgtatcagttaaaacagagccgattgaattagaaacgttggaagaggatgaggatattctggagattgaaactccacccgctccatcttctcgagctagaagcacaaagatgaaagcggcaacaacggcggcgaagggaaagaatcctgttagaccgggtgtggcggcgttggagttaagaccgaatcgagaagatgactcttccttaccggtaatcaaaaagcgacgaacgaccacaaattcttctatcgaggatgacaaggttggctctgcttttttttttctttttttcttttttaacgattgtgacctcgttcttaagctatatattttgtctttcattaccttaggagaatgaaacggccaagccttcaaaccgactgctggataactcatcggacgtgatcgctattgctaaatcggccctggtatcaaaattagttcctccgaaacctgtaggacgaacgacgagagccagaacggcgacggctgagccagaggagcaagtttcagaaaaagccacggctgcaaggacaaacacgaggacaaagaagtagcctttttgccctatcaggtctttccctttatgttttcatatttattcttctgatcaaggcatcttgtttcgagcgttgaatatgcttctatatttctttccagattccatctgtatcttattccctttcgattttttgtcattctgtaatcgttgctcttgatctttctcgttatctcccagtctacatatacccaagttattacttcttgaccgaatttcctatctgattcgatttattcaccattaccgcgtctactacctacttgctctcggtgtcttgttgagtgtgatcgtgtgcttcttgtgtctctttaagcgcgcttcaaggagctagggttctgttctttggctaattgattgttctctgatatttgcatctcctggagtcgtgatcattcgtttcaaaaactgtttcttttgctcaggcttatatcgttcatgctgactcttcagtttgatactgaagttagtaacaaggaaacgcaagcgagcaatcttcttcttggtgagcgcggacaacatttagaaatccgaaaagacacgaagcgatcgcccaggctgtgtccattcggaatgaaatctatttgactaattaaatcgcaagacgcccactcatcgaccgacttgttcatccaaccatcatccaacgttcgcttgtacatctcacagaacaccaacatgtctgcctctcgtgaattcgttgaagcgactgccaaggtaggtaattgatcgcgtggtcgtatatcctcgggcctatgtcctctgtcatctctttgctgatgtcgtgctttttttttcttcgtcctctcctggccatcgcagtttcctccctcgaatccttttgccttaggttcgctcatttactcgaccatatcgctcttgaagcgtctctggttattttactgagctttcttcagactgacctttttgattttgttttctcgcggcatgatcagtcaagaatggacagcaaaaccctctccacatcactcttcagaacggacctgaggacatcacgctcgtctcagcctctgctagtttccatgatcctgaaaagcactggaagctcatccgaaacgtaagaacgtgatcttatatccgtcagttcagttcttctcgagagttgcaactgacgaacaggcgctttgatcttgctctgagcagacctcggatcacaagttctcgactcccgttcttggcaactcgaacctgacgtgagttaacaatttcttttcgagggattttaaaggaatggctcaggaaggacaaaggctgctatgatgaggtgaagttcataaaaagcataaaaaacttacatcattattgttggtgttcacgcgttcatttctagtttcccttactctttctattccgagtaagtcattctgtctcttctgactgttttcagcctagttgatcggcaggagcctatttgcttctctccctattgatcaggttcaagccccgagatgttggccttacggtctttgtcgaccttttggatgcctcgaaacagcccttccgggtcatcgctttcaactcgaccgtctctgttcgttcaacttcttcttcgtctcaaatcatgccttcacgctcttaatcaatctctcccaactcataacttgatgaatgaatttcataggttgtcgagcccccatcatcgttctttgatccctcccttcttttcctatacatcatcctcgttgggtttgccgctttcattggaaactggatctacaagacttttgttgcacctattcgaggaaagaaatcctctggatcagctggaactgggaagaaagcgaaggtcgtgcctgctgcggcgggaaagagctacccagagagcgtcaagccttacgaggttcgttcttgatccctctctacctcgctcccttgcttattgcagaatgtcatcacctattccttctgctgacttgagttcctcgccttcattttcgtctgaaacaggaggagtggatcccagccggtcacctcaacctcaagaagcgtaacaccggtaataagctttcagctgtaagcagcggtgacgaaggcttcaccagcggtggtgccggtacgtccggtggagagtcgaagtctggaaagtcaaaaggtggaaaagccaaggctgggaagggaaagagggcctgaagtcggtctgaaattgagaccttaacagagaatcagaatcagcgggatgagtcagaggtgacgaaaggaattgtttctgtcacaactgttgtatgatcgttcgtcacgatgttggccttgagacgaagtgaaaatcgttcatctcgaagctgtcagatatacttctttttgttcatacatgtacatacatagatcgattagaacataaaatccccaagggttctagagaaaaaagacatagaagacgagagtcgaagagtcaaggaggacccgttatccaatcgcacgcctacccagatgatcatagagattttgagcggaaaaaccaagtgagcaaagcctgagtcgactcaaactccatgacttttgcttcgtattgagccgtgttcgggctgagaggtggaactggtgagagagatacctgagatgattcgaaggtagtgatgggacgacgattcgagtcgaggtagtaggcatcacttgggtctagtggtatatcgcttgattatagaacggcgttgacggaaagaaggagaaacatcaaaaaggcaagaggtgagatgacttgacttctattagcagattctatagacggaacgaacgagatggcaatatccctctcaatttcttcagcattcggtatatctcgacgtaggagattgtacatggctattcttgagtcagccgtgacaactgggtactcatccgtgtataggattttctaaagaattgaaaggaaccccagttttttctatcagtgtctagacaaaaagggggaagagcgaagagcagaaggtccgagtgaactctataaaagactcacctggtcgcggagcgcctcaacaaggaatggagatggctgtttcgggaaattaagtcgaccacatgaatagccgactcatcagacttgaactcctgaagagaaagtgaatagaggacataccacacatgcagacttggatcgatacccttgccttgatctactatgcgtcaggaactgttccccaagaatattcaagtcgagtcagagatcgacggatgtgaaagctatgaatctgtatgaaacaacttgcttacgagcaacgcttgggctcgagttgcagcttccaaagccgtgaaaaggagggacaaatgagctacgtgatagtctgctcacaagtaacatactaaacgatgcagaaaccccacttaccaacaaaaaaaactcgtctgaacgattaaccaacaattcaatcaacaccaaatacacagttcgacatctattgaagaagtcaaagagcgcgataaactactactgacctttcttcttctgtgtctttctggtccacatgttttactggaaagaatccgtgttcgactatcgaacacgtcaacatcatacccaagtatactttctgttagtcgtctttccttgtcatgtaacatgtctgtcatttcaatctgatagacaggttgagggaaactgttatttgaaacaactgaccagcagggatgaatacgaccggccactctaatcctttcgctctatgaactgtagagatcacgacctccttaagaatcaaagaccgataaagaggcatctggtcagtttcaagacgaatcgcgtgggatactcagcaatatacatacgggaacctgctctccaacaccttcttcaatctcaccagggaaagtcttgagcaagaagcgtgtcaacgagtctgaacatgccgtctgggcattctgcttcaaggctctcatctctttcttggaaagctgaaatttagtggcgaaatctttaagctccacaatgttcttccagctcaacacttgatctggactactatcccagatgagctccggacgaatcacggcgacaacatagtcgatcaactggctgatcgtcgcccccttcaatggacaaaacagagaaagaagaatgaagcaagacaatctattagctgcatggacatagacacacactctccgggggaatgctacatcaacaggtggtctacggacttcgtaggcgaatttccggatcttatccaggtcatgaagaaacgaggttacaagacttcgttctaacccggtcagttcgagtctcggaccccgaagatacgtcattgacggaactccgtacttctctgcgatgtgaacaatctttttggtcgtctgtgtgtttgatatcataccaatatcatgagagggagagggagacatagttagccccaagacagagtgaaaaaggaagggtctaccatcgggagaaagaatgaagagacccacaagaggttcagaacttgatgcaatcacatcaaacacatgttggaaagcagactgaagctccaagacattcggcgttagcactattatctaactcatcatatagagaaggcgacaaaatagaaagctcttccatacctccacagtctcatcgtctattaaacgcaggtacgcgatgatcgcccgaatctgcggtctgtagtagtacttgtcgagtgagacgtaaggaatccgataagcttcgattacaaaagcaagatgaagagcgacgaaaaccaagaacattgacacaccctttggtcgttcaatatccgacagggaacgttcagctcttttagagcttgctcgatcgctcttgactgggcgttatatcgcactgttcatgcccaaagactgtttcaacgacgggtaagaaaagagaaacccgttcgagaaggtactgactaagaatagcaaagtcactgtactctaggccataagcgatcttaagcctgacaatctcctttgcaaagaagtgggtttcgtcatcagtccgatcaaaacactttgtaaacacaagtttccctcgagggtttgccgtccacagatctaccgatccagccgaaagagagaagggggcatagaagcaaccattgtgtcagatgggaaacaagtatcttgaaccaactacgaagaacatacgtttgtcaattctgtgaatgtctttgagacaaaacaggatcaggccgaaggtttgtaaggcgttcagtaatgatacgagatcaagatgcatcagcataggagcgcgcatgataagtatatagattctactgaccttgagagataattccatcagaggctgccacgatatggccggtcgaacggtaattctcttccaacaaaactcgggagcaatccggaagatctcggtacatgttttccatgttctctttgacagcctagagattatgatttttcgccccgcgcagagggtaacagcagagaacggaagaagagtacatctcgtcaggtgtccggattacccgagaccaatacaaaaatcgattggggaaaaaattaataaatatctcaccgatcgccagccataaatactttgatcagggtctccaacgacggtcatcgttcgttttgaatccgtgaactgtctataggaccaccgtcaagtaagaaaatcagtgttggtacaaaatgctaggaaaaataacaaaagtcaatgttacttacttagcgagcttgtactggatggaatttgtatccttttggatgttgattggaacccacaacagaaaaaaaaatcaatctagggagatacacaagaaggatcagaagtttgtacctgaaattcatcaatgaagatatgcttgatattgcgtgttactgcgagaaaatatgattcatgagaacccacaccgagcaagccgcaagggaatgtcagtgtcgtatttgagtacgcttttaagatattaaattaacaaaacaatcgaggacaaacactcgggatgcctttcgaaaagctagcacgagtccaaatagtagagagacggatgaatttcggttcgatctctcgacaaagcatgacaagatgcaagatggacgtgcttacgtcgaccgcatagaccaatagatcatcaaagtccagctgaccccttcttctcagctctttttgatattcaagatatagctgcagacagaaaacagacatcatagattacatgagtcaggcaaaatacttttttcccccaatattgagctcgacgtgccgatggtcgagcaggaaggtgaaagtgtctgaacataccaactctataacgctatccaatttgggttctcgctccgacatcttgatggcgctaaccatagcgagagtaggcccggggaatggaactgatttctccatcttcatgatttttgatgtatttctccgaatcagattactcatcaggccaaacgcaacttcttcatcaatcacttggaatgttggaggaagtccagcctctagatgatattttcgaagatatctgaggcatactgagtgaaacgtccctataggattgttgaaatactctctcttttgtcagctgaatgtctgtcatgttctggctcagactatggggaaagagaatcgaaacgaaccaacgacaagtttagaagcgacatcgcctcccaacatcgtgtgcaacctgatttgcatttctgcggcagctcgcttggtgaacgtgacggcacaaatactctctggtttgaagccgtggtgtttgatcagatgaatgatccgggaggttagcaccctggtctttcccgttcccggaccggccagaatctggagaggatatgcgggagacgtgattacagctgaagatgagcagaggcgttttgagaaaaatgagcattgtgttttccaggcgtcatgattctcgatcggctcgtccgtctaatcatcagtaagatagagggaacaagagtagtttcgcttcttagagaagatatagcgaaccttgagtttgagccgcattaagggattcgagatgtatcgttcggatcgatggtctcaaagacaacataggagaacccctcactcgaaagattgacagagagcccctcctaggggctatcctgttgattgagcgtagcatgggatctaccgatcgatgtctgtagcaatgagagaatagataacggacgagcagaagagagggaacgaggacgcgtcgtgagataaattaccgttacgtaagcgtgcagggctggttttgttcctttaagcattagaaatatttcggatatcttcttagtctttttgctcgcggactagtttatagttttaaaagcagtaagaccaattttttttcttatttagaaacccacgcagggcctaacgatgagggctgccaagaacacggcagacaaaaagacaaaagaacacaaagacgaagcagctcaaagacagttttatcaatcacaagtctatcgttctacaatcacacttgaaggaagatgtatcggaaatgaaaagtatggtactgattcgtatttcttttcatgagagtattcaagactgtattgtacaaagaacactttcattagtcaaacgctcaggcgtcttgtctgggtcgactaaaacaagaaacgtctggcaatgcgctgctgtgcatcgatcattcgcacggatgccacactagccgctggacctctttcgagatggcagccgtagcgatcacgagctgcggacaattgctgcgcggattcgacgggcggtcaatctagtttgctcttctcagcagggccgcgagagacccgcgagagctctgagaccggcaggtgaaaccttcttgaacggctttcggcgaatgaattttcgggcgcagtcgcgttggcccagctgtctcggtcattcgtagaatccttgggtattcgcttcgcctccctctcgtcgttcctcacacggacagactctggcccgtgagtcgagttccggaacatataagatggggatctccccgggaggcacgagcaccggcggaataaaagttccgaaccttactcctctcctttttacatcattttatcttataccttctcattctatatcatcaattcaattttacccttggcccactcgctcattcacctactcaagtcattctttccatagattgctttcttcacccttccattcttccttcttctatttgactggctttctttgaagacgcgagtaggatactcaagacaagcactttcgcatactcaggatggctatacctgactccacttcaaactctagggctagtggccttatggattccacaacggcggtatcctcagacacaactccggttgtctcccagacaaagacgctgctcccaccgagttacctcagacggattccggtcccatccttatccccctcgctcgacaatatgtctgctctagcaactcagtctcattcagatacatatccggacatagacctcaataccctaggtcgtccggtctcctcactcgtccacactccttcggccgggtcccgaacgcccgcctccctctatgcagacttcattccgatgtcaaatccgatggcaggtcggtcgggaagcccttcttacgaccgtcaagcacaaactccttcacctgccttcatgtcttcgccaactatgtctcacaggctagccccggatgcgccgtcagatgaaatgcatccgacgtatccaccctctcccactttacaagattttgccgccttgaaatcgtcctctccgaatggagcgccgaacaagaagcttagtgggtttatttatcagaagaagatgcggtctggccaatctgacagcgcatcatctgaaagtattcagaatgcaggctctgctggcccattaaatcccgagtgagtctgatgctagatgtttctccaataatacatttgtcatgaaactgaaagatcgttgaacgtttcatacctccgtcgtccttcattcaagggacacatcgacgttgcttcggaacacatcgcaaaactcttatggtacaaatggtaagcttgaagcttttgtctaaattgctcctcctctcgctcaaatgaatagttttgcgttccgcaggcacccatcgggccacatcgacttcgagcaaatcgtccaaacaaaaacttccaaatgtcgaaccgttcacaaagtacaacattccctcagctacaaagctgatcgaggcgggcgaatgcgagatactgtcagagttgggagagagcgtgaagttttctgatattcttgctgaagaaaaaggctggaaaacggctgtgttcttcattcgtcatttctggtgtggacaggtgagattctctgaagcctgcgctctttttactgcgccctcggcctactcaccaatgtttctaaccttttcgctttacaaacgcacagtgccaaaactttatgtctaactcgatacttcagcttgatatcaacgttttgagaagaaatcggatcaaggtgatcatcatctccaacgggtatgttctcaaggttttttcgtgtctccttactcaaaatgtagacaattcctcatctaagtttgctctatttctttccgcttctcctcctcaagacactggcagattatcaaaaagtatcgacgtgagtcctatgacctctatgtttcgatgcctctaaggcatcttttgttctttctcaactaaatgaagcatgcgccttcgatgttaattcgctttctctctttcctcttgtttcattagatctcttccattgcccatttccaatctacgtcgacggaccccgaaagctgtataaccgcctgggaatgaccaaacttacgaatgatttcggtcccctcgcccaatcgaaacgaagcgcgtacaatagagacactgtgcccatccaactagccaaaggcatcggaaatggcttgttccgattaccacttcgtgacatgggtaaactcgttcaacttggaggagagttcgtgtttgacgacacaaaaacttgcacgttcgcgcatcggatgaccaacacctcggaccatatggaagctgtcgacctggtcgccgaggctggtgttgatcctgccgaattcacatgtctgcttacccctcgggcccgtcgggttgagcttccggcggccacttcatcgtcaggaggccaggccgatcgaccggaagagaaaccaaacatgaaactgacgctagacattcagtctggtggattcgcttccgagtttgaaaatgagcctggttggcaagatcgaagacaggacgagctttcgagaatcagagcaaaacgagaagaacgtagggctggtagactgagatctgccaaagcttggactgcaccggctgatattacccctggcgagttcgatcatgtccatatccctcgattaactcctacgccatcggagaagagtgcagcggacgagtttcaagcgggtgaaccagctcgacaggcagagttgatggctatcgccctggcgatagcagaagaagaggaggaggatgagaggatccgaaacgaggatttagaacgtgttcgggtatggtctgaggaagaacaagacgcctaccttggtcgagcgatcgtggtcgatgtgacctccgaagccggttccgaagggcagtcaggagagaagacgagggctaggttggatagcatgacgataggtagcgagatgggcagctcggttgacgggggatcaagttatcatcctgagactagatcggcgaggttcttgagcgttggcggggacagtttctccagtggcgcttattgatgatcgcaagtttctggcaaacgatcatcttcgctcttcttgccgctgctgtcaatttcttttctttctcatatcaaaactccgtcttctttcaatttagtctcgctctgttccgttcaacccttgtttgattctctttttatacctatttatccatctgtctacttagcttgttccacttccttcttgcttctgtaaactattgatcttgtgtttcttatttgccttatccgatttctctttctgagttcgcttttcgccttcttgtctttcttttctctgctctctcttcttgcaggccatgctatcctgtacattccctcctttctattaaaattctacaaggtttgaattcggaatggatcgtatacacacaaacattcccagtcgttctctctttctaatccccctcaacttattcatttttgaatattcaaactacaaatgtgaggaagactatgagaaacgtctattttattgacttcccgcggcccgccaccatctggaagaacagaagacaagattcgagagttatgtttcagcgctttcttcatagccgacgtcaaatctaaaacgatgatcccatggcaagcccgtccagagggcaaggttgttaaacgcaaaaagaatcaaacgtacctcacaactttctcatcaccacccgagacgaatctctttccagtcttgctcatatcggcctccagaactggtctccaagcaacaccccaaacttctgcgttttctccaaaagaacccaggcagccgcctttagaaccgccttggccgccagctcgggtatcccatagacggaccgtcttgtcggatgaaccggacagaagtctgttgtcgtgagtgcaggacagggagagaacccatgacgaatgtccggtcagagtcgagactcccgatgaggatttaccactagagtgtcggatactgtcaacagaacaagaagaggaataaagtgcgttgagttttcatctaggacaccgtcgtcaaggtgggaaagggccgaagaagagacgcttactcgtgaaggatgatagatttgtcgtccgaaccagaataaaggaactagaaatagagcgccatcaagcccatctcttcgttaatttacatgtggacacgatttttgtacgtgggctgaccgggaaaaaggaaagagaaagataacctacttgaccatcagggctccaagctaaagctcgaacagaaacgttatgagaggaataagaagcagataggtgaccggattcaacgtcaaagatgtagacatgtccagtttcggaagcgagagctactagtttgccatcaggactctgagatgaatcatagtgaggatccaagaaagctcatagagtgaggatcaggccagctccatcttttgatctcgagacggaaaggacatgaacttacaaacttgcagttcattccgaacttttccctcccactatcaagcaatttgatttccttcccgaacccatcgcctacctccgcgttcctcaacgcgatctttccgcctgccccacaagccgcgtagattttctcctccgggtgtaaacttacactccaatcgactcttgttgatttcccttctctatccgaatcagattgaaaaaaagattcatgtgtactgagtaaagatccgtcatcgagggaatgaagcatcgttgtaccatccacagaattcgtaagggatctagaacctgaaggcgagaccgatagagagacaattcccaatgcgtggggagcaggagcatgtagcaagtttccatccttgtccctgttaaatgacaaggtttcaccacaaaaagaaaaacaaggtatagggttgagcgactggtctcacgtaaaaggcatacgagagaaaataaagagtgaaagaatgcgtgaaagatatacgaaccaaactcggagggaaccatctgcactagcagagacaacctgatctttacccgtccactctacaccccagatggcatcctcatggcctattcaagagtcccatataggcgggatcaaatggtataccatccggaggtcagacagctgaatggataggtaggcgatcgagacatcggacaggacatacgtttttgagaatcatgtgttggaacaaattgcacagactaaatcgatcaacagatcgataaatactcaattttagttaacctttcttaaaaattcggcagagagagcaacaccatctagatcaataaaaggcttgtaccatgttcagtgttgaataagagagacgaatgaaatattgagaggtaggagatcgaagagatcgtagttggaggttttgttgatctgggcgcaaaaggagattgaggatttttttcccttggcgatgacgatttgtcctatccgagaagcttccagaccatcagttgcaacttcggatcaacacacaagggggtataacgtgtggcattcacatcttgaccagtcggccttgtgaatgatagcaacatattatcggtagagaaacatctagtctatatttgtataacctctcttggctaacttggggcgtaagttccacagagtgggaatcggccgtgacgaattgtacaagcgttcatgataatatcaatgtgccaaagtagattcaacacgccatcacatacgtctcaaaatatcaacaaacaagatcatatcatatggttgcggcttgacttgcaaacaagaataccagccttcatcaagaagactacagcgcatgcttcgattgctttgacgataacagacacatcgcatcataaccgaagcgtctagtgagattgagacgcaattttgatattcatataaccgagccaagattctattacgctagcataatgtcgactcggaaggtgaatgcatctaattctgaatcaaagatcgaagaaggcttcgattctcacagagtgtttcctaatcctcgagctctcttttgattttgtccttgacctctttcaaccccgaagaagaggagggcatttcaacgtactcttctccgttgagttggcacgaagtgaggaaaaacgggcagagttgaagaagtaggtggagagactgaagcgcttcggctggatacatcatagaacaaaaacgccaacagatgagatgagattggctcgacatcgtgaggatcaagggagaagcaagagaagatttgacacgaaccgaatgagacttccactttagaagacttgacaaggacacgtgcaacatcctcgatcggcattgccttcctcctctgcccacctccgcctagagctgatgacgaaggctgaccgaacgaagatgagagagacgtcacgctggatgaagtgaatagcctacagattaacgtcttgcaaacaacatcagcattcatgttactcgaagcagcatatcgtctcatagggaaagaagaagacagcttgatactcacataaaggcggcttcggcaacatttccgagtcggctcagcatactccttctcttcaagccttccatgtcaactccctttcctccgacctggacgctctttatagccgaggtaggcaagagtgaagtgattccggccgatgcgaacagtgctgccgaagacgcatttgctaacgagaccgattgagacttggcagctattcggtcccggagcgcttgacgtcgagccgccgcgctagtcggagtggttggttcaacacagggtgaggtaggcgctgatgatataggtttcgaagggaaaagtaactttcgaggagacgaggtagctgccgatgacgtagatgcgctcaacgcagaaccgtcacagggactagcatcttcccgttgaatacctgctcctattctggccttgggtaggctttccaaccaggctttaggaactggccttacttccctcccttcattttcacatagattggcaaatctttccaagcgatttttgaactctgcctcccgctcattctgttgagcagaccatctaccgatggcgccgatgactccacctgtagaagaagagtggttgatgagcaagttgaatccatacgtgtaggtgatcgtcctcgtctgtttggagagcgttcgtgctggagtgatggagagatcacaaagggaagaacgagcagcctccattgggccatcagaatcagagtgctcagaagatttgaagggtggccctcttccatcccactcccaaagccaaaccagtcttctcaaatcctcgagcgcgaactttcgctgagctccattctccacggtctctctgataccactgaaaccttcaaagttggcaattcctttgaacaaaatagcctcttcctctaatccaaagggatcacgtctgcgcttttcgaccgaccgaggaggaagcacaggggggtgttgggcaaggtgtagcgagagagtgagagacagggatcgatgcagcaacaacagagaatggagactggaaggaagagaagatgcgcggcaagtagacgagcttggggaaagggaggggtcatccttcctaaacgaaactgaaggagaagagagacaggagacaggtgatgaagagcacgaggtggtagaagcgggagaaggaggcaatgttgaagaagaaaacgctacccgctttttggctctaggggttgaaacaggggagcaaggagaggaaggggtgattgagagggatggtgtcgatgaaggggtgtgtttgttcgacggaggggtaggtagagctgatgatcttcgtcgatcaagtgaaggataataaagatgtcagaatcatgacaacgacaacggtgttatgtggcgatcagaaatatgcttaccttgtactagttttggatctcttaggcgtctccagcacacattcaggttcaggcgagagacgtcttttagacctagtttgtctgggagtatcagggacagagtatatggcggtgagactagacgacataattgagctgaggctacggttgtggcaaggatgtatgttcacgaaacgaataagaggcgggaggtaggaagagtgggaggaaaggtagagatgtaggaggaaaggaatgcagagagggaggtgacgcagggagagaagaaagaaataagagaaggggacgaggaaagggaggactctacgacttgggaataatgaagggatatgggatgaggaggattacgggtgggaggatggttgtatgggagtaagagggcgtcggagggagctggatgacttcaaggtagaagagacattcaatcaaacagacggaaggatgtagaacatcactcaacaaacgcggttagtcgcttgcttatctaagtggtttgtgtaatatatgaatccaacttatacctgaattatgtgcttccacaatcacatgatttgaagcaacaccgcttttcttacccgccaaagaatttcagtcctaactaaaccgagcgacatactctctgctccaaagacactcttgaccgttggcaccgtttactcccccacacgcacaaacacacaccaaacagtatcatcctgagtacctctctacctaaaatgcctcgagtcaagaagtccaaagaggtcagacacgatccactcggcgttcagctcgccgaagacgacctcgttcagaagtttggaagagtcaccaagcctggaaagcgagccaagaaggagaaggcagaacttgatgaggcaaatgtacgtgtagttttatcgcccgcctcagctattcagtagtctgaaagggtttagtgtgcgaatgtccgataccgaggtcattatgtggtcgttgaagaattcaaacacgggcgatcagaatgttatatctaaactgatcagctcatatcatatcttgatgttgatgttaatgttaatgtcggggttcggttttgttctatcctcttaggcagccccggatgcaaagctttcccggaaaatcttggatttggcccgagaacagcaggatgaaatggatgagctgctcgatcagaatgagagtaacccggtcggtcaagatgaagaggaagatgacgaggctcagtaagtcacttctctccgtcacctagaaacatttatatcgtctatgatgtctgtatatgtagttgacaagatttccaaaacactcatatcgtaggactataagtttccggtctaagaagtctgatgctcgtggagaggagccgtcggacgatgaggatgaggatgcctatgtgtctggagaggaggaggaagaggagtacgaagagctcgttcgttctcccattctggtttcacgctggtctcatgatcgcgagatcatcaattggagcatattgaaattaatctctgtgttctcatccctggcatgtctcaaattgacaggagatcgacccggaagatcacgctactctctcagcatacatgcaggattccctcggcgcctcgtcaaatagaccagcaggtcaaaccttagcagacatcatcatggccaagttggaggagggagcttcggctgaggctgatgatgcaggtgctaaaggtgttcggtttgaggaggttggagatgggctggacccggcagctggtttgccagtcaaggttgtcgaagcttacaccaagtatgtttttctgtttctctaaaactctggtgccgttccttcgtggctcctgccatcctgctttctctattaaccg

SEQ ID NO: 469 - DNA, 4104 bp, Xanthophyllomyces dendrorhous
gctttctctattaaccgatcaacatacttctgactttcaggattggggaactcctctctcggtacaagtctggtcctctccccaaacccttcaaactactcccttcacttcctcaatgggcccgacttcttgctatcacttctcctgctgattggtcgccacatgcaacctacgctgctaccaagatctttgtttccaacctgaagccgaagagtgcgacggtgttcctcaaaggagtccttcttgagcgagtgcgagacgatatgagagagaacggcggaaaattaaattaccagttgttcgaggctctcaagaagagtttatataagccagcagcattcttcaaaggaattcttttccccctttgcgaagtgggtccactcttctctcagactaaacaacaggataaacccaacatgtccagtagctgatttaattgtctttgcttctaatctataatttctacttttaaagtccggatgcactcttaaagaagctgctatcctctcttctgttctctctaaatcttccgttcccatggttcactccggagctgctcttgcgcatcttgcccaaatggactacactggtcctaactctctcttcatccgagtacttctcgacaagaaatatgcgcttccatacaaggtggtcgacgctctggtcttccacttcatcaggttagcgaacgacccgaggagtggtctgaagggtgaaggtggtaaattaccagttctttggcaccagagtttattggtgttcgcccagaggttcgttcatcgtcttttcgtccagccttcttgtttttatttgtctcatggacgtttcgctgatctacaacccgaatcttacgtgccgtttctctcgaacgaaacacaggtattcctctgatctaactcctgaacaaaaggattctcttctagacgttatcagagtccgacctcacgcactcataacacctgagattcgaagagaactcgttggatccgttatgagaggtgaggctcgagctgatgagatggacgaagacgctatgatgaattaagagttttagatagagactggacgaatggacggctgagatgatataagcttcatgtttttaatcgacaatgcgtttttcttatttgtgtcaggcacgatttttattattgttttgcgcacttctagagtttcttgatatgccaccttgtcttaatgatcagtcaatcaactaacggcttcaaacagtggaacatagtatatatcggagaggagtataaaacacaatgcaaacaattattaagaaaagaagatacatgggaggtattcgaatgattgataccgagttgaattaaaatcgagattcatcttttgaatcgtagttcgtatcgatcgctccgagtagaagtttgactagccagagttcaggactaagatcaactccggtctttcgcttcatctcatcggcctcactttcgtagtttgaacagacatcaaccactgataagaaacgcatgatgtcagtcttgacagttctcttttgctctgacagttttgtattattattattatatttataataaacaaaaagaaagaagacttacaccctccgactaccggtgaagcatctaacgtagctaaccaatctcgagctttgaggtcatttccgacttctacaagcatcaaacctcaagaaggctcagcattctagttcccagccaacagtactgaaatttaagaacagagaaatgaacagaaaagaagaggtcactgacgagcgaacatgaacgatacagcgtctggtccgtatcgggactgttgaagttgctgagaggcctgggtgatgactttgaagatacagtcttgagcctagataaccagatgtatggttgaaatgcccacaaatcagtcacggaaactatcaaggttttgtttgctaaggttgtatccaccataagggggggaaagaagaacgaacctctccggcaggcgttccatctgtgatcgaaataatcaacataggcttcctgagcgagccgtttcgagcaggacctagcaccataggctggaggaccttctgatccaggctcgttcccagcggggtgaggccagagaactggacttgtgcgacgaggcccatgacctgttgatcgttcgagatgttgtttccctctacaggactattgaggaatcgaacagaaactccgtcctgatcgaagagtccggtggcgaacgcgatcttctggaggatcaacttcagctctacaattcgctctccgttctcctcgaatgccatgcttccactgtcgtccaccagaatagcaacatcgaacagagccagcttggcgagatcgaaagcaatttctttggggattctccattcggcaatcaaccgatcaagtacacccgcatgcgcgattcgttgggcaatctgggaggttgcgccctgaggatagaatgcatgtaatttctgatcgccgatacattgttggagaacctgcgccagatggttgggatcaatctgtccgcttcctcctgaagcgggatgaggtggataaccgccgttcgatccataattagatggcatgggaggtgcagactggttatatgactgaccatattgacccgaagtaggttgagagtacgaaccatactgcccaccctgctgaccatattgctgattaggttggccgtatgactgtccggtctgaccatactgctgtccagtttgaccgtattgtccagcctgctgcccagactgggcgtattgagccccgtgttgctgagactggccgtattgtcctgcgccaggttgagaagaaggctgctggttatagaagctgataggtgatccagaataaaatcacagcatcgataattcagccgcacaaaactggaaaatacttggggcatgaaagacaaatcaagacacacgattgagcagatccctgattctgagctggttgtccataagcctgttgtggctggcctccatactgagagctagcgggttgcccgtatgattgttgactatccattgtgtaaaaatgatggatgatcgatgaatggtgaatcagtttagatatcagatgtagactaaatagggacgaacccatatgcagtttgttgatactgttgttgttgctgttgctgaccgtatgaaggctgttgactgaacataccgaacaacatgatgagctactgaccacaggtgtgtcactttgcatagaacaacgaagagaaacttacccataacctccagtcgcaccttgttgggctataatatcaaataagaggggcctgtattagtaacttttaggctaaaaatccaatctgtcgagcatgctgcactcacgattcaccatagattgtacggcagatgcggcaagctatggttgacgaccagaattagtatcaaatactcgtcccctggagaaaggtaaaaagcgtgctccaaccatacctttgcggcgaacttggactggaggttgacatattctctttagtattggaacagacaagttttgagcaagatggcgaattgaaacagactgaccatgttgtgctagaagaatggatgagaaaggctaaagaggtgggcgaacaagatggatgagactgagatgagtgatgaaatatatgtagccggaacccgggctgtgtatgtgtagctgggtgggtgtggaggctgttcttggcagagaccatacacgtgtggttgactggctgtgccatttcaattatatatgattttcatagccgcgaccgctcattcatatattgatttatactatagagaagattggagaccccgagagaagagatgtacccagaacttgcagaaaagtagtaaacaaggtggtgttttagagatgtacaggatatcaagctagtttgagatgatatatccatattcacacacgggtaagatatgaagaacagacatcagccaagtctgtgtacgaccatgaggaaggagagaagacaactaagtatgagaagagaaagacaagaaaggaagagaccgctcaaacgcttacttgctcgcaagcccacggcgcaacgaggtagtctatcctactaaccggtaaacacacccaggtgcaaagatttatctgacag

SEQ ID NO: 470 - DNA, 1619 bp, Xanthophyllomyces dendrorhous
gatatgatggggacgaagggagaaggaagaaggaagagagactgtaaaaaaaagactacagaaatgattagaaagcattagagagaagactagacaaaacactagggaatcagaccacagactagagagaggactgggggctcactgaatcagactgagctctatcgaacgaccaacagagcatgcacacacatccacacactcattcacactcattcacactcattcacactcacacatacatccacacacatagactggagggaaaaagcgaatcagtcggagcgcatgttgctggttgtcggcatcgaggccagggagtgtgttacgatccggattacaaaacattacaatacacactacagatttcatcagaatacattacaatacattacacaccgttgcacctaccattccgttctcactcactcactcgctcacatgctgaccatgggttgatgggaagactgacattctcacactaacactaacagtaacacactgatacactaacactctcatggatctcatttgttgtcgtgcgactgacgtgatcttggagtctcactcactcactgaccttatctactcacccacctagtgttcggtcagtcaactagcctgttccttttttcagccctcagtttcagcccaagcatctcacatccacatacacgtccagaagagaacatcccgatgctcggagaaagaatcaaacatttcagagcacacacaaataaacaccaacgtccatacatccacgcttgcactcacactagcactcacactagcactaggtcagcacctttttcatctttcccacgttatcgccttcatcttctctgatcgtcctccctccggccgatcccctgtttttctgttgctaagcatggcacatggcaggacgaggcgtcgctgtctcggctgcaagaggaatgttctctctcagccctttggtcttccctacggcacaacctcccttccctttgtctcttggcggggggagtgagcataacaaatagacgaggcaaacagagaaatgcacagtatttccttcttccttcttccttttctgtttcttcttctttttctttctcctttttcgtctttttttttcctgcatcccttgcacctctctttcttatctaactcggccagcttttttctttctgtctttcttccttgcttgcttttcgtcctcacccactcatcctcctctctctttgtgatctcctcgtggccatgctcttttccgtatccgcgcttttgtctaccttactggctcttgtctccctgcccctcaccatggctgtacccgccaaggtgcaggcgtcgcgagatctgcggccgagggcttccacgtcagcatgcacttgtaagccccgtacacgtgatctcttccaggccacaccgcgcgtactgactcactgaatcaaatcattctcgccttcaaacagtcccatccgcccctttttcttggtctggttctctggacccacagatacgtgccccgatatatttggttatatcttgacaagctctagtgcaagtgatctcaacacgtacaagtgtgtgtatctcattacgtgagtgtcaacatcttttttttttttttcttt

SEQ ID NO: 471 - DNA, 3834 bp, Xanthophyllomyces dendrorhous
tttttttttttttcttttagtgggatcctggtatcccagatcttttgtatgtcttactgaagctcactcttaatcggctactttcctcttctcgctttcttttccttcttttccatctaattttctttcctctctctctctctcattctctctttcccccctcgcgcaatcgtcggtctcttcagtctcatcccagtcacatgctactacagcacaaccactcttgctcctacaagcggttgctctggaacccttacttccgtctgcagcaactcgaagcgctcatctgtcgaacgagctctgagtaagccggtcgatcagatccgaaaaagacaatggagtcgtgcaaaggcaaacgcggttgttgcctgggattgggagtaatcatagatcgccagagtagtacaccccgctcactttctgctctttcttcttttctttctcttcctcccactacttgcttctttgtgcttttctgtgcttcttcttccctttatctttatttctatgttcttctttgtcttgatatagcgggcattttcttgcttaatctttgtttatgtacatatctctcgtatccctttcttgttttctactgtgtcctttcgtgtttctttggttttatcttgcctgctttttgcttgcactggaaacaagtcctccttctttcttcctctcatatacttctactcgtctgcttgtctgctttcttgcttccttgctttcttgcttccttgctttcttgcttccttgctttcttgcttccttgcttccttgccattatctttggtactagtttcatcactcgttctcatctcggacctcttgtgtctatagaccatcaaatgagcatctactatccaagactacagagcgccaaacagcccaccaagcaaaaatatcatgggccggccccgctcgctctccgcagtcaccttctctcccactccacccaaacatcctgctcgtcttctttttgttctctccctcgtccttcttcatttttcaccctcgccctcttgttcgttccagctcatctttcacattcgtactcgcatacgcaaccccaccctctcacacacagataaccccccttcgaaggcagaggaaaagccgcttcctctggttctgtcgttccttccgatctgcccgctcggcttttacacagccagtcatctccgatcacacttcaacggatcttatctccttggtctcgtctcgttcttgccttcatatagcgtcgtctgcccaaagtgtagcaagtccctcccctgttcttcctcgcccgatggatgagtcggataggacactggagattccgaaaaatatcctcttgggctgtttgtcactgttccgtctctattgtcctcgcccgcctttggtactgatcgttgcccacgttctctttcatgctcgtccttgcctttctctcaactcctaacaaacacacccccatcctcatacacgcacacgcacacactcacacactttttctcttccctctctcataagatgacgatggtgacgtcaggttcgcactcccttgggtcgaccaagtcgacgaaccgttggctgggctgacccaaccaggcttaccgaccgcctcgaaccccaaactcgcgctctcagactaccaaccggctatcgatcagcccgccttcggtctgacggtccagtccctggaaaccccattgaactcgatccccgtgcatccctcgccttcagcctacgagtacgagcccaccagtcgtcagtccccggctctcctttctatcgtattatccttgttgtcggatctgtccattgaatccaagattctctggttacctcacatgcatgtgtttgtatctgtttgtttcgcttcgtgtctctattcagatctagatgggccaaagatatcgttttctggctcagggtctcgttcgttcccacttggtccatcagactatcaagcccagccaacaaacgttcaagcaccctcctcctcgtcatcatacccatcggccatcccgttgtactattcactagacagttggtatagcccacagtcatccttccctccctcgttccatccacatctcaacaacaaccacattctaccgagaggcacaacccaacggcctctcagcctacagaacgtctacccaaccccggtcactcggttccaaccagcagacccctacgccgtcgactcgagcggtctttcgaatcttcatcaccgtcagccagagctccgttctgaatccccgccatcttctacgaaatcactagattccctgtcgtccctctcgaacgcgacagagggcgggctgacgtctccgactaatcaacagtccatctgggtgacaacctcgcggccgttccctcccttccagccggctcttcccacccaaggctcctaccgacggtcgaatgagcttgctccggtaccggccgcaaagcagccccggctatcacatatctccccgaactgcaacaaggtcctgggcccggccaagcggacgatgatcgcctgcgagcgttgcagactacacaagcttcgttgtctaggagggacgccctgtggcgcttgcgagagacgcggtctcggcgacgcatgcgtctacgtggccgaggtccgtcggaggggcaaaggaaagaacaaggcctcgtccccagcctcgtcgtccccccggaaggatcacacggacattggttccactacctcaaacggatcacacaccgatgcctgtggccgaccgcaaacgaccgccgagtcttcatcacgaagaaccagcaagacatcatttgacgataccgcagacatccacctgcccagaccaatcctgcctcctcctccgccgccaccactaccaccatcatcatcggcatatacattcacccagtcgagatttcccccgatctcttcctttgtgtccccatcaggccccgccctcttggacgacgcacatcgatctttgcacctgtctgacaatctgtcatttccgtctttaccttcgtcatcgaacgagccaactcggtatccgtccttgtcgtctgtctcttccttcaacggaccgtccccgtgggtctcgcccgggtgtggacagactgagctatccgaagtcttgccacagaacgctcttctcctgatagccgattcccacaggcctggctcacgatcccgtccgatcttgaacggacctgtacagaccgatcggcagagaccgtcctcggttgcgatcccgcccatggggacgatgatgacgatggctaggatgaagtcgtccaccgattcaggtcagctggttctgacagtagaatagcacgaccaactagatctttgggacacgtcttgtgtttgatcttttcttttctcttttccttcctttaatctaacggggtttctttctttctttcttcttcttcttcctttacgtcttctttacttggtcctggtcctggtcctggtcttggtctcttgtcttcttgttttgctctgtttgttcttgtttggccttctctcatacgttctttctctttctctttctagccgctctctttccttctttctgtccttgtttgtggggaatttctcatcatggtttcctcattcgtcactgtatctgtacacgacatctacaattctcaaaaatcatctttgtcttgttctctttctcgcccttcccgatatcctcccttcgtcctattacttgataaacggttagcgtccatcccgatctcatgaatcgtccaaagtcacccgtagaaaacagagcgacagaaaagcggaaattgagccgagcaagagagagagagagaggggggggaagaaaggagaaaccgttgcgtctc

SEQ ID NO: 472 - DNA, 3948 bp, Xanthophyllomyces dendrorhous
cggtctacaagtcgagggtgtaagactagcgcgtgtgcgagaccatgtgtcggttgaagcctagcctgggcggtcgaccgagaaagtccagagtgtgagagagagagagaacgaaggcaagaacggtgagtacaacgatagaatgagaaagggaaccaagctccttgcgttgttgtccgtctgatgtcttctatctgggttgatctcatcctcatcatcgttcttgatttattcggattattttcatttttacttttatttattttattttcgtcaggtattttcttctccccacagaacccatttcatccatccatccatccatcctttctttctctccctccaacacgagatcagggttggacaaagcacgctcgtcagtcccctctccccccccctcgaccgcccttcctttctcctcacagaaacagtgatgtcggtcgtccgggacgggttcgggaaccaagacggaggcgggggcgaaggtgttgcaatcgtcagcgctcatccttctaccgaacatcactctgctaccgaaaggccgaacgaccgaccgacccaacctcgcttgcactccatccgaccggggaagtcgtctggaccgacgaactcaatcatatcatcaccaccaccaccacagcagcagcagcagcagcgacaaccctatcagcaacctcctgagtcatctttgcactccccgtctcgttctcgttcgatacgaccgtcttctagccctcggtcgagccgtttggatgatacatgtagaacactctcggtagacgggccttttctttcaccattgtcaccacctcgtcctcctcatcctcattcgatatcaagacaaccatcaccagtcgctgcctcaccgccgccacctgggtttaggccggacgattcatattacacgtctctctcggagcacatccatcggcttgaacagcaacagcagcaggagcaggaaggaatccaacttggaatcgatcaagatcaatcatatcattcccatcttcattctcacgaggacaaacattcagaactagttttcacccggtcctcttgtacatcgaccacaccaacgtccacatccacgaccatcaccacacctatacccacacccacacccacacccatacccacatcaacatcaacatcaacatcaacatcgatactgataccctcaggacgtggaaagcaggccgagagcgaacgtgccggccaaccgatccgacagagttcgcccgtacaaccagtcgggcaggatccggcattggcgatggtgatggccgctgttgcccaagcgtctgccgacgcacaggccgaggcagacgcggcccaggtcgctcgtcacgcacaggctgcccctctgtgccgaccgacgggaaagccggcggagaagacgtcgatcgcttgtgcgagatgccgggcacaaaagttgaagtgtcagggcgggaagccatgtgcgcgttgtgtgaaacagaacgtaggccacagttgtgtgtacgtcgctgacgtcaggcggaggggaatctcgaagaagaagaaacaagcccagagaatcagggaggccgagacaagaaataaagaggaagagatcccaccaccagcaccaccaccacccgaagaagaggaggagaaggatggggacgaggtcgacgagggggaggaagcaggagacgcaaaaggcaaagcggataagcgacaagagcacgaaaggcttgttcaaaaggtggatagaaccggatcctcaggtatcatctctcaagccgaaggtgagagcgcagaagtcgaggtgggcggcgctggcaggcttgttggcttgccttcataccaacatccagtgatccgtctgtatcacttctttttttttttcattctctttctttgacttttcttctccgaaatgatgttgacagcgagcacgctctgttccatcgtctctccccccccttctctttcgcgcgcgcactttctcatgaaaaaagactcatcgtacccatccgaggaatccttgttgtcattgacaacttctggatctattcctcaaatgatggatctctccacaaccgacgttcacaactctcattcttcatcccttcaagctcatttggcagcagcagtggtcgaagacgacgccttctcgttcgattacgttcacgggtcactcgaccattatccggatcctaaccctcatctgcattcccatcctcatccggaccatccttcccacttggacccgctcggacaaggcggaccaggtccgtccaccatgtcacacctgcagtcgacctcaaacggaccggtcgaactaggactcggaatggacatagcgctcgggatggatcttggaataggaatgggtgtaggagtaggcatgggcatgggcatgggtatgagtatgggcatgaacatggggttgggcttgggaaaaccgaacaggacgtcgatcgcttgtcatcggtgtagaagacagaagctgaagtgtttgggtgtggtaggtgagccttgtccgaggtgcaaaaaacaagggttcgttttattttcattttaaatttctcccttccctcttttcatccgcttcatgaacctgtccttccttctcaatccttccactttcactctttctctgttcatccaaactaacgcctccctttgtctacttgatcttctctttcttctagagtcggagacacttgtacatacatggctcatatccgtcgccgaggaaagtccggttcgaaacgatctatggaagagattgagagtatgatcccggagcccgtaaagaaaccgaaacgcagaaggagacaacgtccgaaaagtcagttgctcatctctgatctactagacgacggagaagaagacgaacataccgagatcgacgaggtcgatggcgagcatcaccatcaccatcatcaccatcatcttttggaacagggtagtgagaacgatgagcagggcccattggaaggtgaagtcgttgtggtgagcgattcaaaccaactcgacatccaactactcgcgcaagtacaggcccaagcacaggctcaagcggaggcggcagaacaggacgacctgtatcatcatcattaccatcctcaccaccatcatcacgacccccaaaccgatatatataccgatgaacaaactgatccacaggatgacgacccacacggtcatcaacagcctttacttagaccctcaacggtggacactgaattctcagatcaactactcaaacaccaacattatttcgagtcgcatcacgatcaccatcacgaacatgaccaagagcatggccacgaagacgaagacgaagacgaacacgtccataccaattcaaactcgatcgtcagaagcggcactgatgatgaagatggtacccacgccatccctgtcgacggccctccttcagattcccatcatcttcgtcttccgtcttcagatacccacttgccttctcacaaacagcacgaccattcgcaccatgacgatggtcatctaaacgacccccaggcgttcggtcatccgtctccgtcgatagggtttgagaacgaacagctgtcgttaccgctgcctttaccgttcaatattccactgccgaacacgtctagttacgacgcctttttcgcttccactcgacctggtccagaggacgatgaggacggggagatttgaaggtgatctacaagcgtctttacgatcgaactctccctgtgtttttctttttgtttgtacacaccattccatctctttttttcttttttctttcaccaacctcttcatcctttgcagttagttttctcttcgttttcggtcgctttgactctttcttttttccattctgcctccaagcgaacgttgtaagaccgtcctctccgattgtgcgctgtgtctttcctccacatatacatttgtagcaatgcccttgcccttttcccttttcccttt

SEQ ID NO: 473 - DNA, 1292 bp, Xanthophyllomyces dendrorhous
tttcccttttcccttttccccttccctcttttctattcacgcctcccagatgcctctcggcgcttacgtcttccctccccccccgtcacccctttcttagatcagacagactggctgtattcatatagtttcaacacagtaagggactccgatcaatccctcctgagacccaggaatctgacattctgtggacgattctcctctcgctaagttgtatgactgatttgcgctgtgcagaccgcgttcttctatcctgacaaaatacggacatcgtctgtgccccttctttcctatcacttggctttaaatatgactgggaaagaatcccagatcctgatgtgtctctgtcggacgttaattaaattgaagacagggctcggggaaagagtgaaggaaaagaacagagccgaacggtgcattggcaccatgcgaacatcgtgaaaagaacattattaagaattcaattttgaagagcttcctcctttactctgatcgtgttggcatgctgtcggcaagaaaaggagaaagacagaagataaacagaaggaaaggaaacacaccaccacacacacaaggcaggagaacaaaaagacgagcagcgacgtcagcgctggtatgagagggaactgagccgacaaccggtctggtctgttttctcaagacaggcctatggacacgaagaaaagggagatccatatggactcactctgttgacacgatccaacactgcattaacattcggtaacgactccagatcaatcttcaactctgtcccgtcggtgtagacgacttccagtcggtcgggatgattaccctgtgcgtcagccgttgccagatcaaagtgcaggtgtaggttcgccgccggtcctttcttgggcggaggaggtgatttggtgatgattggtggggtacgtgtcaaatacggcatcagtcttcggagtttcggagcttgaggagagaacggagagatcgtcaatcggacgactttggataggacgagagaagaccaaggggtacacgatgagaaaagaaaaataggagagaagaaacaaaatcatcatgttcagccgatgctttcgatattgcagcaaacaagaaaattattcaaatcgacgctgaggagactcacagtgcaggtactgcaaggctaatgtcggtcctcgtgccatggtgaactgtcgtttggtcgggtgtgaggttgatggtcaagttcaattcggggcgatgaacgaggttggaggtgttctttgggtaggtaaaataattcatatatcattcaaatatatcatacg

SEQ ID NO: 474 - DNA, 72341 bp, Xanthophyllomyces dendrorhous
  misc_feature (56012)..(56021): n is a, c, g, or t
ttcaaatatatcatacgtaagccaattcgtcctagctgctcgtgtgtgtgttgcttctcatgaacatagtacaaagcagagtacaagaggtagatttgatgaaatcctagaaccggtcgttgattcagatagactacaagagagacagcgcagtgttggaatgtctgccggtgggagttcaaacacgcacacaaatacgaacgagtagacttgagaaacaaatggcccaagactgcttcaaggtaaatggtcataggtgagaacttcagttcaacctcgatcgcttcaagcctgatatttcacctgccatgtacgagagatccaaaagagcaaagcaagaagagggatatatgtgtgacttcattttattagcctaaccgaccaccatgacaacctcccctcctacatcctctgccacggcctcccaaccatcgagccacctgccgtcctttgttcggacgatgacgacctctcccattccgatacctcgcagcttctgtagtcggcttccttcaagaagcttcctgatttcttgagacgacgcgtgaataggaagatgtggtttggagaacaggcggacggagtgaattaccgggaaggaatttcggtactttaatgtactatgatggtttgattcgtgaacagaataggatcttgagctgaatgcacacgagttacaggctaatctgtgtggaacaaaaagggtacatacaggtgaagagctttggaagcgactggcaatttgtgaaatttctgagggttggcaggttcagtagattttattaatggcggacctcttggttgaccgacgaggcaagacgaaagacgaagcgataacataagcatgaaaggctccagaaatactttatggaaggaaagagctccttccaaatccatggagaaagcgagaagaacagaaagaacaggtcgacgtaccgggtaacactggagatgaacccgtgacggagaaggatgctggcgattccaagattcatcgttgtatacggaatcgacgtgctggcgagtcgagcgagagtcacattctgcaaatgagcacacaggttgtgcggaagaggagccatgctggaagaaagtctgggctctttagttgatgtcttggacggttgggttcgatgatgatgggggtacgagaggagaaaaggcgaagaaaaagaaagccgaaaatgattacggaaaattgagtaaagtgactacgaattttgtgagaaacgactacaaacttttgtagttttgtcggctcaaatttcgccaaagaaaacaaaaattacacaaaaacttctttctcctttgcctcaaccgacctccacccacacaccctccttccctctttctctcccaactcttccctttcctccctagcaaccatggccaagtctctgcgatcaaaagccaagcggtcttccagaagactcaaacgagaggagggtacttatgccgtccacgacgctgcccgactccagcgactgaacgctcgactgttggactcgaactcgaacaaggataagatcggtaaggagaccgaggataaagacgaggaggatgtcgtaggcgacgatgaggacaaggatggagaggagggtaagtctaatgcttagtcttcatcaggccgtcgactagtgatatatttgagtatagatagctgactgcgacacttcccttcttcctgcctttttatcttctcttcttccgttcgctcacgtagatgatgcgaagatgtctcctactccttcaactactggagaggccaaggtgtccacttcgggtgcccgaggatctcgacgagagaactggcgagagtcgaagggaatgaagcctgtgcgtctactgcgtctccaccgctgatttgtcttcgtctgaagcactcacacttactgtcttcctttgttgccatatgtgtctgcatgtccgtttgcgccgtcttcttcgcctggatccaaaccatccacagcgcgctacttcgcacggaatgaacgggaaaggaaagtttgttggcaagcgaaaggccggccggcccgctcgaagaagataatccttcactcctagctcttcatccttctcacacgatttcatccattctagacgtacaattcttgcaactttccttttcctttctcgttcttctttcagggttctccctgtgaccctccctctttttccttcctttctcaggggtttcttttgcgtttcaatttaccgtataagagaggatcatacatccactttgtccgtatagacacctcggtttgtacttgtatctgatccatcctttcaaaattttacatatcaaaataacccttccaggtacatttcattcatcgcttcgtaccatcttccttagacttgctgaccatttagtcatactgttccgctcagtatctgaatgagatcatcttataacaagttatcgggttctttttctttcttgttgtggcttggctggattgactcaagtgggttttataaggtaaacgattaaataatactgttatacaggaagacatactgaacgccaagcaggacaacaaatcaaccgaatatgttagcatgagtttttcgttatgcaaggaattgaagaacgttgacaaggaagggagtttcagaatccgatgtatttcctcgaatccaccgctccacctcagtttgtacgaaagaggcttcccactgaaggggggagggtgtcatttggtccgcccatcggtatattatttcaacatagtggtgtgttcgtgattttgaagagatgagttggatgagcaaatcaatactaacctgattgaagatttcagaagggataagacaaagtcaaaagctacatcaaccgaggcaaaatcacagatagattagtaatcgtgaataaatacgaggggatgtgatgaaaaaggaacaaagagagttggaagctcggacaaggctgaattggagtctacagagtgagttcagtaggtttagaaatcaagtatgtatggtagaatttggttttcgctcatagctaactaagggagtatgtgggcccagttggaagggagaagactaaatctcaccttgacgggtggcatcaccagactatcctgatagaagactacacaacacaatggtgaatacctgaagaaaagcaagcaaaatggtcagtacattaagttcaagattgatcgtggcaagcagggataaagatgggttcaggtcatgtgtatgggacatctcacaccgatccctgctcgctcttcaaagaagaaacgagagtttatcggatcgctagtctaggaaaaagtctcatcaagacaactaaaagtaggaagaaagcgtattgaacagacagaagcttaccttgtcgagttgagccgagccatcccagttgctctcatcaaagagaacaacggggatggttcggataagggaaaagaaaaaaagaacacacgactttttctctttttatatttttttccttgtcacgcagtcacgtcgtgttgatcctcaagagagcacagcttctccaaagccaaatcacagtcacatccatctaatgaatcattgatagtccatattatcttccccttcctcttcttcttcttcctcgccgtcttcatcctcggccatgtcgaacacgatgagttctctcccttcccatgtcaaaagacttcccgtcattctcgacgggtttccgttcagcgccagagtcactgcaggcctagcgggatctccatgtggggatgaacgaggcagtcgatctaaagaggcgatatgacgcgctcgagtaaggggtagatacgactgacagagcgaaggtagagggttctgcaaagatcggttgcgaaataagaatcaatggatacatttgataaagaatgagagagacacgtaaatcacctaccggaatgtgcagcgctgttcgtaaggcttccccaggggatagaacagatcctgaatcagacgcagatatgtcggcatactcgcttgtagtgtaagcgatacttccgagcaggatcttgggacctataaaattcggttcaagggcaattattgtacattctagagacctgagagaacaaagggtggacttaccttctggtgtgcgtacgtctaccaccagaattaactcctctgagttgaaaaagtccatatcgactacgtcgcatgggcagacaaggccatcttcgatttgaacggccagctgaaacgacgagacatggacaattgctggggtatctgaggatctatacataatccagactttgagatatcgaaattatgtgtattggttgatttcgtagagagctgaatcagtcaaagtgggatcacgcgccatacgtaaactgaagccgcgatactcacgtaaagacgttggtgtaagttgtgaagtcgtttgagaagcgacgaatgcgacgtaagaccgtgaagggtcattgctcgtcgatgtcttgttaacaatcaaatacgaatctaaacaacgtcaacatcgtcatgaccaataaaataatgacgcaggctcactaacgtttgcatcgtcggaccactctctgaacattagctccatgttgacgtcctctaacttccttgactgaggatcttccctggcagctgaagactcccccgaaacaggcaaggcactctctaaaatctctctgaacacaccgatcaactccaccacgatatcctccaatctatatccttcctgctcatcttcgacacggccagtcaactgagttaaattatgaactgccgactgactgagagaactgttctgttctatgtcaaccagcatactgctcaggtccatcaaagatgacgatctatctgaataactatttccttcgtttgaggttaaaccacttaaaccagaggagacttttcgtcgacctagaatagccgatcggagtcgttcgtctctggaggaagtattgtatcgagagacttgcgcatcgagacttgttctgccttttgtcccgagagggattttcgaggatgaatttgagagtgaatatttcgacgcaaatgaggcagatgagttcagagcatccagagtggatgatattgtatcatcaagcgaaggaacagacgatagatcaatggacgtagggatttttatcgaaggtcgatgttgttcaggtggacgactttccaagaatggtgttacaggggatctcaagaaggatgattgaagatagtcggccacgaccagcacatcgtgcgatggagaatgattaagttcaacagaaggatcttgactggatgcaactgctaactctgttcttattgatgtgatccaggaagaacaaatcgttacagacaaatgaatatttgagtaatcttcttataatcaccttggtgaatagtagtgtacggaccgtattttagccattttgcaaattccacaaaacgcgtccgctcctctgaagctatcttctccagctgacacaatgtcagtacagcatgtttggcgaggttcaacgccttttcgacttgtccagggtctagattcagaataccatacttggtggtcctgtcccatataaagtccaccacatacagaaggatacacatcagaaaaccagatatgtattttccatgaacatatgggcacttaccaacgcgaccatccaaatatttcgtccagaaaaatgatgattctttcgaaagcaggaacgatgttctgatagcaagcattttgaatagccatcaacgaattgagcgtagacgattcccagcggcctagactctgattggagatagagcgcagatgcaaccgatgatgggatgttaatagttgagcaacaatatcgagacacagatatcaggttgatgacaacgagctcaacgtacacggctcgtcaattggcctccgatgaagtttgttatcgaatcggagccccttccaatcatgagcaggcgtgtgaggtctgttgggggatcgatcctttctgagaagttcagcatcacatggaaagcagaaacagtaggaccgtaagtagccgtagtgttgattgcgacgaaggaaaaaaaaggatggtgggcacaatgataatgtatactcaccaccgaaacgctttccgacatcgtacaggaccccaatccattcttttgccgctccccctcctccttctcttgaattccactctgtctctaaaccttcaatactctcaactgcgcctcgtatcagctcctcaatcgccgacgtcgacttggtaaactcttcgacaactttcgggatggagtgctcaactccattcgtaggtcctagaggcggtattgggctagttggagggaggggataagtgcctgaaagaaatcgttgagtgggtgcggaaatcaaagagagcgtcaacaggctcaagggcactgggttcgcaggtgatggaggaagcggcgaggcaagtaggcttggcaaagcaggcgtgagaagcggtgattgttttgatttggatggtaggttggaccgcatcatcataggaaaataaggcgatattgagggtttttttgaaggtggaacaggtgtgacaagaggaagatcatatatgatgttgaatgttgagcctatctagaaagatcaaaaatcaggcaacttttcggtcagggaaagtgaacggctaaagaagaacacgaccaagacttacgatttgttccttgttggagaggattgatcctcggccgtctattggattgtttactgaaactgatttccactccattttgaaaccactccaaaattcgtccatagggttcttctccgtttctttgtccttgtatcgagtgtattggggaacagcgacctctcgaacaacggagccgttgtgaactgacaagatacgtaaatgagatacttccggaacatatactgccaagcagagacctgacagaacaagacatcgattacaaacatggttaacaaatcattcaaactgctgacgcaaacgaagcgagatgaacaaaccatcaaatctccaggccagccctgcgactttcccttccatttgggctgtccagaccggcggtcctccgctcagtctgcgcaactcgattttagccttggtcaagtttggatcctttttcgtatcgtacgtaatgagggcgacaagatccattgtaggacagcttgcttggaggtgtagatagcatctggattgtatcaattcaagaaaacagacatcagtctctaacacgtgatgagagaatcctgacggaaggtcgaggccacaaagtagttccagctttatactcactgcgagggcagagacacggtcgagagcaatgtgaacgattgggattcgagaattgacatgatgttgacacacttgtcttcaaaaggggtcgtcagcaggctttcaaaagacaatataaacgaacatgatgagtatggtccgaagtagtaacaaccgacgacgttgtacaacagcccgcgtagatgagtttatttcactcacgtatcagcaaggcaagagctctactctgaccagctggcggaagacgtagttcgttcagaacagtatgattcaagaggagaatgaaggttgattgcaggtatatgattgtgaagagatggtcgttgcgaagtcacgctgttggttgatgaacgtctgctcttttgaccaaaaaaggattaaatcaagatgatcttcaatatttatctagcataagcaacttccccctgcttgtttcccatcgaaaacacttgcaacataacactaaaacatgtgctttctcaactttctgcactaacaagatgacatctgcgcctgatctaactcctcaagtctttctcatttattggggtgaagtataaaaaatccatgcatccaaacaaaacacaagtgtgtgactatcaaaatgaaatatatgaccggtaaagcaagtgcttcttttacgtcctcacgatctgtatctaccgactttgaagtagctcggtggtaagttcttgacgagatccaaccttggcctctccactacaaccaactcggatggtccaatgtagtccaatccgatgactggtcgataaatctctcccagcttgtacatcctctgctgagccttgtttgcctcagcagccgattgatccgcatcggggatggcaattgcttccttctcatcaccattctgatttcgcttggccttctttcgaggctgcttctgttgtccgttcgaaagctgaacccgacatgtccaggtggctccccacatgagaactaaaccttcctttcgatcagcgaacgttccgttaggatcgatagacagaccgagtactggatcgtgcatatttcgaagtgcggctggggaaggaatgttgaattccgaagggaatcgtctcttttcaacatcgtacacatgtagctggttgccggagggaagtgcaaggcaaagaacagaggtgttgggggtgatcgggtttggaaggaaagctatcgcggccggaggatgtccagggaaagttggaagatgcgcgtgcaactgagcaaatggcaaaataagacagagatcaggtcaggcccggtaatagtcaaagaacgtagttcgacgtgaagaattattcaaaatggacttacttgcaacgtatcgaggttatacactctcgttcggccggataggtctaccactgcaaaccactggccatcatgagcaactgaaacgatgctgattccggcattggtcaatgcaccactagcgttgggactgagctcatcaccgtccattatggactcttcatcagcagacttgaccttccggctgccaacaacaactctggtgccgaggtctttgctctgttcaaatactcgaaggaccctgacctcaccaagcttccacttcttctcctttcgctctactggttcgtccatcggatcgtcctctccttgagcaacaacgatgtccgcatcaggcatgagatcggcaaggtcaaggacgatgacatctcctcgtcgagaggttgcaagaataagcttagtcgagtccggggtaaaggcaagagcagaggcggaggttccttgagatgcaagaggcaaagaagggcattgtgattctaaggatgtggtgagagaccgaatcagatgtggtcgggggttggtctaaaagtcaacaaagttggtaacgaattgagagtaaagttcaacggtggcataaagaaaattgagtatcttgatcttcacacagaaaaagcactgaaggaggatagatcacgtacggcactagcggcaatgtagaatagcttggtctcctccaagtcagaagcgacgacccaagatccatcctcactcacagctgcactgatgagctcgctttgtcccttgagctccatctcgagcaccttctcccaagcactctcctcctcaccttcaaccttctcgttgattctccagattcctacggcctcctctcgtctgaccatgatccacctagcacctcgagagaacatgacccttcctcctccgtcagcgccaacaccgttgagcccaccggttcgtcttgagaacgcctcaccgaagacagtggatcccactccactgccgtagtgaagcaatgggtttccgatagactcaggcttgacgtcgagtccgggattagagcaggcggagaacacaagagttgtatccacaccaccagttaccaggatgggcgccaagttgtcgggagatttagggatgtaagattcattgacaggaagtgcgggagggtagatggctaaggcgagaacatcatgagtgtgcattctcttcgaagtcgactgaatccattgacctcgctgagactgaggagacgagaccagagcaaactgtatagtggtttgatcgattccagaagtaaagactgaagtttgttcctgatgatacgaagagaagaagtcagatttagattttgcggagagataaaaaaaccaacacgaacaggggagatcccaagacaaagaacatcggctgcgtgagctttgaagctacagatttgagtggccgtaacggcatcccagaaccgaactattcctagagaatctcctgaggcaatggtaccgtccctgtatatgtcaggttgaacttggtgtcagcgcacattgttctcattccaatattcatatactaaagaccaggcaagaaaaaaggtagacatacctgaggacaccgacacaccagaccacactccgccccttgctcgctgttgctcctctctttccatttccccatccagccgctttctccctctcgacgatcatcctttcaactacccgacccgtgttgaagtcccatttacgaaggcatgaatcactgcaaccagtgacaagccagctgtctctccactcggcttcatcctcatcctcacttgactcttcgacctcgtctgagccgaccttggctgccgaagccgtctttttcagaggaggtaaagaaggaccccaagcgatactgagaagtcgggatttcgtcctttcaaatttcttgatatgaaccaggtcttcatcgttttcaagggaaagaagtcgaagagaaccatcttcgcatccaatggcaagaatagttgaagaagggttgggggcgatagaccaaatagatccagattgggatgagtgaagtcgctataggccacgcatcaaacgtagagaaaggaaagggaagggctgaacatcagtatggaatagactaaacattcaatgaaaatgagagaaaagacagtataataagaacttaccatgacagatccgttcgtcagatcccattctaccaggtcggatgaacctccagaggaaaatagtcggacatctccaagcccagcaattctacggccagaggcaatgaacgaccgtcgaagcgtgaaaaccagcgagtcaattttggtcgatttgggcgggacaagacgctaattgaatccgcagaaagaattatgaacaagcacgtcagatgaatagaaatgaacacggggcgagaacgaacatcagccatcgatggcaggaaagacaaagcttgaacaatcaatagagcttcgcaccttgagaataacccaaccttgaccaccatcctttcgttcaacccatttatgaatctcgacttctccacttccttttccaacagccatcaatccgacctcgggctctttcgagctagaggacgatgcatgggcagaagaatgagaaactcggagaggtaatggaggaaaggcaatctgagtgatcgactgaggttgatagtcgacgaagcgaactcgatgaagaggaagagcaaccatgtgcaagtgaaatccgtaagtccgtttgggttcgtgagatagtggttttgaaactggtagttgtggagttggacctcaacgatcttcgattctagattggaatcaagttaggatatttcggctttcgtattaagccgaaaaaaggaaagactaatccaacggtttaagatagacggtcaaggagaaagtctgtcgaatgttaaggcaaaaagctcgtctgggtagaaaaatacaaagtatgggaggttaaacgtcggaaactttccgtacgcccaaatttggtcaaacttactcaggtcacgtgacattctcgctttcatacgagctttgcctatgtgatacgttggaagagattgatatgtactgttctgtatctcttgtcgacatgttctattcctatcaaaggttatcgatggcacagagacaggaacaaacttcgttctgaacggtgtgtataaaagactcaatagcatactcgactctgcttaaaaaaaaccatcacgagtctgacttcaacaatgctagttgttgtcgtcgctccgatctagcacaaatcataaagagggtacaaacaggaagatacaaaacggaaaagtacagaacaaagagaaacaacaacacttgtgaaaaacgtccatcgcacaccttgattgtgaaaaagccaccgtacaggaaccccctccttgtttgtgctttgataggatatagccaactaatgttctccacctcgcttgatataatcctcacgctcggattcatggcggaattcgtttgcccactttttatcatagtaagtcttggttttggctgcgatgtctttgttgtactcggcttctttttgcatcgtcgcttgccattccttgaactcgacctcggatttttcccaggtagtctgtttgtacaagtcaaatcagaaaatggtggagggtcagtcaaaaagaattcggcaaactacctccaattttttctaaatgatacgaacgttttgtgactctgcataagcatccgactctgcccattcttcagcggtaaattgcggaggctatgaaaaaagggtgacgaaaagttgagataaccgtgaagaatattttcgtcagtgcaaaggactaagcttcgatgctcgtatcagtaaagtatgatcatactggcatattcctttcgctattgtgttttagttcgaaattggaaagaaaccatccaatcagtaaaacatagagtaaaacaattttttgaaaccagacacgtactaaagaactcctccaggcatcttggggtatatgataggatcatgatgccacatagcattcaagatgttttccttttctttgatccatgcagagatggctcggggatcgctcaggtttctttttcagatgataagacgatgaagcatgatccgtatgtaccaaagcaagccaaaaccggttataagacacaatcagcttttcgtcaagataggtaaagcgatcaccaaagtcaaccagtagaaggccgggtcgtcgagtgggcaagcgagcgcgtgagaaggagaatgtaaagtaagacaactgacttggcggcttcgaactcagatcgaatgatggcgacatccctacaccagtcgttccgtgtattgtactgagtggcctttgcatccagacaggaacgcttgtaaagcctgaagagattaatcagaccgagtttccagatggatgagatgccgaaaaggaaagcaggggattggagggatgaacttgatgagcttcaagttgggcaacacatacaaacgaacaaacacatcaagaagaacaacgacacttacgatttgatatatatacggtgagcgtgtgaatagcccctcatgacgacaggcttttaagataggctagagtggcaagaggatcagagaaggttgaaggattgttggtatcggagaacaggtgtttgaacggacgaagacagaagagatggactctggaggcccaggtaaggaaacggggtctaaggtatttgaatatataccccacacagttctccagtcttctcgtctgtttgggtcttcgcatctccttcatcgttccatcttccatctacaaacatacacatcaacatcggtatccggaccccttgttcttgtacggatagtcttgtgtaaaacatacagtcatcgccatcggttagtgttttcttgttcggtcgcaccaaacgcttctggctgccaatgacaactttcaggtgaatcgggcaaattaacggatcggccaatgagccgagtctcagatcgagcgtccttgagtggatgcattcatcgatcatcaactcagctaacccatatctgttgcactctttgtctctcctaccagcagatcacttgcataatttatataaacaaaataagtcgagatttgacatgaggctctcctctttccaaaaacgcctacctagccaagctgttctaccaaaaatccggctcgtccgatcttatgtaatcgcttcggatgaggcaccttcgatgaagccaacctcagaatttccgtccttccttatcccctacttgtcctccacttctgtctcggatgcctcatgggcatccgggatgttgtcctccactgagcgacctcctattcaccggttaccgtctcctcctccattatctcaggttcagcttctgtcctcgttgaacggaattcttcctcaatgcacctggcaacagcatctacttgtcacccgctattatttcgctctagacccatcgatgatcaccaccgcgcttcataggcaggttgcctctacacttgcccgcgggcggggcaccctcgatggctatcgtcgactcaaggctgtagttcagaggatgatgaatcttggggtcgaagttccattgtttgtcagagatcagctcatcagaatcagcacacccgataaggcggatgaacacgaccggtatgctgaattgaaactccacgggaacactgttgagaagatgaacaattggaataagatctacggttctgaatcagccactcaagtgggagacgtatactatagaccatcgagtcggtctttcaacatgttgcttgaatcgaaacatccatcctccgtcttcagcaacatgattagccaatcaccaaatccaaatcggcacatgactccgatcatcaaacatcacgcccggtcgttcacgcttatctcgaatctgccggccttgctacagaacccgtcgactgggaagcttacaatcaaggcgatgaatgaagtcttagctgcattttcatcagacgaaaacattcggcttaccgttcctatggaagcatatgttgctcttcgaagacatgctgccggactcccttggagaagggtttatatcgatcgggcttcaaaggggttgtatcaaaactacgatgatccggctgagagttttgcaaacccaattttggattcccttggatacgatttcccgaaggatctggagccaaaccgagacacatacactattcttctgcgaagctgtatttaccgaggtgaactcaacctggcgctcactatctttaaagatatgctcaatccaaacgggctttcgttgagattacctggtgcgcctcccggacaaaaaggtcaaccgccaaacgagctcgagagctttccacccaatgtctctgactataccgcgtttttctctggattctaccggttcggcgagttgcccacactcgattcagccgctgctaggtattatgacgcccacaataagatcttgcgtcggggtgaagatggtggatccccagaaggcagagagagcgaggcagacatgaggaggaagacgacagagatgtggaatatcggtatgggctttcaggaggctccacttgaagatccctatacacctggtttcaatggagaaattcctagcagaaatcaatatgcggtcaacagagcgactgagccaaagaaatgggttctgccgacattgattattttgttccgaagcttcttgtctatgagtccttcaaactgtgagttctccgcttgtttcaattttgtcgctcttctaactcatagctgacatactctcaattcgattgattgcgttttagactcctcaactgtccctaatcctcgagcgtcatatcttcctcctgctcgaagtcgagcaaacaaccgcgcgatggactcgccaacgcctcgacggattctgttcatccttcgagcctttggtcaggtgtcaaacttcaacccgtacatcattaaaggtgtctgggaggcatgtgaggaaaagtttgggatgggaaacgatgagggttgggtgaactggaaggtcactccggaactcaaaagcttcttgaacgtatttggactaaaagccaaaccggcagaatggggaaaacctggtggatatgaagggtgggatgacgaataaacgaaacccatgtatgaccatctggtggcactctcgttgtataaaatgtagtgttgtagatatctaccagatgttaaggcttgtgtggaccgcaacgaacatggttacagacccgcgtaactctgacgatatctaagatgggcgtgtgctcactttgaccttgacctttgacagtcaacttcttcactctcttttttccaatctcacttatcttcataagatgtctacccctttcaacactcctgtatctgccccgataccttctgaggatatcgttgctaagaaggttcgcatatctcatgaccgtagctttcaaacgtggttctaaatcatgatgtacctgatcgctcacctttgctctttctcttctgcatcgcgtctcggatacatagttcgacgcctgtgtacgtgcttactgagtcgtatggatcataagaaagatatctccaactggatgaaaagtgtagctgattgatcaattgttttttgtgaaatgggtatacataccatccttcattgatctgtgtaggttgctgatttgattgtgaagactggtgttgggttctctgtcggtgtcgctctctcagtcatcgtcttcaagcgtgagtctggtcttttattattgttcatcaggcattatgcccagcgatgacactgcttatcgtcgagtacgtggttttattttcaattcaaattcggttcggacaggacgaacctggcctgtggctctcgctactggatttggtattggacaagcatgtatgttaaatcctcacatctttggtcaagtcaattgatgtgtctgatagttgttccggtgtcgcttggtgctatccaaaatacagaccagaactgtgaccgatctttcaacccttacaacgtccctgggtaagtcgactcatcaccctcaaggttcgaaaaggaacattggagctcatacgccgaccaatcatgggctgcacatcatctttgcatctgttctctctcattgaaaatagatccaaggtccttgctgccgaaaacgtcaagaggatctgagtacactgaatgattgagagtcggagaaggggtgcgggagggaaaaggatgtgtattatcgataaagaagccatctttatatcatactcgtttcatcttcatgttgtagaaattatctgcagcgaccgactcgggaaagatgattgggtatacaaagatgcagcaaaagcacgagtccgctatgaaggcacgagcttctttctcgtcatatagctcttgtcatctcatcatcatgaaaacccgttccaaaatatttaggtccaactgacgggacagattccaaaaaccagaatcattctcttcccttcctctaccaaggagctgcaccttcctcagcgggtaatctggaaacatattccctgatagcagcatgtccgctgacagtaacgaagaacatcattcgttccttcccaacgtcatgtagaacaacatcgagttgacgggcataggccagtgcttgagagtattggtagaatgaagagaagtcggaatacagatgtcctgtcacagaagcaaaaaaattcaaagaaagaacagggaatgaggagaagatccatcaggagacagactaaagagaggataccttctgcgatcttcattcggtgaagctcagattcatacagtcgaagctgatcttgaactgtcacaggaagaagtgggttctatttagtattgaccaaaaacacacagagcaaagatccgatcagtcaataacgcattcaattttgaagtacttttatactaacgtttttgtacatctgagcatgggcgtgaactgtcagatagctgatgatctgttccatcaaaagcgctagatacgtcaagtctttcattcaagatgtagaaacacccaagaagcaacatattgagagacgaacctgatcggctgtgattcctttttcaagcgcgcctcgcatctttcgacgagtaatttcaccgacaaccatatttgggaatcgagctttgaactgaacaaacaaattcaagaccgatatctgtaggacgttgtctagtttgatcgaattttgagaagaggagaacaacaagtttacgagattaattttcagatcggacgaaaacagagtgaacgatagcagggcaattacttgtgtacgcgtacacccggaaattagtttcgacgatgatgaaccccttttcagttccgcccccaggtccaggtgtggcaggcgataatcctgttgttggtgctgatatcagtgcacctgaaccagggagacctgtcgattcggtctgttcagcaactgaagcagaaagggatgctgctagacgggtagggtagaatcgcttggatgatttctaaggaagaaaatgaaggatatcgttttgaacatctaaaactatggaagagacaaggtatgaacaatagtaattgaagcgcactgtacgacgatagagaaaacctgtctcgttcagatcctcaagcattgttaattgagtagccgtcagattttctgttgagtagccctattgaatgtgttatgatgatgaaaaaagaagagacaaggacgagtacatcaatttacaaaaggtcgcgcagagtgaagaaatagagaaaatcacacgaactcgaccaagctcaaggttgcctaacatgaataggaatgaaagcgcttcgatcggatccatctctcgttccttttgaaccgagcataaatagtaatgacatcagatgtagcaagatcggtcagttcatatatgagggtccttgaagaatcgtaggtcaaagacattgtaacttggacgaactggtgctaatcgaaggtagttcaacatcaaatcccactgttgagtgtgcacgtcttccaacaagaattgaaaccctctcgaagtgatttgtagtctgtctgctgccttgataagttgatttcctccatttctgcgcgtcgtgttgagcaagacgatatcagctacacatggcttgacacacgactagataaagaaatgaacacacggatcagccatgagcccgctgttggccagtaggtacaggactgaaggttttggaggtataggtgatatgttgatggatcctcctttcgacaccatgaaatgtaatatggtctgttaagaataggtaggtgtaaagaaggtagaaggtaagtctgctactcaataactggttgaagagaaaaagagacattggaatgtccttaagacactctactcgcctcccatttggaaattgcgatctgatccagctctgcagctgtctttgcatacttgtcttccttttctgataagattccaaaagattgatgcgtccctctgttgattaagaaccaacatgatgaacatataggcgcgaaggaagtaggcatcttgacacgaaataatttgacagacataccctcccgtcaatgccttccgaaggttttctttgaaagccgaagtcagagaatatttcgatcttgatgatgactctttcagtatgtgtcgatgttcaagcaaagctagtgctgccgtgtataaactgttgaggagtcgtgttataacgacgataatgatgacgatcagaagattgaatggattttcgtatcttcgccgctttgctctacttacggcagattctaagggccaagcagacagacgaaccttttggattctccttctctgatccaaagtgctaaatcatccttccggagagaaccttccatccaaaccagtgaatatacaatttgtctcgccaagggcggcaaaagcctgaaaatcgacaaacatccagctggtgtggagtatagtcttgttaacgtcagttgagactgagcagacaggtaagaggggagggaagtagtgaaagtttgagatgaagttgccatcggaaggacgaccctaaaaagtggtaaaatggatgagcaagatcgtgtaatgattcatttggcgaaggtctagtatgtagctgaaactttcgtagttctggtcacgtgtagtgtcaggaatgacgtttttccgtcttccttaatgtcctctttctctgtccttatcttgcttgatgtcgaagttcacagaaaccaacaatgaagcataaagtatcataatacagcatggtaatctagaccagccagccgtccaggcgatacggcttggtacataatccgagtccgtaaggaatggattttttaaatttgtcttttaggtatatccagaaagaattaccagtttttgagcatgtcctttgtcataggcacagactccatctcctgctcatactcgatctcgaccctcggtccagaagccttcttggccttcttcgctggcgctggaccagacttctttgtcggggcaggcgcaggggctttgcgcttgccttgtgtcggaacagtggcctccgattcagcctccgattcagacggtaaggactgtacagaatgagaatggagaatgcatcagtcgccatcagatccatagaagatatgaagaagaaactcacatcatctccgctccagtcctcaaggtcactcatatcgtcctcgtcgtcgtcctccaagtctgaatcgtcctccacgaactctcttgtgccgttctcctcatcccattcctcctcaagctcatcctcatcctcatctccactatcctcttcttcgagctcgtccatgccctcctcttcgcctaatcgatcacgctccatcaaggcctgccacacatcctcgttcacattcaacggtgcatcaccataagctttagatttcagtcgagacagcagctcggcttcaatcgaccgttctagtttggcggcggaaagcgccttggtttccctagctgcctctcgtcggtccagcttcttcttgattcccaccatggtcggcctagcgaagattatccatttgagaagaaacgagtattagtaatgagtgaggaagaagatcaaccttagagaaaacgataaacaaactcactgttgtgtagttgctagttttcgcatcttgatgaggtattgtgtaatctttgttatacgttgcttgcacttgtggatagtgaaatttggccagtaaatgagctccttctcgatctgattaatttagttgaaattcaagtgccaaatcgggtacagacgaatgacaaccaagcaaacaagggtgagcaaacaacccttctgatgatggcttgatcagagcaaagacaacaaacctgttccaaagccttggcgtagttattgcttaatttcacacgctcccacatttttgcaggtgaatgtgctcgttcgatcgtcttcatgtagaggtaagccacacctgatttgaacaggacattttgcgacaaggaagagacatgatccagacaagtgaaagggagaaaccatgaatcagctaatcgctcagggcattaagagaaaagatatgtcaaggagaccgaaacacaaagaactaaccgtccttctctcgaacagtcgcgtatcgcgagtttgctagcgggcaggactgctgactgcagaacccagttacgttgtattcatttctgcaaaaattctgagtagttgttctttgtttaaaggaagaaaaagaagaaacaaggaaggagttaatgttcaggacaagtaggaatggaagtatcgtcgccaacggtgagaatactaggtggccatgacgttggaagtgtacagagaaactcacttgactttgtaagagcagaactgtctgttgatgacctcccaaatgacttgatcagcttgcattgtgagcaagacgtgttgtataggtcgatgtgagggatgaagaaaggaagaagtgggtgagagaactgtaaagaaggtaatccaaaaaaattgagagccaaaagttttggcaagtcagcctcgtaaattctgataacccgccaaaccctcgcttccaccatcaacgtccagatctttcgatatgactgtagacaagacttgactcgacgtacccgctgaagaacaagtgattagtgagccagttttctgctgaacgggtggtcaaaagtgcaaaaattcagtgttcccgggcttataggttcacctggattggacgtttctttttctttttctttttttcttttttgacaggaacagcttttgtctagaagaggagttaattcaaataattatctaagtatccgcacgcgcctcggcgcgtcagttgagacgcgtcttaatcaatcatcgattcatttctttctttcttttcgtcctacagcattcactctcacgcccgtcggcaatcatacacatccacttaccctcaacaatgggcacaccgagagtgacagagagacaggtgaaaatgaggatgagcttggaagagaaagaggcaattttggagaattttgatctcgaaggtaggttgtccgtcgtctctctcctacttctctgaagtcgttggagacgtagagtctgataacacagatctttcctccgtctttcatactttctgtcttttggaattcgttatgaataaagttgcccaccgacttgagaacttcaaaatgcttcaccagactcttcttgactcgttccttacccgacaagaaactgaaatacatcgaatacccatcgagattcgcaggctaactgtcaaggagctcggtgaaagatggtccaccggagggatgaaagacgttgtcgaaggtttagcaaggtatagattaaagaaggttcaggaagcaggtcggttgggagaagagagagagctagaagccagagaggagggaggcaaaaggtaagtcttcacttgctaatatgaatgtatgttgtctcttatttgacatcagctcatcttttcatctttgcatctgtgtgggtgtcatcatcggataggaaacgaacaacgacaacttcttctcagagcaccaccgatggacgtcgaatcaaacaacgtacgttcacgatcatgatgtctaacacaaggcagtgtttggttccgtcttcaatctttttgcatactcaatataattttgaaaacacaatcttagctcgagtgaatccatcatcaaataaatcgcctatgaaattcattcgaaaacctacaaagaccagcaaatctcatactaaaacgactcaatcggtttgtctttatcttctacttcgttctgctctcttctttcatccacttgtcgactgataaatgtttttttcaatacaacccctcggttcaccatcctcccatatagacatcgacaaatcacccttccacctcaagctcagctgtcattccgccatcttgccctaccttccaatttcaccctctgcttccagctactccactcattgctcgaacctcaggttcatacagaaaaccaagaaaagatgaaacaattgtgatgagtctaaatggtagtcctgtcttgctggacgagctattgaagagaatgagagatgaaaagtttgggtctgcgagcgatcaagatgatgatgttggcggagataattgtgaggaggaagatgatgcacaggaggaaggagaagcagtaggactgggattgcttgacgaagaggatttgttgaggaagctagaggaccaacagaatacctcgtacaacgcaactccttcctcttcgtcggaaatcatggctaagaaaagaacaaaggcgtgatgtgttgttgtgtttcgtatccgtctctctcattccactacatgtgctttacttctcttgccttctttcttcatctcccttccttcgatataacctttcataacagaacaatatatatgtacatgatttaaaatcatttgtttccctttagcaatagatgatcagcgggtcatgtagtgagacaatacccgtttggtgaacttgctagccttgacaacataaaaataacacagcatatagaaatacaaaaagctgcctagccaccttcgccgttgcgtatagagaaagctgttcaaacaggtttccaagggcaaacccttccatcccaaccgcaagtcataaggattccttcccttgttttgatgaaaccgatcaagtgatgatacaatcaggtttaatttgagcgaaggcacgcatgagattgagagactcactcaaaaaggctccaagcaagaccagcaacaaactcagtatgagcagattgagtggcaacaagaaaggtcggagacggtctgatcgtcgaccagctgaacaactcaaagtgaatgcggtacaatgaaattgatacgatctgtcattaagcattaattttcgcgataacaaaggaacaacatacttacactcgggttgtcatgtcatatcccccgctcgccaacacatcagccctccaaggactccaagcgactttcttcgccggatatacatgtccttctagtcgatgtacaggaaggctcgtcgggcctacattggatggtattactgtcgaagttggtgctgagagccgatttgcgcgcaggtcgtatgtctgaatagatgagtcagtcaaagtggttgctatgatctgttcgcgatcaattttgattccaaagcacttagcatgatttcagtgcattaaaaccagtatattgagaacaaatactgactccttctttgtatttgttccaatcaaaacttaggacttcgccaccattcatgcaccggatctcgaccactgcgcgagcccctcctgatccactgatagttccagaagtccttgtatctggtaagcgaaggtcccagagcttgaacgtgccgtcttctgatgatgatcccagaaggttgggcgaatggggagagaactgagttgcgtatacacatgcttggtctatcaaagagaaaataacatatttcaatcatcttgattctaaggaagagttgcaatgatgaggaaacgtacgagctaggatggtcactaaagatgtctgtctatctggagaccactgatttttccttcaggcaacccaagttgatgttcagaatcgaaccatttttctttccttctcaagacatcgtttatgtagcacatgatcgatgaggtctactcactaatttgattgagccatcccagctacaactcgcgaagatctctttgtttagatttgaccaatcgatactcatgacctcccttgagtgctcgtgaaaattcttgattggaaagtcctatagaaaatgcaatattccgattgagagctttgcgatcagcaaataagatgctcgcgaatgagaaattgtaaagaacaagtattcacttgcaagttaagatcatagagcttgatgttcccatctcccccagcagtgactagttggttttgattgagctctgaccatgccaggtcgaatattgaatccttgttgtcataactgatgtcgagaaattcaatcacaacaaggaagcatcagcagctgcttcgatgtcagggatagatgagaggaagggctgactactgatcgatctgaaccttgcccaaaggacctagagaggatagtatgtgtagtctcccgttgcctaccagtccaaaattcgccgaacttgctaaagccaatcggtctaagagatcgagtcagagttgcattcaacaatatgatagtgatcgaggagagtcgaccggcgggatatgtatgcgatgaacgtatcagactcatacatactgggtatgaatggagaccaagcaatcccgaaattagaataaccagggatttgaagcaatggctgaagaggcatcatgattatacgaccttacgaagaggccaatacgtaaggatcgagtgcagtataaatcagagtcaagatgagtgttcgttaggagatggttcggaggagtcgggcaatgaggtattctctggcggatgctcttctccgatataaagctactttatttgatctttcgtacgccgaccatccttatcttcatctcaacagccatgtcgcacacagttaccgtagaacaatatgaatccctcattcaagctgctcttcaaggttggtgatttgatggttctggcaccaagatgcctgctgagaacgacttgtcgcgggaatatttagacaacatgtattctcttcttttctatatcgatcactttacagccagagatggatcttactcaccttactcaaagtttagagtaggtgctgccttgctcaccgctgaaggagaaaccatcaagggtgctaatgtcgaaaacgcatcgtatggtccgtcctatatctccttcatcatcttcttggctgtggccatgttatagaaccgacatcatatgtactgatgataatattgaactaatattgcccaacttaggggggacaatttgtgccgaaagatcggcgctttgcaaagctgttgtgcgtactcatgctgtctgttgttgtcactggcggctccgaccatctcttgttgtttccaaaatgccggagtttgatggagtagagactttgagctcacagatctgactattcaaccatcatctcaccctcttcgtccatcgtcaaagactgatggaaagaagaacttcttggcgatagcagttgctgcgtgagtctcttctatttcgttcactctcggtttccgaaagcttcatccaaatgtaataactatccggaatcttaatccatacagcgatgttccctcagcttctgtctcaccttgtggaatctgccgtcaatttatcagagagttttgccccttgactgtttgttctaatcttgaataggttcttctttctattccgctgtggaacgagacctaagctgaatcgacgtcgacactctacccatcttcctgatacagactccgattgtgatggtttcctcgacgtatcaaactggagattacaccaacgatcaacaggctgtaaatgaaaagaataaaacaacggtgacgatgacattagaacagttgctgccaatgagtttcgggcctgatgagctcaaaatgggtcagagatcctgaagctgtgtctgagatgggttgcaaggcagttccagttgagagagagagaagaaaagaggaaactgattggagagaccgcagcagcgaggaagagaaggaataagatagagacagagacagatgatggggttgtagagaccgttaatgcccagaaaaatgttttatacatctatactaaatacagcattcaccagaatctaaaatacatggtggaaaatagcaaagtatcaatatttaagcaacgttgttcatatagtgaaaatgtattagcattcatgcccgagtcggttcgtcccttagccttgatctattttatctctccataaattcccagccaccttggactcttgtcatgccagagaggtgttctgcgaatgctcaagaccagacctttcgacgggtaccgaagaagaatctggagaggtcgaacaaggttccaagaaaccctgcgctcgacgacgtcgattcgctcggggatttaggatggcggcaaggattaggattgtaagatccaagacgaatataccgatatagttcacctgtttttcatgaagatcaaccctggaaggaacacatcagaccaacaaacgggattcgattgatatagaagacaagaagccggaatagggacgtacggaagcaaggatgtcaaacttttccttgaaaacgagactgagagtgcaaaataaaccgcctaacatatccaactggtagacgttccgcccgtatataaattgtggcgcataagatgcaagattagatattccgtttgaaacgtcaaaaaccaagtgttgaaagaaacttcgaaccgtcataaaaatcagagacaatccgataacctctttgtacttgaagatttcataatactgaggactatcatgtatcagaaagagaatcaaaaaacacattgagtgataactttaatcattgtatatcataatgatagcgcaagcatgtaatctgaacacgtacataagtcccccaagaaggccgatgacagatatgactccaaacaatgtaagtggagcatcagttccattccgtattcctgcctgggaaccgaagggttgagagacataggagatgaaaattcagcagagaatattcaacccctcaatagacgatcgaagaagaattgagacatgactaacccttgtggcgaagacgagccctgcttgaagtccaccaaagatgagaagataaaccgtcaacaatatgattgatttcttcagagatagtttcctggggccgtaataaagacactattatggaccatcaagagacggatcggtttctggttctcagtcttacaaaagagtcatacgcgtgttgctgaaaggactaacctgaatccagcagacggcggcaaggaagccgaagagttgaggttgaacaatgatgggtatattaatattttgaacaatgcagtaaattccaaggaagattgaggcggcgctccatgtaaacctgatatcaaacatcgaattgacaaggtgaatcaaggtgacattctacataacagatttaacctgtgtgactagcgcgtacattagtatgctggaaagccccttggtgtcctttcttcgatagtttataacgatttgggggatgatctaagataagaagaaaaaaaagtaagaagattgccgcaagtgagtttggtcgaacgcaatgatagtttatcatacctgaatgcaccatagtacagtccctgatgaaacataagacggaaccacaaattcagtaagagcaaataaaacaagacttgattgaatgacataccgatagttccaaacacgttttctaatgcagggtttgcatacatgattcaataagtaaggatcgaaatgaatctgtccggaatgattcacgattgatagacaaccgtcggagagaataagacgaagagaaagcattggccttgaggtcgacggtggtattaaccgcttgatagccgagataattaggctagggttgcgacacgtgatcgaagctgtgtacgcccaagattacctagtcttcgtttttgtatcatcatctccagctttcaactttcttcttcaaaatactcgatccgatacggatgatgagcgaccaagccatgcaagagattccacctcctttaaaacgagctcgatcatcagcaacaggagctcttgtctcagactctggtgcggaaccctcagagtcaacaagcatcgaggagccaaagaagataaaggctcaaaccgaagacgaagctcaattggaagacgaaacagagttgacgacgcaaacatgggaagatctaaaggagctttgggaaaatgctatggatgagtttgaaggtttgtttattccgtgcttaagataagatctgagataatcatgtttcaactcatctatcaccttctcctcaaccaaatctaggctccgagccggcttcagcggttcctcttcttcgagggctgatttttgagtgtgatcgaatcgttcgaaactctcccgatccaaaccgaccacttcaatcttctagcgcaaattctactctcaatcaaaacgaaaacaattcagatcaagctcgatgggatctatctgttccctcgaacgtatctgtcacccaagttggatctacagggagatcatcaaatacaatcaaagaacatcccgggccacttcatcctgggcaggctctctcgaccttttccttctttcatatttatggtaggcatcgttgacatcaaatctaagtgaactctgcacatcaattcactgtatgctgctttcgtgctaaacctgaattcatttgtttatggaactttttatatccacttgacttcaggaacgacgctccttactctggccgatatattcgaccaagtgcccgatctagcagacccatcggagccatcgccagtgataatcaatgccaaatcaatcgatttctttgagaaagcacttcaaggatatcaagatgaattcgccgaatccgaacctcgttcgccaatccttgtgggtgaaggaaggatagcgtccgactggaggttagagattgcctggggccgagcattagttcgtctagctagacagaaacttgaggatggggatgaagaggaattaccgaaagaacgagttcaatctatcaacccaaacgcaaaagctggaaaggcgaaaggcttgatgaaaagcaagaagcgaacgcgagaaccagagcccgagcctgagcctgcgtctgcatctgcttcggcatttccaactgtattggccaagacaccggtttcattgttatcgcctcgacaacttctgacccaagcagccgatcattttcaactgggaatacttctcatgcctcgcccctcgccgtccgctactccttcccctgtagaaccgataaaaacaccatttagagatccagtgacatccttccagccaaccctcacctcacatcaacgtctcaagaacattctagagattgcaactagcgtaagccctcttgtcgaaaagttttccgaccagaaggaacgagttcgatgggccacttggacgggaggaatttttgatcaactcgagatggaggcttctcctcttcttgcctccttgaaggatggagcagatgagcagaaggaagattggaagtttgaagtcgctctaggtaaaggcgggctctggctaggacttggctctcgactttcagaggaattcgagacttctgtcgaagaaagtgaagagcaagatgaagcacaggcagagttgaacgaaagcagacggaaagaagcaagggaacttttgcagaaagctttggggtatttgcaacaaggccgaaagattcggcctcgaataactatcgttcaagactgtgggaaggaagaagatgaagaagatgagattggcccgttactggtggaagggtatttgacgctcagtggtttggtagattctgacgacgatgaagaaatcgaacggttggaaggtctcgctaggaacgaaggttgggttgaggatggagatgacgaggaagatggagatggagatgaacaggatgaggatgaagatgaggaagacatgtccattgattgattatcaacaaagttataatttgtttgaatagatgtttgattaaactcgatataacatctggacagactcgtgttgcttgtgtgcacaagatttttttgcgctaaccctcaactatcttgattcatcatagctggtgagcttgagagcggccatggtatatcacattcctacatccaatcatcttttcgattcttactctagctcttttctcccctgaccttgaattgcctgcttctttcgtgagagcaccatgagatgcaatccttgtcggtcgtatgtcgatttcaaaggatcgtcctctattgtctcggatgagaaggatttatgtaaaagtgtaaagaatcgcttgtccgccttcgaatcgatgcatgggcagaagtgattagtcccaaatcgatcgaaagtcttgcggatgtatgtagacgagctcacctttctacgctttttgtaagcgaggtagatgattggttgagattcttgatcgtccgtcagcagtatcagtgtacggactgtgatagaagatacgaggaccaaacattgagtgactttctttccagagagcaacgatcacattatttacgcatacctagcagaggaaaactgggctcaaagtatacgcagtccgccatgaggacgtagtcgggctttggtatgctcttgggcaacactgattctccccaatcaagcaccgaagcttgcactgtggactccaagccgttcaaagcgacgttctccctcaagagtggcatcaacggtctagaaagtcgagagaaatgtcagaacacacctttcactctctatagtatgatagaatagccgtatgtacgagcggaaaggcttactcttgatctgtagcgtatatgttcgctcttggctccttcaatcctagcaccaaagcaagaatacctgtccccgcgccgagctcaagaacatttttgccagccaagaggtcgggctgctttgacatcagatgcaaaaaatagttacacatgatctattactaggctcgtcggggaatagatagatagaggagaaccatatgtccaaagacagaatcagtactctttcaaaccagaagggagttttaagcatatacaaacctctccggctggccaaacttaaaacgagaaaacgagaacagagttaggtgatcatcaacacggtccattcacgaacaggtgaatatatcatggatgaacaaagactcaccaacaccaccacatcctggcgaggcatctattgctagcttgcatcctctttctagcccatcgaagggaacaattgttgtctgatgaagaacagtcggcctttgatcaggtcccacatcggcattgtccttgaagaagtcctcagtggacgaccgacgggacaaatttgggcttccagtgatgatttcagtcatcgatatgtatagatgtttgtggtgtctaccggataaatcgcttaagatatgtatgagtcctctccgtttttgggatgtgagtgtacgtgtgtccaggtgtccgggtgtccaaatatgagcgcgccgaagagagttgtatgctcgatggtatgtgggaagaagcgaaatcaaagaatatcagattctctacccagtccatcatctttgaccttcaattactcgcttgtgaccgatccatcgtcttcttcctctcgacaatctttctttcgtatctctttgctccttgagagaaccgatagggagtacaaggatgaattcttatgtgagtcacagtcgactactaaaccttggttattgctgctgatactcaggcctgatccaatgatcacatctgcagcccgtccactttctatcacatcatctcccactcttgtttgtggccgggttagaaacagcacctcatgccaatccagtgatcccatcagaaacagatgccacagaaactacatcagaacttgcaaattcagccgtagaaggctcagatacctcgacaacacgcccttctcgaaatcaacaatcaactgaccagtctgcagcatctgatgaacactcgttctcgttgcttcatcaaagactacgagcaacattaggagcattaggacctagtaaggtctgggaacctatccgggcaaacgaggatgaaaatcgaaagtttcgagtcataatggttgacaaggtctgttcattcttatctatctatgtgaatgagcagaccaatctaaatatcatctctggggttccggctctgtgtgcatctataaggatgtccggtttccaccttccaaaatccctttcccttcaactagcaccacgtccggtcaagtccctccccctcctcgctcaccactatctccactaacaccgtcatctcccctctatcccgacggactgatcgcacctatttgggtacgaaagcacacagatcttgtgccagcggtgtttgtattatttcttcaattgaaagagagttcagaccctgaagtgaatagagcggcagatgagcagttaatcaaggatctcatggtcagaaggaaggcgctaaacgagagaggaatcaagttgactgtcgtccttctggccagtagagagttactcggtaggttgcatcatgtgccgtgactttgtctgcctcttgtcatcaactccgttaatgagaatcatatgctgatatttgatgcctaactttaccatcagatgatacaacgctcgatcctcgtctctctcaaattcgtcgtcaatcttctttggactctcgagcgtcgctgttcgttttgactcccgtctccacacccgagcttgtcgattttgtacaatccctccaaggcgtactatacgaacctgcgctagattattatcacgcgcactcgaagcgagtcagaagaaagaggggtaaattaggaaatttgacaggggcatctggcggacttcttggtccatctgctgggacgggaggaaaattgctaagcaaagaagggtgggcggtgaggtatgaattcaaggctggagtgtttgcagaaattatgggagagttagatgcagtgagtgagtttcaaatggttctaaaatattatcttcaacttacaccagtcccaaaatgtcttggataggcccgaaaatattatctggactgccacgctatccttacccaaatgtttcactcaacgtctctcctgcctcctcgaacaaaacgatgggcggagagcaaggtgttggctgattgcgtggcagtaaaagtttgcaagttcttcttatatcagggcgatacaagcagggccctcggattcttcaggagtcacctcaaggcgttcgaagatttaagtaaaggttggggtataggtgaagaaaccttcgagttttggagctgggttgctagacagtaagtatagaagcagatttgagttgagttcttttgatcaagtattgacttatggagcggtctgtgttcgctcaaaatcaggtatcggattttcgcagagctcctggaactggcttaccaggccggtaacctcatcattcctgttgcagaatcttttgcaactccttctaatgaccaagtatcaaccaatgttctcaatccagctaccactctacaacatcctggtttctacttttatactgcagctaggtgcactgtgcggcggagagagtgttacgaaaaagctattgatgaagaaaaggacgcgctagaggtcggtctgatcggacttctgacaaagatggtcaagatattgattgcttgacttttatctttcagtccgagtctggtgccgctgctggatttgtcaacactagccctggatttgcaaacgaaaagaaaaccgatcactcggctcttatcattgaggtttgtctggtcgagcttgctcgaacttcttcgacactcgttttgttaaatttgaatacaaagttaaccttcttctgagtctatgttgccatttctagctctacacgaaatcatacgagctcctcaaaacaacgccatctgttgtggcgaccgcaagtccgaaccaaactcgaacgacactttatatagctttcctgattgccgaagcctatcatctgtccggccaacacaaccttgcgctcagatttttcgaccgaatcagcaaactctacagaaaggaacattggactttgctaggaagtcagatgagaaaactttgggtggagtgtgcgaaagaagagtgtaagtgggggacggtcattaaattagcgattgaaggtttaggagagggagaggcaaattgggagattttgttgagagaggctttggaagtaagttcttctctcgttaaacgatgactgcgttgtaacttagcgtccattggttttttaacttaaactagaatccgggccccacgccacaagagaaatcaatcatcaatctgggagaatcctcagcgccgctccgtaagtattagacatctcaactcatagtcattgacttaagttatgactgagcacaagcgattatcttatttaacagtggaagtgtcatcgattttctatctttcgacgactctcgccaacaattcctcgccttaccaagtccatttacattgccccctcaaaaatcatctccacaatttgccgttctcctccatccgcgtagagttctccgacaaaagtatcccacccgttttggtcaagcatacagagtcggaatctaaggaagtgcagttggtatcaccagatgaacagggaagcgggggagcttctctaaggtggaacccgggtagtctactagtcatctctggaaagatcgacacgaccggtatcataggggagcttcaagtaagcggttttcaactatgaagtcttagttgagcgcccgtctaagtgtttctttgtcttcaatcgaaataggtttctacagttgtgttggaacttatgcagaatgattgggttgttgagcttcgttttgatctgggttctaacgaacccagatcagcattgaacactcgatggctcacagcgccttccccacccaaatttgtcaatatcgatggggttcatccttctttcacagtgtgagtgatgacggtgcttttctcagtcgtaagctattgggtcccagttacaatccgctgaacctttcccttttatctcataatgcgtgttttctgcgctttgtcagtgtcaagcctaagcctcatatgttggatattatgttgcatcatacatcaccggcatatatggatgagaaatacccaatctcaatagatatcacaaattcagacgatcagtcgttgaatgtgtggctggatgtcttactgtacccatcggaagatcaacgtaagtactggctcttatgcgtgatgtgaaataggcgaaaagtttttcacgctattctatcactacttttagtcaataccatcactctggatgaatcatattccagttcgatcatcaagcaagtatccctcggctctctttcccccacatcgtccatttccaagactctcttcctccatttggacgggataccaggtgatcgcatactcgacttttcaatccagtctcgtccgacctcttctatcaaatccctctcgttagaagcatcttcaacaccaaactcagaccaggaacatgatgttctcgaaaagccatcagaaattatccgtacaattagcattccctgtgtgcatgccatctcggcatcgttcacaatgagaaggaacccaccgcgcaaaccacttcctgggttgttggacacagcccatttgaatggcgaggatgtgttcgaatcggtagaagaatgttggctcagttctaaattggagatggttgagagtgaggaaatcgtgatcgagaatatagaattcaaacaaggggtttgtcttcttccgctattgcacagggttcagaagcctgtctgaacaccgacctgctctcctcttttgtttttaattttgggttactttatataggatcgacgaaggtgcagaaatgtcttctcttcattaagttcttctcaagaaagtatccccggaaaaggtgcggttcaactctcttccttaagacaagcttgaaactgatcagccttacgaaacaaataaaacaaacagtttggaaacaagggcatgtgttttcagtactttcttccttcgatctggcgctccctgccagtttggatacaaacctcgaaacggatagcggtgaatcgcctggctggttcgacatcacctggcgaaggaaagccacgtccactcaaacaagcaaagcagcgcacaccttggtacctcttcccgcgatatctgtctcgcctcatctatcgacccctatctctattccatcatcgacatcccacctttcatgcaccctatctgtctcgaattctgaccttcgactgctccagccggctttgatcaatctgacaattcataatcaatctccttcatatgcacctgcaaacctccagatacaagtagactcatcggatgccttcgcgtggtcgggccctcgacaggctgccttgcccatcttactagctggtcagagtacgattgtcaggatgaaggcttcaccgcttcggacaggctgggtcaaattgcccagggtgagggtgtgggaagtcgttcagtcggctgaggagggtgaggaggcagagacggagatcaacccggttcgtgtagataggcagggaatgtatggcgacggatcgagtataactgagaacggcggcggagaagacggaagggcagaaggttggaaggtattcgtactgcctgtttgaagaggcttgataatgttcttgataagacgtcgcttgttgcacgttaacataattggtcccttgctcttaacttctttttctcccttcaactcaaaacgcgaacacagaggaatacctcttcgccaggctagtcgataaagatataaatagacaatatctcaatacagctacacggatctactctcaatttctgaccgatcctgctctttttgttttagaccaggccttgttcttgataaacgcgtatttaacagcaagacttggtctcggtcttgcctccacagcaagattccgaagactctgcagacttgctcttcatgttgcaaccagcacaaacacatttttccggagggcactataaacaacagtgacgcgtgatgttagcagttgcaagagagacgaccggatcatgataagggcggctcacagtgcatttcaaaccgtctccttggcaaccacacgaggtggtatctctcttggtcatgtcacatccggaacaaatacactgtccagggacgcactgagaaagtagagagggatggtcaagctattggtcaactgcctttgatatatatgaaaaaccggtgatgaacgcacagtgcaactttgctcggatcctccacaagcgcaagtcgtcttgacttccttcttggtcatatcacagttagcacaggcgcaactgtcggtagggcactgagacggggaagtcgggtcgagagattaattaacatgagcgttcaggacagaggtgtatcgagtacagaggatggaaggtattaaaaatactgacagtgcaggctttggggtctccgccgcaagcacaaacactgggcttggtagaacagcttaggtgtatgaatttgggggagagagggtaaatagaagatgatactcggtcagaagttgtaaacacaagctcggtcctcccctgaccactccacagtgaagagaaaggaagctacgagcaggccattttggttctgtttttgtggttgagtggatgaaaagggaagaggatggatataagtgtaagtatgtggaggacggaagataacaagagaacgagccacagaggttgacgaggctatcttttattcaattcatcggccagctcatctgtaaaagcccccgcccatgtttggccagatacgccaagggttcacccacatttgcccagactgtttcattcgcatatagcctcaccttcttgagacttttaaatgagtctgctttatcaaacaccacaccaagaaagacagattgaattccgccgttagaagaaaaaagatttggttgtgctgacttggaaatttcgatcgtactgacttccaactttgtccgagatgttcctttgttgacattgcgctgatgatgcgttcagaaatcatctcgtactaacggtgcctatgacctacttgcccctgtcgttaatgtcgttgttgttgttattgtttgcccgtcgcatctacagagaataggcaagaggtcaaaagagaatcaactctaacctgggttttcagttgctcagcacgttctcctcccttacttcaccagatcttatcgtagcgccaccccctcgtatgcccgaaacaccacgccgaacccggcaacctactgacgagcctatgacccctcgacgggcccatcaaccctccttcgatctgggatatggaacacctcgctccccacgcgatccccttcggttccctgcacaatcagctaggcggaatcggacggcttcaggtatgagtgatgtagcactcttggactctcaggagaaagatcctcatcatcacaatcgatcccatatgattgagaacgatcgggaacggttggtatactccagagaagaggagtactcgtctccttttcatcaaaggcaaccacaacagcgcggtgctggtatgggcctcctgccggagtttaggtatgatcaagctcaatatggtgaatctggaagaaaccttggtagtatgccttatccaaggactcccgcgggacctggaagcgaatggtccaggagacagttgatcccaaagaggggaacaacgagaaagattcgtctgatcgaagggagaaactttgtttgcgagtatgcggttccgacggctatccgaagtgcggtggaaggaaagtatctgcaaggtacgtccccgtgctcgaacaagttcttatatcgtcgtcatatacgattgctgaatgtacttcattttcaaatccctaccttcatgtcatcggccttgtgataactagagggcaaagtgacagagttttcgtgagttctgttacaacttcgaaacattggatcattgactaaatacatatgtcttggtgatctttccttcttgaagacacatgagatatacgggtaggcgtgcttctgatcactctttgacgctgctgtcactaacgtcgagctttgtctgcttcttgcatttagcggctacctgcgaccccgacgactttaccaatgccaatggctggtctctgcgaacgtctaattaccgtcgtgaaactgagctgctcattgcagtcacctcttgtaaggtcatttgcgctgagcaaaagttgttcaccttgtgaacattaaccgactgattctgtacattcttgctttgatatacagacaatgagtccaaagagctctattctcgaacacttcacaacattatgctcaatgtccgggacatttgtcgatctaaaacatccaagtactggcgtaccccttcagagaccgggatcgaagcaggatttatcaaacccacttggcaaaagatcacagtctgtctggtttgcgatggtataggacccatggacaaagaagttctcgatctcttggctactgtcggagtttaccaggatgggattatgaagaaggaagtcgacggtagagaaaccgtcgcgcacatattcgaggtcggtggtcttcctgcacactggctcatacaatgtaggaaatgggcagacacagaatttgctgatcatataacacttcgacgtaattcgtttttcctaacagtacacgactcaactctcggttgactccaagccggcgctgaccttaccccgtgaagatgatcccaataaccttgttcctgtccaaataatcctgatcttgaagcagaagaatgcgaagaagatcaacagccatcgttggctttttaacggagttggacgcatgttgcaggtatgtcttctctaaagccatccaaattaggtctttttaaaaaaaaggatattatgcgtactcaccagtcgtatcaacggaacccattagcccgaaatttgtgtgctattggacgcagggacaaaaccagggcataaagctatctaccaccgtacgttcacatccttacgtctgcatcggaaatcatgaggattatcgcatctgatttttcatgttttccttggtattcactagtctgggaagcatttcatgtgggtttcattcttgtctccaatacttgtacgtggtcgaaactttgttgttaattttcaactcaacctctcagaacaacgccaatctaggtggagcatgtggagaaatccatgccatgttgaaaggaggcaagaagcttttgaatcctcttggtgcgttcatattatcttcttttgaaatcagttgcagatcgacaaattgacatctacccttgtttctctgattcttaagttgccgctcagaattttgagtacaagatgtcaaatatcttggacaaaccgttcgagagtgtttttggatagtaagccgtctgttcatatacacgttcatgaaagtaatttatgcccatcttctttcggtttcacttgtttcaagtgtgagcgttcttcctggagcatttagcgcttaccgtttccgcgcaatccaagggagacctttggaacaatatttccatggagatcataccagtttgtcgacctttctttctacatccggctatcgtgacgcaaataatcttacccttccttatgttcgaaaatagtggccgagagacttggcaagaagggtaccaacgggatggggattttcacgtgagtcgatatctattcacccacataatttagaatatcgctcatacgatccaatacgttgtcttctacgaaccaaagcaagaacatgtttctggctgaggacagaatcctttgtttcgagctagtggcaaaggtatgttccttcaacttttattttttgatgttttctggtatcaatccaacgatgttgaattgtgaacctatatcatttttaggcccgtgacaaatggaccttagcatatgtgaaggctagtaaagcggagactgatgttcctgaggaaacggcggaactcatctcgcagagaagacgatggttgaatggttcttttgcagcttccatcgtgagtcatacccatgcctcatcccttgtgatatgttcgactctgatgtttattctgtctttcgctccgtagtattctctctatcatttcttcagactctatcggtccggacacaatatcatcaggtgcgatgatgttcttacacattgatatgttcatgaggctcatgatatcaccgttctttctcttcagattgtttttctttcacattcaggctctggtgcgtcctttcaacgtatgattctgtgtccttttgatgaaggttgttgacataaccagatattgaatatacagtataatgtataccagcttatctttagttggttcgcgctggccaacgtttggcttacattctccatcattgtcagtctggtacctactctgagcccaggaccgatctatctctttggaacccctgcagtggtgagtttggatcagttcattactgccaagcttggcattctgctaactgcataacacccgcggtttctaccggatattcttgttccatcacaacaagacaatttgggtcaacaatgggttgcaatggctctatctgtcgcttctgatgcttcaagtaagtcaaagacgacatttttctctctatgtgtttgacatcaagcgctgatatctttgtttctccaaatgtgcattgttcagtttgtgttggcgctcggaaaccgtcctaaaggcgaacgattcttatacgtgatgacattgacgttagttacaatcttgattctcgtactttttgcccattcaatgcttattgctatctagacctatgtttgcgcatctatttatcaggatattcgccatcttgtcagcctatctcatcgcctgttctgtaatcctctccgtcaaagcgtttcaggtgcgtacattatcaattctacattcaagcccaagcggtaaccgagatcgattggttttgccgttattgaatatgacttcatagggagtattcttaaatcctgatctgccaggcttggcccagagatttgagtctctattcaatgcgacgaacggagtactgttagctgctctagcttcaaacttcggaatctatctatttgcgtctgtcctattcgtgggtattgtcttgctggttgcttgatttcgaatacatgactgatggagttttgctttgtcgtgctgtgatatgggttttatcactctagggggatccttggcatatgttgacgaggtatgcgcccaaggcaccggaagctcatgttgcctctcatcagctgggcatatgttgataatcgttctttcggtcttgcgatctagtttcccacagtacatgctcatcgcgcctagtctgaccaatgttttgaacgtatatgcattctgtaagtaactcaaatggactggtcgagtttcattcttttcctgagtctgtttcatccttgaatcatatttaggcaacttgcacgatgtgagttggggaacgaaaggtaagttcatagatggttctagctccgatagtcaagaagctacgggactgacgctacatcggacattcggataggttccgacaaggacgatactctgccttcgatctcatccacccacgaaaaggggcagtccgagccagttgtcgaggatattgagaaggcaagttcatttgacaaacaatgagcgcccagtgtctgccccgtctgataacaagtctgcatgcacattatcatacaggatcaagcggatatcgaccaggccttcaaggatacggtttccagagctatctcgaaatctctgccagaaacagttcacgagaagcctacacctgatgtcagtttctgtatctcttatctttcgttaccatattttatcgagtatgctcaattgctgtttatgctttgttgcttacaggattctaataaaacattccggactagattggtctgtttatggatgttcaccaacgccgctctcgcgcttgtcattcaaaacctaaatggactagacacaaccgatgctcttgtcctccattgcatcaactcaaatgactcaaataacttgcagtcaccttccatggcggattgtgtctcaatggcaatcaacgaaaacgaaatgcacctggtgaaaaagcaaaacgtgtacttcaagtttattctttggtcaacagtgagtgcctcatcgcgtaacctgtctgatagtgtcggacaatcatgtgatgtatctgactcaacaacttattcagttcggtctttcctttgcgaggtttatgggtgtaagcatgcgcatgatcgactcgttgatatatttaacgagtcaaacgctgattatctttgtttaacgcttatatgccttttttatgattgaaaacagtgcctcgcgtactttatatggcgtaatatgactcgatgctgccgtcgctcgtagatacatcggtgattcaacgcataagtcattaactctcttttctttctttaccttacaaatgttgtttcgattattctcaacttcgtctatgtagtttttctctcgttttgtcatgtcctaatattcccacatttactgaggaatctgtatacccaagacaggttcggtagtttctaaagatgtatcattttggcaaattccccagataagataaacataaactgatcgctctaatgttaaatgaaagaaagtcgatggatgacagataggaaagactaatgctgctgctccaaaggatgtatgattgctcccagctgatagagaagaatgatcagaagaagaaagtgacgccagaacattgttaaactactacttccccagacgcaaactccatatgaaagaaaaacgaaccttggtgacaacgcgaggcattgtaagcttctgatgcgtcttcctggtagcccactctgttcccacagactgtgccaaacttgcttcgtattgggcggcactaagagatcagaaagagaggatatcaggatacgaaaccacacgacaagagagcaagaacaacgagtcttaaaaaccaaccttgtgtaaggatacggtaggtcttttgtctggaatttggaagctttcttgtctttccgttcgctgatgatgacattggacttgttgaaatctttccgctgtctttgctcgatcccttcatgttttcgaatgaccttcttctggttcctttgcttcttgacacccgttcctccccaagcgccctaatgcaaaaacaggaaaaggtcaattggaaatgctctcacgcgatccgagattcaaagatataatatcagacaagaaaaacacatacccatccagggagagtgatgtcttcttccattggggcatctcgagcttcttctcgtcgcttttcggcagcgaactcctgatgataggatcaaattgaaaagtgcagaacggggtatggtcagacacattatggaacaaggaaccggagctggagatgaagaaacgacaaagaacaaacctcgactacgttatctccagcaaatgcctgggcgacaaggtccctctgtctgatggccaatggaccctgcatctcgtggtcctcgatatcactatcgctctctatttcgttttgagcctggtcttgttttgccttcttgccttttctacgtttctccgtggcagaggcaggaggggcggcgccttggctgcttgtcgtttccgacttcttgagtgagacgtgcgacggatcgatttctaccgcagcatcctctctttctctctgacgagcctcctcagacttggacaaggacttcttcatagctttcgcgctcttctccgcgccttcagcttctcgaccgaccaagttgttcttcttcctggagattttcttgcccgacgaagaagcggtgagccaagggttttcttcttgaacagtctcaccatgagaagcagaagtaacagtagccttattagcaggctctatatcgtcttcagcggaagtctcgaaggcagaataggcagtggtattgtcaaacttcttagtcggagtggaatcctgcaagattattcagtgaattgtttggaaatccagtcagtgctcacgattagcgatcgttcaatatgttcaaacaagatgacctacattgacgacagcagtgttgaaaaccatacgtcctttattacttccaacaaaagacggtccggcctggcccgaactgccatccccttcgtctcccgaaatctcctcatccgactccttaagcttgcccatctcccgcttaaagtcatctaactcctgattggtttggctctgagctctagccctagcatctgccatgaacttcatgtcgaacaagcccgacttcttggagtggctctttgctccctgagcgccttcgacaccttcctcttcctcgagtctggcaagctcctcaagcgctctgccccgaatctcctcgatcccctctccttcttctccctctgaagaatcgtactcgtccgagtcagatccgtctcctcgcccttgaatcctcctctttaacttatcaccctgttctaattgctcattcagctctcttctttgatcgacatcaagatcgtccgcttttccgagcatgctcttcgcccatttgccggtgttcttgtgcctaagcgtggccctctcgatcgctcgttctcgctcccttttgatcatctcttcttcttcatcaacctcaggacccagaccagcatcctccaacttctgcgcgtttctctccttctccttcttggcaatcttccggaaagcctttgacttgattttagagactcgcttcgcttttgcttcagctcggaagttgagttcacgcattcgtcgaagttcggctcttcgggcagctacctcttcaatggtaagattcgtcatggcaagttcttcggtcttgttcaaatccttctcggacatgttggcagaggcgataagggaggcgacggctgattcgaagtcatttgttggctgtaaaatataataccgttgagtgaggcatagcacaaaatattgtcaacaaaaataccatgattgataacaacacagctacaaacgtgagaaacaggaagcacacaccttgaacttagacgaaagagttgcactgcttgcttccgatttcttctggccctgaagagggaaactgagatgctctgcttccttgattctcttcatactagggccccacttctggacttcttcctttgtggcctcatacgcggccactcggtcaagcttgtcctgggctcgagtagcaagaggagcggcaacggcggtggaggaggatgacgtggatttgctggattgaagtagacgcttagcggtcgaagaggggagaggctggagtagagactgaagagtaagctttccacctgtgttttatggattaaatttcggttctatcagaaaacgagccagacactggttatgaataaactctgtggcgtaagaaacaacacataccgtcctgagcaagaggtgcaccaaattcaccctcctttcgaccttgctcggctcgatctttgagcacccgtctttttgtcttaggcgccacatcttcttcgtctgactcctcagcctttctcttcccagaattaagattggaaatgaaggactcgagccggatagctccatcttcgtccaagctcatctcaccctcgtcctcgtcctcatcttcttggtcttcctcagagtcatcatcatcgtcttcctcagagtcatcatcttccatatcttccagttcagtgttcttgtccctgctgtcgtcttcatcatcgtcgtcgctcgctggtccactcaggaaggtactgagatcgacgaaaccctcaggaccagcttcgtccgagtcaaaatctacctcctcctcggaatcttgagatgatgtttgctcgaaaacagaggcttgtcgagccccaatggcagaagaagtgggatactcgtcagaagaagattcggccaggtcaatgtcgagatcctcatcatcggaatcaggctgtggaatcgaccgtttggtcttattatccacaagtcaaatcaaggtttcacagtcagtaatggtctttgtcgggatccgctacaagaaacaagatccaatcttgaaacgcaactattgttttctgaatctcataggaagaaatacaggaaactcagaatttagacgtaccttcttcagaactttctttccttttacgttcttcttcatgaatgcctctccaaattcagcgtctccttcaaacgcatcgtccgactcaatttcctcatcatcctcgtcatccacaactcctttcccctctccactgacaaactttctaattctctctttcatagcctcctcatcatcctctgcattctcatcatcttcgtcgacctcatcccttcgttgggctcgttgggctctacctgaaccagcctcatccaacgtcaagtcggactcgacattcgaccgtttatgtttcatttgagcataatcgaagacctctaaaggatcggcatctgcgtgcggattcctacgggcttgacgggcggcataacctgcttcagctttggaagcggctgatcctcctccaccactttttggtttggatgtggaagcggatgaggcggagaacactgctcgaggcttgttccccgtttgattcgatctagatttccccatattgatgacaggttattttttggaccagacctatgctagcttatcttgtccagatgtttcctaagaagaaagagagaaagagtgtcgtctggcttctgttgatgaagaccggagggaaggaggtaggaaaggaaaggagtgagaattgaattatggcaggttgcgggtcgaaacttcaaaaaatactgtgtgggggccccgcggctgtgctcccaataggccatgcctcattttacccccttgcttgctagctagcaacgacaaagagtttgctcaatgtgatgcgttcatgtagcgctccaatagcaatcacacgatataagagaaagattttatcgaagataggtatggtaaaagtacatgtctttacacaggagtcgagagggatattatactactacattgtgaagtgggcatcttctaactatcccttgaaggagcaggatgattctaaccgatcgacaaacaaacgggtgactaagtagcctgaaagagggtggaaggggatcgaaagcagaactgtcttggctatgatagcttcctctccatccgtgagaaatacctcggcaagtcgatccgcatacagtggagtaataagacaataccctctacacccctcttatttactactctgtttgtatcctcctacgaagagccgaacaaaaatggtcataaaaaaaagtcctctatcagaatgcttgactcaatcaggagccgactgaagaggaccacgaatagggataaaagacgctcacctttcttgacgtccagaaccatctttccgcagatagcacatagtccctttttgtacgcgcaattttgacaatagatagccatgttctacacatcgaagataagggaaatatagagtcgaaccaaaagccgtcaaacgagtgctctcaggtaaacatttcaagaccgaacggtgctatgggttaaactcacttgagcaacagatgacttgcagtccttacatttattgctgtacgttgaatacggacttaagagacggtcgatttcaaccgtaaattcaacggacgatacaacaatcagttctcacttcaacgtttcggaaaagatatcgaagaagtagaggtgaaagaggtgtgactgacgagaaacgtttggacgataaaagtttgttttcgccaatttttctgttggatgaggatgaagctaccgtctaaaacaccagaacaccgttaaatgtttcagaccatacttgcaaaatcgataaatttcaatcgtgctatgaaagagagaaagataaagagaagcacagaatgcagaatagtaggaaagtgaaacatacaggatctggagcggcaagcctgctcgtctttttctcacatttcgcacaaaccatggttttacactcaaaaaagagccgttatacaaagacgtaaacctgtatacgaagacacctggaataataacggtcagacaaagatggtggttgtgatgttggtaatgacggaactgaataatcggttggtgattgataaaaagcagatatgagtatgaagaagggtattgaatgtaaccctaactctgagttataaatgctatcctggtcaacatttactctcagtccgtcggccattagtgtatgaggccgctcaaatctggcgttccacagacaagattcataatgccggtctatgagaaaaacatgcgatgagatacttgattcatcaattaagcaaggtcatcaggtagaagtacacaagcacgatcacaaaagaaaggaagagtcagaagagtgtagatatgaaattctcgaaccgagaaccgtgaatatggaattggagaaggagagggattctttgagggatatgaaaaggacaagcatacaaaagactagatgaatctacgcacgtgatatgttatgaaaagagcgaagtgtaacagatatagttcagactgtcgatttgggaagaaagcagataagaggagatgatagaggaacagaaagaagagagaagaccggaaagaagaaaaggcgaccaaagagagagcggaggactgaaggatgaagacgaagggaacgaacgtgatagacgagattaaacaccaaaaactacgaagatgagcaacatcaagataattatctttgtgtttagcatgccgagaaagataagaccttaagaagacttgccagcccaagcgtaagggtcatcataactctttgtcacgctcgtgaactcgccgaacgggttatgctctgcttctaacggggctggtagacctgaagcatctactagctcaggtggggagggaaatcctggcgtgccaggggtgatgggatgaccggcaacgcctcgaatgagctgagactgatgatgtagaaggcagggcatgggcaatgatagtggaaacgaaaaggcgagttagaagcagagacattcttatgaaggggagtcgtcaaggaacgagaacgagaacaagaacatacaggagcgactggcccatgctcttcaaaatctagcgacttgctgtctcgtatatgccggaaattgacagcgtccacgccatttgacgtcgcagggacaatctttcaaatcgtgcgcccaaaaaaaaggtcagctagttgttggattacgagacagagtataatgatggaggttgagataagactgaaacgaacaggtggagtcatatttcgaagtagtccccagtttagaggcatgaaccacttgtgcccctttacctcgctggctcctgattgagagccaagtcgacgaatctcttctttgcaaagtaatttgcgaatggcggacttgcaattcctgttgaaaccaaggacaacgtccgcgatggttcatcagttatatagttggaagaatcgatgtaaccaaacggccaaaacttacgcagacacgtttggatgttccggaaagttgacctcgtgttttagcacgtttgaaaaggttgcgtttcggttctggcctttgaacggagtagttgcgaactgccagtatacgcaagaaaagttgttgttagagccaaagtgtgtgaatatgaacgaaagaggatcataaacacatacgatcatctcatagaccaaaattcctaatgtccaccaatctacagctgaggtatgtccagttccttttattacttcaggagcaatgtactcttttgatgacgaattagaagagaaaggaggaaaagaaataggagatcagacaactgatgacagtccctgcaacggtctacttagcttctagcaagacaagcgcaccttctgtcccgacgaatgaatttgttcggaagtcggcgatacaagaacgagtatctaccataggcatctatagatatcatgacagagaaaaagaggtagcacaattcaggttagccattaagacttcgtttagtatatgtgcagagaaaaagctgactaagagaacatacacctgtagaagcactcgtccgtatcaatgcaggggcacctcctggctcgcccgattgtttcgacaagtcaaaatctgaaagcatgatgtgaccagactggtggagcagaatgtctgagtatcccataggagggatcatcagcggacattcgcggaacaacctacttagtgagaagagaggaaagagaggtcgacatactctctggcttgagatctctgtaaatgaatcccatcaaatgcagatattctagtgcagctatgacctctgccgcataaaatctggcgtcctcctccggtaggcattttccaggtctcgtttgaagggctcggaagaattcgccgcccatacaatactccatgcagaaatataagtaatcctcagactgaaatgagtgaaacagtgtcacgatgaacggatggttcgaggtggccaggatttcttgttcggccagagcccgtttgatcttgtttcgcttgatcatctccttcttggacaggactattcaaaagacaagtttgtataggtccacggttgaatgtcgattagcgaaacgcgcaacgcatgtatcaatcatcgaaagtcaaactgcaagcgtacctttcattgcaaacaagttacctgactttttttctcgtaccagatacacctttccgacgtctcctttacctagcaacttaatcttctggaaagagctaggtccaacctcaacctgatcggacgacaatatagataaccacgagcacgcatatataattagtcttgcgtttcgctgatgaccaacatgctaaatttcaaaaataactcgtagatgacttaccgaacgaagtttgatcgagttggaactataagtccgtctgaaagctagtttctgagggctttccggtatgtcggcaattcctagattcttctgaggggcgaatggcttcgatttggaccctgatctcaaccttgacggggaagacgatgacttttccagggactcggcctcattcgatgatgagaggtttgattgcttcccaccagagcttgagccgttggcctggacatgttccgtgaacgaagccgataagaacgtgttctttgatgttggaatctgggtcgcaggctgcttgctctgactcgatccaagcccgttgcttccaaagagtttagtatttggggccgaggccactcgacggatccaccgagtcgttgctgatcctccagaggatgacgatgacggttccggtggtggaggtggtggatgaggaaacggatgagctcctgtctcgacagagattgacgatgatgaaggcgtggagactagtctgatctgtgagctccccttctctccgttggttgagtaatccccgtttggtttcagcaaggaaccaagcccggtcgaagaagatttcccaagacctttgtacttatcagtcttggaagacgacgaaagcttcgaccacgatgacttcataggcgacggggaggatggacccgaagtacagcctccgctcatctgaggtgaggatgatgaattagagttggatggccgagtgtcctctgaggcagtgaaggaggacgaggaattagcttccagatgaattggttcgggatccccagtcaggatgaatggagacgaggagggattcaaagcgaaagctccactgggagatctcaacctagcctgattgacttgagaggaagaccgactggatggaagagagtgttcatcactgtaggatttggtccagctaggatcttccaagctattcactccactgttgctcgtgccggtcggagctcctgagttcgagttagatgaggccgagcgagatttggaggagaacttgaacatctttgtccattttgttcctgagttggacttttgagacattggagacgaagccgaggaactcatgagaaagatcgagtcgtcgtgtttaggcagatgtcagggcacggtcagattggagggttggcagtctattttcgagatgcaatgaaagatcagagacttcgagtgtctgtctgatctagttcgttgtgattgaggaagagcgaggaaaaagagggcgaaggagggaaaggacggagatgagaacggccagagggcgaacaaagagtattaagcgagagagaagccaagagtgtgagagataggtttcaagatagcatgtactgcctgaacgacactacagattccttgcttgaggtaaattaagagtttccaaagaacttaccaagctcaaaaggttcgtgaagtttgtgatctggatatgtatttacggaccacagacccgaaatgaacgttcaagggaagcacgccaactgagcgagatggcctgtgagagagaaatatcaaaatggtaagcacgataccaagcagttgagtgaagtcgagcgacgaacacgtctggctcacagacaagattgagaaaaggtctgatagcgtactcgcaaggaggtataaagtgtaccggggtgaaaagctgacagaacgaagcgagattgaggaagacgatcggaaagccttacgatgtaaacagcgcgaacgatatgactacgaaagattgtgatacgtactctaataatttcctatcgaatacagaatcgcaaactacaacaaatattgagattgattggaaggattatacgattcaaataggagggcattcttattcagtgtagtcacaaggtacacagtttgaacgcttcctattagccgacaagcttcgtcacttaaattcatcatgttttgttcagcttgtgtcgttttcttcatatctgcctctcaacctaactcagcaacatataggcaactcctttctcatcttctgtgtctatatctcttgttctttcgctctcgtttcgggccgtcgtcttaagatgaagcaatcgacagcaatactgctctcgtccgttcggcgtaggcttgtgcagatacctacagcagctctaaccttgcctaagagaagtgtgatcacccttccccaaccgactacgtccgatgtcgcattccctacacccccattgaacacactccatccggaactccttcatgcgtcccagattcaccctccctctgaatcatcgtcatcacccagctcttcctcttcctttcagacatcttcctcgagtggtccgttcatagacatctcgtcaaatgcgtctccaaactcttcttctccaccgccgtcttcccattcgaatcatccgtacgcaggccagcatgtccagcccacatcagccccggctttggttgagcctttaaatctgccgaggccaccgcacagtccccctagatcgaaagagttccaccctcacccgttcgatacccattcgatcgtgaagcatttggaaaagtctacgatagaatccggtgtagcgagagaacttatgttggcaacaagagcgttggtgattgcaaggactgagaaggcgagggatcagttgatgagcaaagaggatatggagaacgtatgtttttgaatggcgatgtttatcctcaaccactttttgtatagtaactgatcatctacttttgctttctctcttccctgactgacagcaagcttatctcttcagagcggcgttgtcagagctcaggacagttctctctctacggacgaggaatgaagaagctaccaggcgatctttgaccatgattactgaacgggaggtcgaatcattggatgttagaatcaaggaatctatggaacagctgaaacacgagtaagtctatactctcgtttctttcaattttttttctccaagaagctcttcatgaatcaacccggtctgaaacatcgaatgacttttttccaattcgttgaatctgcaaatcagtatcgagattgaattagaaaaccgaaaagcagacactagggtagaacaaaaggcatatgagattgcgattgaggtgaattttgttagactgccctagatatatacgaggtgctaatcttgccatgattgttttataaattcttttgttcgtatcacaacactcaggaactgaacaacaagtttactatttcgttgggagaccttcgaacagatatcgaacaatacaaatgggacaccactcggaaaggaatcgttggcattgcgatattcgtcctcttcatcgttggatctaccacgttgttgactgaatttccaccaacaactcctcccgctcctgctccaccgccactgtcaacatcgtcgtcatcattccagtcagttggctatgctccctcatcttcggcatatccttcaataagcggcagcacaaattcatacggagatcattctaacaatggaaagagactcggtccctggccaggagctgtatttggtgaagcggatgaggatgggacagggagagaatgtatgggtggtgtccagggaagcgcgtagggctgtgtgtgtgtgtgtgnnnnnnnnnnaagagacagggccaaatatattgtagcttgtataactctctcggtcatcatcttgatatctttcgtgaacccatctgtatcgtgtatgttcaggctgagcaaaaagacgaccgcccgcccaacatgaatagaaaaagatgtctagatcgacactatgacgaaacgactgcttacgtaagccatcagcgagaatgatgttcctttttttcttccattcctctttgctttcatcggaacgactatcctcttttccttccttgctcaactgtttggttcataagtcaacaagccaacgaaccaacaagaaagccagtctctagctctctttgcctttctctctttttctttttctttttctttctctgatcggacttcttcatagtcaacagtgtatcgttcaatctttgtgagtgtcctacgtgagaagcggttttgtaaccgtccaggacggctatttttgacagaacaaaagatggctcatctctttacattctgtgtatcgttctatctgtccggcagtctcgacatttggaagaccactgtatcctacaaacttttcattgtactacaaagtatcctttcatccttttcagtccttgttcttttctcctacaactgttttggacctggacattggcccgtcagtcgccatcacatcaacacatctttcgaaaacatcttcgttcctcatcaggaagcatttctccgatctatcgtgtccctaattgatctctgatcaggttcttcagcatgccaagattgccaccttctcaactccctccgccgtctcctctccggactcacgtttcatacacgtccacttcgtcagattccttcaatgcgaccacgcctaatatcagtactcccgaacccagctcgccaagaacagaatggaagccatcgcataaggcgacgctgtccgcttcatcaacttcttccaacacctcgtcttcaaaccccagtgctaatggaggtcttggtgcgactagtagtggagctcgaggaactggagcagcatctcgaccttcgtcccctggagggacgggtttgaatggtcaagccggcgtgttcacaccttcgccggctgctgctgctgctgctgctgctgctgctcgatccgccccatcacagaccactcctggaatagctaaggagattaataacaagactccagctgcctcagtcgttattccctgtagtggaagggctactcctgggataggaggtattgcttatggtgcagtctggggagctaatggcaacggacagaatgacgtctggggtgtatctggaggcagtagggttggaggctgggagggcatcatcggagagggaggggccttgcctcttccttcgcccggagttggtcttggtgtacagcaagacattcatgtcgacaacgagctagataagcttcttcgagatagtcctttgatcaaggttagtccgtctgaaaaaggttcttttcatcttgaggaccagctcacacgctcatcaacgtcacgattcttgtcgtcttttttttgttggtttcatagaacttgactcagaggattactcagaccgaagcatctgtcctatctttgtccgggcaactcgtcaacttgaatacttctctgacgtctcttcttcccaaccggccgacttcctcaaactcttcgacttctcaatcgtattccgttcattcgaactcggtacaggctaatgccagccgttcgccagtacctcctggactctctcttccctccaactctggtactgctgacatcaacggcaacaacaatagtgtccgagatcgacaaacagagatgtcgcccgatgcgattcgattgctcgccagtcaggtcatgacgctctctacttcggtcagccagcttcaagctctcgttgcgctccagcaacagacatctaaaggaacaacggtgacccctcaaatggatcttccctcgccgatgcctaatcagtatcgccgggagcaagtgcctttcaacctgacgttgcctgattccaagacggtcacgcctacaggaggaccgactcctgcgcttacatcaggagtatcctccccttcggcgcatcacaccccctccccgtttttcgtcgcgcctggcatgaccggtggaacggcagctccgctctcacctgcgttccctctgccttcgcctggtggaggaccaggaacgcctgccggtatgtctctagctgccgccacccaatggatcaatgcgccaggatccaggccaggaagcgctctctccggtcggccagatatggctagaagtttctcgagtccatacaccggtactagcggtggagtaggtacaaatacaggagacaagccgccgacgcccggagcgactgggttgcgaaggccagtaataaacttgagtagagtggatagttacgaggctagtcaaatttatcaattcattgtctgaagatcataccaactgaaacgcatatatctaacgttgataaaccttgcatgttaggaaatacagacctcaaacgaaagtggttggcctgctccgcctccgggtcctgtcactcctggagggtccaacatgggtcctggtacagctcacaacgttaccaagtgggaccaagtcggtcttgttccagaattattgagagctgttctcaaatatgggtaagtccagtcactcctcagactatcttatggtgtccatgtgtaagatatgagctgacgtcttctttcactgcatcttgatagaattggacctcccaacaaggttcaacagagggctttgcctttccttcttcgaggagcggatatcattgctcaagcccccccgactcaggaaaggatcattgcttagtgagcttgcttcagacatggatttattctgctttattgaggtgttcctcatccatctatgtgcttatctttaccagtgtcgtgcccggaatcaatgcctgcttatcccatcctgtcagtgggccctacaagggccctcaagtagtgatcatcaccactactgttgatcaggcgacacaggcctataaactgttcgttattttctttgtttgagttcaaatgtgcgcagaaagatgacaccaggtggcttgtgcacgaaaatgtaataagcgttcgagacctagccacccctctcggtcttcgatcttcgctctgtgtcggatcttcgtccgccaacaattccaacggaggctggatcgacgagcagcgaatgctggctccttcaattgtggttggtacgccggccaagatctctgagctgttcacttcctctagagctttgagcggagagctcgtcaggttcttggtggtaagttggattatctctctttcctttgttttaaatttccttgcttatgaaatccgtatactccttatctagattgatgaggttgaccaacttatcgctcgaaacctttatgagtttgtcgtaagtcgatttttctttttgtgagcgatgctgatcatacatgcatctcaagtattctatcttaactgttctttgtaaacgacagatcgaggtcgtcaagaaacttcccctgccccgatctcgaggactggcgggtgcagttcccgggggtggagccctgatgtctccttccatcctttctccctacgataccggagcttcctcgcctttcaaccccgcttccagtacccagttcccaggtacttctcgtcggttcccaggcaacaacccagccggagctattggatcggtacatatgccaggacccgtggaaggagtaaataacaacggtgtcgaacgtcagacttgcctgttctcaaatacggttccacaggacgtgttaaacttcagtaacgcgattcaggttcgagagcccgtccgagtgcttgtcagaagagatggtggaggcggaggaggaggaggtggaggtggccaaggcgcttcgtccatcacgtcagcgaatattgacctggcaacctcttcggtgggtggcgcggccgccggtggtctcaaacatctctacctgtacctggctttcacgacgcatggtccttccagagctagtgccgaaacaggagcgattggatcgggtcgtgcgacaggaacgggcagcgaggccaaccaggccaaggagtggaaattggatgctttggcggatctgctggatgacgaaaccatcttaccagcgattgtgtttgttggtagtgaagctgctatggactctgtcgtgtacaaattgtccaaccgtggcgttgaggctctattcttggtaagtaaaccatatatttagtgagccaggtttgccacaggcgacttactgattgagcttttttcttctcgattgcttctggatctcgacagcatcccgatatgggcactcaggcccgatcggctctcttgacaaagttccgaaacccttccactaacggtcgaagtaaagtgttggtcatctttgacctgactgtcaaggccagtgatgtcggagtggtgcgtctggtgatcaattatgacctgcctagatctgtcgagggatacgctcaacggtatgtctttccgtcgaacttcttgttcctcacacgttttctagttgcaacggctaacatatagttgttcgctctctatgacgacgttcggccaacagagtatcccctgctcagacaatctctcatagccgaccaggcgtagtcgtcaatttgattcaagccaatggaggcgatgtagaaatgctccgaagcatcgagtgcgcgtacaaattcaaatgttctgaggtgagactagctgatttcttgatatggatgtattgtcgaggatttgcttaccaacctacgtttgaattatctttgagtaaataggttcccgtcaatttgcgagaagttttctagtgtcatgttcattgcatcagagtttcgattgagattcttgttatcttggtcctcttgctcctgtacttttgatcgctctttcttaccaaaagagattgtgtcttctttttctttttctttcttgttctttctaaagtacaacattcaaaagtcgatcagaggcaggaatgcctgtcgatcgtggttatggacctcgctatatcactactttcaattccttgctcttttttttcttttctttttctttccattcatcaccaccatcttccattcgacgtcggttctgtatctctatcaaactcattatcacaacgtggtacgccaatattggagagtacacgagcacatttgatagagagaaggagatggacaaactgcggaaagattagatcaagatgagatttcataagtcttctcatccctatcaatcattcgttgcctcctcatataattttttggtccccactccatcatgtcaatcaacccaggcctcgatcggatcaccctcctactctctcggtttcctccgctcactattcccgtcatccacctcgctggaacgaacggcaaaggatcagtatctgctcttctagactctactcttcttaccggaggctaccaaaccggtcgattcaactctcctcatttgatctctgccgaagattgcattcggttaaacggacaaccttgtcagagaacggtgtatgataaagtcagagaggaagtcaaacgtgtggataaagagattgaatcaggagcaagtttgttcgaggtcttgactgtcacggctctgcaaatattcgaacgataccgagacgcattggaaggaacaaagttggacgtactggtaatcgaatgtgggatggggggtactcaagatgcaaccaatgtctttcctgccgagctcgtcttagcttgcgttctgacgtctgttgatttagatcatcaagctttccttgggaatacgatagaagctatcgcgaggacgaaggcagggattgttaaggagaaaggcgtgctggtagttggtttacagactcaccaagaggatgtggggaggatagtcaagtccttgggaaaggaacgggaggcggacatcgtctgggccaatagagcattcatcggtatggaggagagagaggagctaaagagtgtatccggtcaggtagtaatcacacctttaccacgctcttcctctttctcctcgctgtcatcatcatcatcatcggcggcggcagcggcctcaaccttatcatcccaactatctcttctcaaagcagcgtgctcaacttcatcaagcatagacgataataacaatgtccaagcactcgaatccttcatctcgacgtattcatccaatcccgttcctatcttaatcagccagttacccctcccaggttcccatcaacgagacaatctatctctcgctctttctgtcttggacaccctccgttcgcatcgaaaaccattgtcgataattccttcattcaagtccagattgacggacgaggtcatcaagactggaataagagaaacagtttgggaagggcgttgctcatgggtccccttagaggatctaccgactcatctctcttctcttcttacggttcacgaaggaaaacgaatcttggtggatggagcgcataatcatgcgtcggccacccttcttcgatcctacatagattcccttcactgttcctcctcttcaaccgcgccaattcatccgacaacgtttatcatctctctttctcattcacctccgaaaaccccacatgagacgctctctccgctcatccgttcaggtgatagagtagcactcgtcaactttacaacgcctattgaagggatgccgtgggttagaccttgccctctagacgaggtagctgatgtaggaagaggtcttgtaggtccgactggagatgtttgggtgacaactgaatcaaacgggttagagagggctgttcaatgggcggtagaaggcgcgaaggatggattgattgtggtctgtgggagtttatatttggtggcagatctttataggcttgtcagagggttgtaaaagcttcgagtcgagtcaacctatagattcaatagattgttactgcctgtctaaaatctatctggtcattcataagagtacatatctgtcaaatccaaactcggatgccgtcaaaactaattactccacctctcctcagttcaagccagtcttgatcgctctatacctctctttccttccctcatcgacaacctctaatcgatccaaccaaccttctgcgtcagatttcaaacgaacgcgttcttcgacatctgtagaactggaatggatcagaatcgaagcataatagaccaatgtatccatcggccattttgcctctggttcaagatcgtgtaaatctcgaagaagtgtcatctctcggcgaatgatgtctggttcgttgtttgcttgattgagtgagaagtaatcgagattgtcaaaacacgagaaagagtattgatagaaaggaattaaagaaatccagaacagaacaaatttttggagaaagagaacaagaacaaacttttggagatcaggaaccggtggtagagccaggatgactggtccgctgggtccgtccataacgcttggttcaccaggtcaaactctattcatacacgaacaggacagaaagatcattggagttagacacgcacaatcgaacacttaggtctagatgtacaaagaggaaactcaccagcagccatctctttttcaccgccaacaaacggtcctgagcccatgaactttgtgcgctgatgccaagccgaaaagttcgagaaatttgcttcgatcttcttctttgtgtatgcaagttcggaatctctagagtgagggacgacagagtctggtgggagaaatgagagtgctaggcgccgataattccaggcatgatctgttgttcattcactcaatcagcgaaaagatcagtcataattgataacatcggctgaaccaaagcaaggacgaacaatttcgagcgtccatggacaacatcttttcaaccaacatcaactctcgctcccaagcctctctacgccatgtaatatcctcctttccatcttccgagcctccaggtccagaggggatattatctagacaccaccttcgatgagtccagatccaatatactttgggaaacgatttgagaaagacagttgtcatgttcaaatcggacagcagtaagttgtggacggtcacttgtgttctttatgaacaagagtggagaaggatgaatgatgaacgcatgatctgagcgcgcgacttgaagagacagagagaagagagaccaacgaacgaattgggaaacagtccacgtagcaagatctttcgacgatagttccacgcggtgtacagttctggattgagctgcaaggccttcgtcgtgagatcaaacgagatttgatcgtatacatcattctggttctgatagagatgtatggattctggtgagtgagtaaacaagaatcacgagtgcatgggatgagacatgctgaacttactctttcgaggagatcgtcgacgaccgaacggtagtctctgatcttagtctgctccttctgacgctgatcctgggagagatctgtttgctttttctgacgtctgactccgtgctacatattgtcctgtatcagcctcaggagtcaagatctcgacatctgagaaggacataccatggtgggtgatggtcgatgttgcctcacgtctctgacactgctgatgggaaatcgaaggaagctgcggaatttcttgggacggccgagttttctcttgctggcattttcccttcttttcacccatcccacatagcatacaagcatctatcccatctacatccatggtgcgttctgtagactcaagccggtggaattacatgctgacctctcacttttgtttgaaatcagtccgcctcatcgtctgccactcgaccggtcaaccctgccgcccaatcttctggcgtcgttcgacctcacggagctaacgccgtccggtaaggttctctttcccttccttcatcttcgtatcttggccctgtactatgctgagtacctcttgcttaaccgttcccataaacctagacgacgagcggctcctgctcagaagcccaactctacaagagctgcaggcgctggaggaagctcgcagacgatgctcaggctttacactggtgatggcgaaggcggattgaaagtgtatgtgtgatctatctgtttgtttcaaatcctctttctcgaggtttctcttgtcctgttgtccataaagccatcaagagcatagagagcgctgattagtagaggttgaacctcaggacgagaaggtacatggacatcagtagctaattcccttaatcatcacgtcctttacatacacagtgatccattcatcatcatcgtcctctccatcgccttgatcttctcgtacgtacatttctcgattatatttcctgcttgatacacaaagtattgacgatgaagccctttcttctctcctatgactggtctcttatgcaatagtgtggtctcgctacacatcatcagcaagatcgtcagggcgttcaccaaataaagcacatctagctcggactgttcttgcatttccttagctcggttctattattcctctccttcctttctcgtgcttctctatcctcctccccattctactcttttatatttgcctagtcttgaaaatcacaacatgagttgtataccccctcttagtgatcactattccggccacgcgtgccgtaggacgtgtagctttgctttagaaacctcatgtgagcgacttcatttgacgttacagaccgacttagtccagccacagcacacgaatagcaagggaagaacgagaccatgcatctcaagtgaaacgtagaagaaaaacaagggatataatggatcatatccggccgaatcgatcgatcaaccctccgctttcccctcggtcatcttcagaatcatcctccgaatattcgtcgctcgacgagccatcgtcgtcttcagaagcatcgtcctcatctgaattgtcatactcactctcgtccatctctccttcgacctgaatcacttcttcgacttgcattccttcttttccaatgacgacattttcgtcctcgtcgtcttcagattcggcttcctcagacgacgtctcctcgctgatcgagtcggttcagggttatataagttcagttatgctattcagtattcagatcgttaaagagaagagaatggaaaagtgaacgaacctttcgctctgactagcatagaacttttctagatccgtcgttttcttctctttctccttctgtcctcctttttctctcacccctcctgccatcgctgacgccattgctttcgcgcctccagctccaagtcctgctttcataccaacgactttcgaacctttgtcttcatcatattccactccgtacccgtaaccacctcctcctccttcttgaatggtggcgcggccattgaaggacggcttgactccagaagtctcccaagagaccacctctcggagagagggatcaactcctctttcttgccagcttggcgtgggctggtaggatgggaggtactgaggttgggtgagaagggatagagtatttatttctgtgttggtcgttaaagagccttcagaatctgatcgagatgaaggcaagaaatcagtgacaaagatctaagtgcagatgaggatgagaagaaagaggaggaagaacaaactttgcgaaaggtcctgttcatgaacagaagagcctgccactcggcctccgcccaagacgagagccacctgttccctcctgagaatgacaccgcctctaccttccccttcatcatcctgatcttcgtcctgctttgttcccgcctcttttccagcgagggtcagaccacggacgagtgatttgaggaaccgacttctatcacgaacatcatacgagccgtcataccgagctagagaaaacagatgtgaggagagaagctcgacctgattttgcagagccgagggtgccgataggaggagaagaagtttggaagagagtgtgagaagtgccagtttgacttcttcggactgagagttgttcccacaaggatgaatcagtcacctggacaaagataaaggagaatagaccgaggatgagatgtatggcacgaacctcatcgatgaaacccttcacaccaatcctcagtacttctgcgcccaatcgtccatcagaacctagatgttcaccgaccagtccgacaacacaagcccttgcctttggattccggatatcatccaatctactagctaatcgagccaccaggtctaacgatgacgatgagggagaggacaagatgagacctttgagtacaagaatcgaactggtgatcgtggattctagatcgtttccaccacaagaagaagacatgaatcaagtgacatattagccaaagctttaggcaaaatgaaagaatgagaaagaacactatcctacctcttttcttcttcaacaacctgagaagatgatgggtagctttctccctgatttcaggcgtatgttgtgcgcagtatccgatagcctcgatcgcagcttgagagatcttatcgtctgtatccctctcgtaatgctaaagatatatacacaaaacatacgtcgtgtcaggagatctgatagttttttcttttgtcagatatagaagtattggtcccgaaaatacaagacgtaccaagaactcttcaagaagttcagctacgttctccgaggaagccagctctttcaggatgtcgatcctcagaatcacggcttttctactctcgtccctacctgttcccaaaaacgccttccacttgccttccccaggctcatcatcctcgaacatatccttcctttctttgactagaacttgacacgtcttgaggatcgcaatccgagtgccttcagactcggtagttgccaatactcggagtagaggaggggcgaggtgaggaagaggcgaaggtgaggatggagataggatgtggtgtaaatttatcaacgagaggagaacagcaggggaagtcgaatggacaagagggagagaagcttgaaagagaagcaagagatcttcgtccggctcagagtcggaatcgtcctgatcgttctgtgcgttccccagagagatgtagctcagctcatgactatatactcaagatctgccgatcgccttgtaagaaagaatatcatcgagagtaacgaaccttgggtttctctagcataatcctcgcgtatcttccaagcacattcatcatcacgacctgaccccactcatctgcttcgacaagcatgccacaaagtcttctataatgaggatggagcaactcgggttgaagcggacataaactctgaaaggctacaaggatggaaccgatggcgatgggagaccgctcttgaagaagtatctgcatgatcggaaggagagtatggtgatgtgatgcgtcggttctatttggtccaaaaggacagggtcaagaattttgcaaaacatggttcaatgagcatatcccaaaagcttgtcaaagcaagaaaacaagtgtgcccaggactcactcgtataactttggaatggccaatgccgccgcctttcgcacatacggattcgtatctcctgctccctttctgattgccatcgtgactacgctaccgatcataggtaccgatattccactaaggacacgaagggccatacatctgatcaaaggattcgggtcgttcaggtctttttggaaagtgttgatcgagaggagggcgaggtcaggctcgagctcggcgtgacgaaggatatatatgtagacgagtttccgaagctcgagagagggcgatgacacttgtttgacaacgaccgggaagaatgatgagaccggtcggcctttggagatgagctgatgtttcggacaaagagatgatgatagtgagaagcgtcgatctcggaggaaaagagaagaagatgacgaacagcaatgagtctcttcattcccatgatcttttcccgctcatggctgctctctaaaagcttggtgatctccaaagttcgatcatcgtttgtctcgtatagatctttggaggatccgttgaaagtcaagtctctggctgattcctagagatgatgaatatggccaacgaagcgagttggaacggttcatccaggatggtcagttgactgacgtttttcggtctagtccacgtgtagcaatagagacagatccgaacagacctgaatattctcgcttatccgctgactgagacgattgagagaatccatgatgaccagagaaggtagaagagatgatggaggtggtgaaagtgacggaagtgatgatcgacagaagggtaaggaaagaataagcggtagtaaccatcaaccgacgacacgttcatactcttcttgtgtctctagtttgcttcatctttctttatcaattctagctctgactgcagtggttaggcaggaccatgtcgttcgtaaagcgcaaagaatatgttgaaatagacggtggctactgcttggtatcatacggcagagtctttcagcagagacgcttcaactctctacaatgagtttctattatgatccgttcatctttatacaaggcgcctgtacattcgacagaacacgcatggtgatatgtactcatgttcaatttacatttgcccagacaccttccactccccattgcgctcgggcattagcagtcattacatgaatgaccacacccacgcccgtatcaatcaaggcccactctgaggatgcttcatttttggagggacggggagtttttgtcggaacgttagatgtaccctggagagtgatggggttggtagcaagctgataaagcgatagatcgaaggtgatgattcaaaagaacaacattccgggacgcatgcaatcagcaatggacgacaaattatcgaatcagcaacaggacgggagaagcaaaagagagttagcaaacgaacatacccattctctgatagccaattccgacctcctaacgctacccactccttttccctcgacctcgcagaccacaacccagctccaccagccaccaacattgagtgctcccaaccctgggccaccatcccttggtcctctctttctctttccgtttgtaggaggatgatctatgatgggaatcgattgtttggctggccgacttgtctctatgaaggtcggccctgaatcgatcagaagaggcatcttccagagatagttgtacatgtcgacaagggtttccggcaaatcaggcggtggaggagggacctccttcgtttctggaaaagcgatacgaggaggaggcggaagaaacgatgggcgagtcacaggagctgaagaagaagatttcggaatgaaccatgcgtaaggagctctgggcgtatctattatcgacgagaacgaaagaggatcggaagggtctccagaggcagtttcaggagtgagcctagaagaaggtaggcgccgagtaatccttgggaaggtcgatgcgatcgaactcgagaaccaacgggttggtgctgatctccttatcatatgagcagggctccgtgcggcagcgaacatgtgtgtgagtgcgtgtgtatctatatatgtgagtgaatgagtcgttgctgtttatggtcttgctggtggtggatgatcgttgaggatcagaggaatgcgaggtttttctaatggttcattagaaaactccacaatattctctagtctcttttgtagtcatctctcaaacccatcagccgtccaaagctctttcgtcattctctccatcaaccatcaaccaccagcttcgtccacatctttaagtttcgtgtcgatctctcacgatgtctcttcttcaggcttgcatctctaaaatgtctaccattctggtcgagcattcaaattcagatcgagatttctcggccgctgttcagagcatcttggataagattccacccaacaactccaagttaacctgttcgttcgagcctccctaggttttcctatttttctttccttgccttctcttcagcaatagttagtggttcaacagatcagccaattgaatgttacactctcttctggtatcagacgtatgggaacagtacctcatccactacatctctgagaatggtgtggtctacttggtcatggctgatgatagtgtcggaaggttagtggaacgtcatcaaccgcaaaatataaatccagttcctcaaactgatccggattgaattatcccttgctctttttcgctagacgaatgccttttgctttcttagctgatcttcaacgacaggtaacttccttaccgagctaccaaaggttctcaaaacaggagtctgacgtgatctcattcccgcactatcaccacctcatcgattcttctttcagttcacctcaagctcttattctgaatctctcaactcggccaaccactacagcctaggagagtttgaacctacacttgccaaggtccgtcttttgctttgactctttcatgtttcacttcggaccatcgggtgtcgtatccctgacgtgttatgtgcgaaactttcaaccttgaccgagtttagttgatgaagcagtactcgactgagcctccgccggatgcattgaagcaggcccaagctgatctaggcaacgtcaaggacatcatggtcagtctgtatcctggttccttctcttgctctttcaaattcctaggatccactgacgtcatatgtgtgagatgttttgtaggtgaacaacattgatgctgtaagaagcaatattttcttcttcatgatttcactggctttgcgttggtcttcttgatctgaactcatcatcatcctttgcgctccctgatttatcagatcctttcgagaggagaacgaatagagctccttgttgacaagacagataccatggctactcaagcttgggcgttcaagaggagtgcacgaggagtgcgaagaaagatgtggtggaagaacacaaaggtatgttgagtcaagtccgagacagacagaacatgcgggaacaaccgctgatgtacttttttctcttggtgtacagatcatgatactctcgagctttgtcgttgttgtgagttggcctcgttgcttatatcgatctgtcttagagccgaaatctgacaatgagccacacccttttcctcttgacgaaaacttcgttcagttccttatttatctcctggtggcccaattctgtgggctaagcctgactagatgtggtggaacccgatctggaagcgatccctaatttcttggtatctcttccttgactctaccgatactctatcctatctcacctgtcctcctcaagtcattttcctttttctcttgattcgataattactggactgcctctacttttatcgctagtgtcttgtatcgtcctttggcgtatatatatatatatgtata

SEQ ID NO: 475 - DNA, 13934 bp, Xanthophyllomyces dendrorhous
atacaatacaatataatacaatacaatacaacggaagaacatgtcagcattctttctaaaaccaagcaggatttgacaatgttgagagcgaagatagggtaggtgaatcagaaaagtcgaatatcgtcaacgctccgcccagtctataaaccagagacccctttcggagcaactggagaccgaacggaactcgaagaagaggtgccagagagcaggtcgcagaagagcaacactcgttatttaaaacagaggtgatttggggatgttgggcttgaaaattgaagacttacgttaagacatggcgaagagattgaaggggatggaagatgtgcaagtatgagaaaagactttcagcccacagccaaagtatatacttgattatataatcaatcagggccgatttgtaacacgtacaagcctcaggctgggtgagagtaaccctaaatgatggtaattgatacttggtccttttggatttgaatgccctcagaccacgaatcttcagatcccatgagctacagatttagtttgtgttagacgcgtgagctatgcaggtgattagatggctataggatgattcaatacacgggcgcaaggggatagagttgaaagatcaccatgacagagcataaggacaataagaacgttaacaaaggatccaggcttacgagactattctatggatgagaaaggatgcccatgttgtgtatgactctcaaactacagagttactgaacagagtcagtgtgcccatgattcaaaccacacggaagagccacaagcaagaagagatcactggatgtgttaggagcgcatgcgctgtgtgactacatacttgcaagacgagtaggagtaggagttatggcagatgattggtgagtccctggttacagacatgtagcgccgtggttacatccccaatgcctatataaactcgctctgcctccgacaaggaatcctcttttttcttcaactgttcagcaacacttaataacttggctatctgttgctttgtctgatgatctccttgaccactcatgactgtctctatgttacgctactcctttttctctttgattttgctctcagactttgtagaacagagatgtgaacacatcgcgcaacatactgcacctagccctgcatcaggagaagaacgaaggggcgagaatgctagggtttgacgctgtttcactgaggctgacgctgagactggcacaaactaaacccatgacccatgggatcttggtggttcgtgatctgagggcacccaagtccaaaaggatcatgtatcgaccaccatcggttgcggttgctttctagtagccaaagccatatattgtgatatatgctcccttcgtcgaagtcaatccggtccggcgtagtccgacctggatgtatggaggtcttatttcgcccgacactctttgttctcccatcgttaacggtatttccatcgtcggcagaccatgcagtaggtcagcatgttttgactgattggctgtgttcttccccaagatagagccaacaagtcacaaggtcgaagagcctgatttgtacaaactgcctagaatgaaaccccctattcacaccctccgaacccggatcctgagtcatgtcgggtacccaaccctgctgattgtaccataggaaatctgtgcagatgacgtcacgtgttgtttagggccggcggcccaatctgaaaagtatataatatgattttagctgccatgacgcgattggatcttcagcaactcaccgccacttgccacggttcattttttccctcctcctggtcaacccacaggcccgttcaccttctcgtattttctaatcgaaaattcccattattgtttctccccgcccttttctcttcgtgagtatccttttcgaaaataaaaccctatcctctccacttccacaatccactctttgtccctttcggatcttcgttccaaccgacaggcctactttctgtaaaaagaaagttttggtttagtcgggaggcgtgaaaaaggagagcttggcaaaatcagttttggtgtgaaagagagaccagaatttaccgtatcgaatcgcttgattcattttagatattccaaattcttggctcgcctcgtcgccacttgctggacccaaactcgtgtgacccctttttcttgccctccccgtctcttctgagagaggacctggtcaacttgaacgtcgtatctattctacccctacttgaaccctgttggaccatcatatctaaaggttaaactacaatccacaaacaaaaaaatattttcgaactaggctgctacaagaataacctctggtggagaaccaacacatggaattcgattgaataccggaagcggacggtttctgttcgccgaggaggcaaggaatcgagtgggagcaaggcttttgtctcattcctccttcagcttgagggtcaattacgcactctcaagcaaaccggatctcttggttgagattcggtctttttttatcctttataactttatgtgtcacttggccttgccttgggtccataacgcgataaagcagcatttttcgtctgaaacgcccatattttgttaatattatgagatattccgcccttgaatagcctgaacaagtgtcatcatacggtaccttgtcatctcgagtatgcgtctcaaacgtcttgttcccctcatctctcccgaacttcatcggttgatatctctacttgcccagatcgagatcacacaatctcagactctcgtgttcaccccttccgatgagatccttagccttctcggacctatcatctccaatcttgctacagaggatgatcatttgtcaagcatatcactcacatcgattgagcaactcaaagatgaggtgaccaaggttgaaacgcctgaatttatcagaggcgaccgagcgctagaccaggagaaaatggacaaggctggcagaacgagccgatgggtcgggattggggtcaagccagtagatgagctgatgggggtgatcagttcagaaggacaggagaggtgggatggagtgggtatagtggaagtttctggaacggatggagttggaaagagtgtgagtgtttgtctcactcactctgagaaagacatacagtatgcttacgatggagatcatgttttccctctcttttcccctctcttgctctttgtgatgtgatgtgtgtatgagtaccaaagttgttctcacttcatctcgtgttaaatcacctggttcgacatccaaaatcggaagctctgtgggtagataccgaccgatcattcgaagcctctcgagcgctcaacgtactttctcacaagttccctggaatcgtacgtgcttatgggtttcctcttctgtgtttggctaagggtatatgaaccgaatgtctctcgtcagacaagttgactactagttgtctggtcctctaaacaacgctttcgtatgaccggtagagctccactcgggtcttgggcaggttgcaggtcaaaccgattttcgggttaccttcgttcatccaggccctttctgatctagagaaaccatatcagtcggttgatagagaaggccagtcgtcgacgtcgacaaagcccaagggaagattcacattgttggtggtcgattcgttgacgaaattgtacggagatctagtcatttccgctggatcagccggttcgaagctacttttcttattcttgttcatacagcaaggaaatctcactatctgagatcagacaggcgtagcttattgataacgttttgaaacctcttggtggaacttcgtaggtctagcggctctagtgtcgcacatgcaccgtctttccgccatctctcatcgtcaggggataacatctatcgtaagctttacagtagaacatactcatgcgcacagattactcattctctctttcttatctgatcgctataacatctcgtgttcagttgataaatgactcgatccgagtcccatctcaatcgcatacaccctcgtctaactcagcgatgaataatcaaataccagctcttgggacggagttcacctatctgacggacatggcgctctggttggagaccaccaaattcactcatttctcgagtacggagagagaggtgataattcagatcatgaagaatcgagtgggggtacgtcactttgtcctttctgctcataatctatctaaagcatctgagtgttcgttcgttaatgcacttttaatacactgaacggaactttgaatacagcctgcgagaagatcaacgtccattaaaacggtcggtcacatcttgctctgtttcaaacaactatatttaacctttcaacacatattccgttctgactttttctgtgtctatgtaggacggaaccgtcatcttgggcttacaggacaggcctcgatcctctgtttgatgatcttgcgcgaggcaagaaactacctctaacttggatttcgggcatatcaacttatgtgctctgaaatctacacaaactgtattttatcactatcgtgtgatgtgtaccatgatatatacaatattgttatgttgggagattgatgtctaagatagttagggttaaagggcattcctacagtccccgagatcctgcccaattgagttagtgctcagctggtcttgatcatcatccttacccgcactcactcacaccgcccatctcccggcatacactgatagctctaatctcacctctgcttctgctccagtcaaacataatatagctctgttgacccgtcctgttgctacccgtaagtagactatgggcttgggacgggttatttatctatctgtctatctatctactctcgtgactctactgataaggccggacggtgtccggtcgacgatacgagcatggggaggagatgttgggtcctgtgagaccttctatcggcccgtctcagtagagaaaagatgtagagatctaagcgaagaagggatcagatgtctctttcgcttacggaaatttcatggatcatgaggatctaagaatgacagagaccgtttccccttttatcgaaccctaccaatgtcgttcctctcgccaccgattgttaatctggctggattataaagtaggaattgacgagaagaatgctaagaagctcctttcttcctttcttggtactttcatcacgctctcgatccgtattgaaggctatcaatcctcgagacggcttcttaaagcaggtgtttcaggccacttaccgctcggcgctcgaggtaggtaaatcacgcctttagtattgagtttgcatacgctcagcgtaaagggccagtgtctttatatctcgcttgtgttctctctttcttcacgcacagcgcatctatatctcttgatcgaattgttgcgtatcattacattcagaacttgatcaaacttattcactatgatatcctcccgaccctcgacaccacctctcgttcttcctcttgccagtcatttacccgcagtcctcgactgtgatcgattggaaccgagaggacttctctcggacacgctatcggacgtgtcttccattcactcttctgatctcactagtgatgatgaagatcgtgccgatcttgttcgttttggtgatgatctagccggatctacctggactgaccttgggccgaacacagcgacaacagactttctgtctcatgccttctcctctggagcttcatcggctgctggggacgagtttgaacctgactctactcctggctcgtcctcagagagcggcagaggagatggcagtctgactgacgacgaagatgatcatattgacaacgaccggacgttttctggattgggagagtcttttgccgatctggaacccagtattccctcagcttcaagtctttctacctcggtagccaccacaactatttctgatctcactgatcgacaacattctaatctgtccctttactcgaaattctctaacgcatgtgatatcgaaccgcctacctctgttcctgatatgagatctagtgtcgagacgacttccttccgacgtcctgtcaaggaacccgtttccagtcactttcagcttgcctatcctgatcctactagtgtttcatccacattctcttcgcctggctcgtcatccaccttgtccaagtcgaagcatgaatgctttccttcatctttcagccaagctccctcttttcgagagactgggaccggaggacttggttcttcccactctcgatcggcggcagggaaacaagctacatcttcgtttgccccagcctcggctatgatcgtacctactactgtaaaggagaggctaacagagtctcattcgaaacaagaaatggatggacagtcctctaggctgacaaacagttcgtactcgaccgaccgttggactgtttttgatactccctcgatgtctaggtctttgcaaagctttccttcgctcgttcaatcaacggtcaacttgccggccgatgtctctcatccgatccgaattcttcttgtaggatcatctggtccttccaaccaacgtcaaactatcgttcagaagctccttcgacttgtttatatcatcctcccagagacagccgcatccgacccgattgtattgaaggagtttgacgtcctggggagatctgagagtacaaggactatcagtgatcttcgagaacctttcaagagagagaggaaaacgtcatctttgggaggtaggcagccagagtcaattgaccgtttgacagggcccaaaggatcgctggttattgaggttgtggatctaactatcaatgaagacgatgattgggtatgttactcctctgaccaaaattctagttgcgcctgctgaatggggtttcttctttctataatgttaggtctcagcaagcgaagacgtccgagcgcacttgagatctcttcgaacctcgccgtcaattacaacacttgtgacgaatcttgttgatcctagtcaacggcacagatcgaacttggagctttcttccattctctcctcctctgatcgcacgaacatgcacaccattgtccttccagtcgagatctccgcctccttcaatcctggagcagatctgagtcgtgacaatctcatagccaagtcgaaggcaaacacagaaaatcgtgtttggaggtacgaagactttgtaggactttcgggggagaaagatgctttggaagtctggaaggggctctcattggaaagcttgacgaccgaaactgtgtcgttggctaggggccagacggaacaggaggccgaagagtatatgttcagactgtctgtcgattggaagaggttgcgagcctgtgttcgccgatagtaagtggaattgtgtctttgctgttattcgattcgtgatttgagctgacggacgatccactttcacattctgtgatagcgtcatcgcggtatcttctctcgcaacggctttgctcatgctactagcttgtctagactatgctctcgaagcctttgaacaaacttctttgaaccccgccatcaacgtcactcggtcatttattaaggaagcatctatccctctgtctgtttctccgatgacggctagagtccaacgtttttctccaaaccttgtttggactacctccgtccaatcagccgtggcaaccccagtttatagagctgcttctgcttctgcttctgctcgaggggctgtaccatccgagacacggaatttgatcacttcagaagctgccttacgagaggagagtggttctctggtcacgaaactgacaaccatcaaagtaccttccgagataagtgtttggtcagtcaaggatcggagtgtgatggcttggaagactcgtgttgggcttccttcgtctcttcctagacgaggggacttttgtgtcaaccgatccgtcccttcgttccagcatgtacctttgaatcagtcttcttcggttaagcagcaggtttggaaactttccgaatatgtgcatccaactgtctttgctcttcctacaagcctgcctgattccttccctctgcgtcggttgactttggacgccgagatgttcaatcctgtgatcgtttccgtccagaaagcttactgccagactaagaacgttgttcacgctcttgtcgcgaggtcaaacccatccgctcaatctgcttataacaccttacataatcttcgagacactgttttggatctgatctggccaccttcaccaatagttcatgaactagttgaatatgcggtgaacaaggtgaatcagatcttggtagaggtttggatgagggccgatcgctcacttcggcggggaaagatgatgacccgggatgcgttcgaggaatggaaacagcgaaaggaggctagaagggcgaagaaaccgtgggcgaggatcaaggctattctggctcggcgtggttgagcccatgcctcagtctaatggttttgtcaattcgataatcatggtaagcacgtttgttttccctatccctattctttactcctaagtaggtagagtcccatgatatcatgaggacaggtgtttttatcatgttttggaatttcattttcattcttccttcttgcccttttgtccctttgcccctatagaatatgggatcgcgcgacaatgtgttttagattagggacgttggttcaatccctggtcttggactttcttcctggcttttattgatctctccctctttctcttcggtgctgtagcctgggcttgacgtttctatttctacctctatttctatctccacttttctcgatcacgactcccttctaggctctatctcatttccttatgtatcgctcccttctctctgtttcatgtctttctgtgcgcgcgtcgtttctcttctcttgtatccagctctctttcattagctcggtcttgttttctcattttctaggttatgaattttcatggggttcttgagtcctataatcttgttcctcgtctctttctttttctcgctcgtgattctccatttttttgtgggtttgtccccctctaacgaaaggctttgaggagaaaacaagcaggattgtctgatgacttgaatcatatgataccaacaacaaaatgtcatggtcgacaggggagagaaagagaaggggaatgtacgacaacgataaaaatcacgaccctcgtggagacatcgaatcctttccgactccccccctcctcttgtcccgtcctcccgttcgagaaaaggaaggcggagaaaggaagagagaagattagagaggatctgagcgtcgaaggcggaccagaacgtttcgaccgagctatcctctttgaggactcggataaatgaatcttcgacggaataggaaataggggacgatccgggatttgcagatctgcatggtcgcatgattgcgaggatcgtccctcatgtgtgattccttttgtcggcgtttgagagcagagagacagtagagaagagacagaaagaaatgtgcgaagggagaagagaagagaagaaagaagaatggaagaagaaacttatcctagccatcttccttcaccgaacaaaagaatatggcatgaggtcagatcgatcaagacaagttagtcggttgctctcccatgtaatcttcttaagcgctgtatcatttgcacagagacaagtgtattctttcatatctgcttcctcccaatcgaatcaggaccaacaagatccgggatcttaaggaaatcagcaccactccctctttttagcacaaaaggcagaagaaagaaacagtatacgtacataagatcctcccctgagccccattcctgggactctttttacttctttctacatgttagtttccgatatcgatgctgaccatcttgatatcatcatatggtttgtcccctttatccgtcctcacatcctcaatggcgtgtatcacatcaagacctaatgtcgctcttccaaacacactttgagatatcgattaaaaagagtgttttccaatagaaagatcaggacaaaaagacagtcagatcgagttctgatagctttgaaacggcaaagatagggacaaacgtgtgtttgtcgtcaagccatggggtgggcaccgtcgtgatgaagaattgagatccattcgtcttcggcccggctggttggaaacgggtaaatatcaacaatgaagacagagtcgagttgaaaacgatgagtttgagggcttaccattagccatgctcaacgtatacggccttttaggagaacaaacaaaacgcaaacgttatcaatgttccattttcttgtggtttcatatgtgaaaagaggagcgctcacctatcatgtcttaaactaggatcgaattcatcctcgaattcactaccccagattgattctccacctgttccatcacctaatggatctcccgattgaagcatctatcgccaaccaatttattcgtagaagagaaacatgagcgattattcctagtctgattgacgatatgagctgttcttattggagactaggggaaaaggaggtcgtacaaatttcttgatgattcgatggaagataattccattgtagtatccttcctttgcgtgagtgctggaaaagagaagcaatcccaaattgtgcaaccgttgcatcagtgtctacatttcaaatacaaaagaaagagagagacgaaaaaaaagaagagtacgaaccagaagttctcaactgctttaggagcctgatcagggaaaagtttgaagtgctgatccatccagaccgatcggaatggtccccattctaatgtcagtttaatacaaaagtcaaagagaagacccgaagacgcacgatatctcccttggtggtatgaattacagccgaggttccaagttggcctccgatcttgacgggttgtgccattgcgacggattgttcttctcttgtaggtcgttcgttgaacacatctcgatcgccaccctttgtatccctgttgaatcgacgtaaaaatataggtcaaaaaagccggtacagggatatataaagagagaaaatgacttactcgggctcggtctgtgagaagagatagaacctggatcgtttgtatgcagtacaaaaaagagtaggatctcgagactctcgttcagcaagcaacgggttggccgaagcagccatagcctgatatacaaaatgcacgaaaggtagccgatttcattttgtttagcaaaacacgagatgtgaacagcactcaccaggaaggaaaagaaaaacaaaacagtacttacgattgtggccagaccttttttggagggtgcaccttgataaagagcaaggttcatccacctggatgtttcatctttacccaacactctgacgaccctgttggaaaccgtgttaacaactgtttgcacaacaccatgccatcagcttgtgatcagaagctatggaatttgaacgcgttcgagagataaacaaagaaaaggccggaaatacctttgatacccaacatggttggatagagcaagaatcccccactttcgtcccaagcacaacttccaacccccaatccgatcttttctaactctctgtctgcggcgagacgtctaccaaactccatgtcatccattcggaacacggctgtccctgcctgttgcatttcctggatggcctgaagagactcgtcgtactgtctcgtctttttaccagaaaggaagttgaagatccggacttgccgatccggaagggaaagtgtcgaaaactgagtttgttgtggggagaacacgatagaagtcggcagactctttgccttcttgaactcgtatagatcggtactactcttaaattcccacaagcctttgactccagtcggaagctcccacggctcactcggctgccaatactcgataaagccaccttcgtctgcagagatgactgtatcgtatcgatcgttgtactaagacctcgaacagagcggtgtaagcgtgcatacgactattgatctgtccttatcgatatctgatagacttacgaccatgaggtggactgggtgcctgtgtagtttatcaagagtatagagcggcttgccatcgccacgaccgtcgtagatccgaatggtacttgtaccctgctctgaactgcacaaatgaatgtaaaggccgaacaatcagttacgttcctatacttttggaaagatatggaggaaaaacgcgaagaaaagatacgtacatggcgagaagagtttgtgcggtcccagattggtgaatccagcaacacgtctttggctcaaaatctagcttgagcatattgatcatatctatacagagtaccaggccgctcgtgagtcttcttaggtctagattataagcaaaggtaaaaccccaagtgtacgaagaggttcttaccaaagttgacaacatcaaacaccttgcatccgtccgagccgacagtcgcgaagaccgttccatcgctacttccactaacggccaagaccggacccagatgagctctgtaatgtttgacaaattcgattccctccgcctgtttcttccatagtttgagatgaccatccatagaggtggtgagtacaaagtcggttctagatggtgcgatagagggcaaggtcacgaagagtgtgtacaaagggacgaagaaaagacgcgacaagttttagcccttgagatctggtgtgtagaaagtgctgcgaaagaacgacggactttgtgacggtgacggtattaatgacatcccgatgcatgaaagacttataatatctgtctgccgagggaagatgatccaagaacaacttctcgtgggcgaggactagaaatgccggattccatagcatttcaatcagctttccgtcggtaagtgtctttcaaacaagcagggaacgaaggaagcgagaggagacaagaatggattggtctgatcacttaccctttcgtttctttcgcttcttctgctctccaggaggttgaggtccgtcttcagcatcatcgtctccgggagcttcaggcattggtcctgttgatcaacagagagaagagtacaataagaagaaaaggacgtagggtagacgaaagaaggaaggtcgaaacagcttaccgatatcatcttcatcgctctcaggctctgcgtcaagcacagctagcgagcctggttctcctcccgagacaggaggagtcgtatctctaggcctcttggtagcatgggtaggtgggggagaggcagacatgaccgactggatgctggtgatgatgatggtgagtgccggaaagtcgactatcagttcgttcggagagatctattgaagcagtggtaatttggactagccgacttatttaattaattcaaatatgctcataaattcaaatatttccatagctggcataccatctgtatcgtctaacgaacagtgcggctacggttggcgcaatagtggtgatagcaggagcggcgacatcgagagtagcagcaatgatagcaacagtggtaggaggaacgtcggtgctagctaccgtctatagtgtggtcctcctattacctttggagttgtgtctttgcgttgcttttgattgactatccaaacaagagacgatcatgatcatggaatacatccccattattaacattgtcacaaacaggttcccagggataccggtagaaattctcaaattcttgatctctctatatatatattgtttgcttgtctctttcttagggcatcatccggaacaacagacatatgtatacaacacacacacacacatacacacacacagaggcagacacgtagacaaacacagacagacctgcaaaaccagccagcaagaaaagacacaacgcacagtcagctcagtccttgctcacaccatcagattcaccaacgatcaagaaagagtatgctccacacggaagcatatcaggtagaagggtctcagacatccaaggaagaaaaataccctcattcgttcccacccgtcggcacacaccccacaagggggcaga

SEQ ID NO: 476 - DNA, 31573 bp, Xanthophyllomyces dendrorhous
ataaaaaatggtcagccaagaaggtttaagacaaaatttcaacactcaatttagcaagcattgcaaggcattgtctgtgcaatgacagccaatgcgtgcccgacaagagaacgaggacgatggaaggaaaggaaggaaagcgaccttgacctttgacggtcgtcgctttttgtacgattttttactgctcacattttttccagagccttctgatgattgagtcacgtgtagttcacgtgatcgagctggctgtgctggctcatcctggagggacatatccgatgatccagatctggctgttctaggatcaagaagaaagatccaaccttcaccagattcagccatcctcattatgtcttttcttcgtgttttatctccagtaagaatcacagttagctcaccgctgttctcgtcaggcttcagagctggttcacgtagaagtctgagttcgagcgtaccgcgcaggatggtgatcccgatggtcatcgacagcacagtacgtctctactgtaactagatcatagatcttggatcctagcaacggatgactcttactcttctcttccgccttttgttatgtttactggactacaaccgtagggaagagatgagagatcaatggatctattttctcggttgctcaaggaaagagtcatgtttgttggagatgcaagtgccatgtctcctttttctctattgggatcacgttattccagctggcttttcttgaaagtctttacaacacagtgttctcttgctgatcaatcttcgtctgtcctacaacatattaatctcaaaatcaggtagacgaacaatctacaagtttaatcaccaatcaattattataccttgaggcagtagacgctgagacaccgatacagatgtacataaataggttaggaactcacttcatcctgatcactcgaaatacgctgttgtcgacttgaagtttttcatactcatacatatgatgctttagctatggaggaagcctgacagacgtcctatccatatatgacacagttagtatcatcttacgatcgctcagtccccgacggacttcctgtctgatctcctccgctcggtgaactcgtttatcaatcccttcagatggaattcgtatctcctcctatacatacagtctgtattggccaagcttcatcttctgcttctttgttattagcagcaggtatgtctaatcattgtcagtgatggctttggtcagtatcttactgactatatatacatatatacacccatttatggccttttcaacaggcgctaaaggacaccgggcgatcttgccaaacgcgagtgtgatgatgcatcgtccgtatctgtcttgtcaaagttgattcggccatgtcgtatgaacgatctgacgttctatatcaacgccttcctctttcgtttgggtgtcgccttatgatccaaatttagagccttatggtggacgacaaggccaacaatctgatatcgccatcgccgccaaagagactctgcgtcagagagatttgcttgagtccctctatcagaaacactgcatcaaggagggggagagcgccgaggaatgcaagcttcggttcagtgcgtcattacttttgtttccctctttgtgctattctctttgtttctctcctgatcgtatgcagaccattcattcggctaacctttttctctcatgaattccccctcttgtgttgataatcatgttgtaggaaccgcacttgaaagagatttttatctgacaccgatagaggcaaaagattttgggattgtcgatcgggtgcaacttccaaaagagaagtcaaccgagaccaaggcttaattctagtcgccaacgcatcatccctatataatgttgtacttgttaagatcaatagaacgaaatcatgcttgcaaaagaagaaagagaatcaaacgggctatcagaatgagaggtgggctgaaacggagtatcgactgcgcgtgcacatagtgaacgtttggtgtttcctcatttttcgtttcctcccagtaacacacatacctacaatctttgatctaccagacatgctttcaaagatcagcagcccgccgtgagaccctaactgcatctagctccgcatgctcatattttacactgaattctagataactgatgtgtcttctttctcctcgacttgttttaggaggtttatctcgccagaggatcactctgctctaacgtcctctactccggaatctttcgcatccatcccgcccatcatccgacataagcaggagaatgtgaccgtcaactttagtcccgagtgggaaggctatggctcgagaactactggaactatttacatcactgaggagtcagttcctcgctgttttgctcttttgttgaggcaaatcgactgaatgttgatcacgacttgaacattttccctctatataaagagcactctcattcattccttcagattcgtcaaccaccaagaccgggttttctctcctataccctgtgatcactctccatgcgatctctagagatgccgagcaaggatcttgcgtatactgtcagattgatgaatcgtcgaccgcgtcggattcagtccctgtgccagagggtataaaggagagcgagaagaaggtcgacgacggacattaccatccagaagatgaaggagaagaagatacgccaatgagagaactgagaatttatgtggatgaacctagttgtacgtctctcaacttcttttctgccatttagatcgaccctttgagagtgcttcagcccactgacgattcctgctcatcgtataaatgtagtggaacccatcttcttgtctctttctcactgtgcttctttgcacccgtcgatttttgataccgtcgatggaatgtcggatgatgaagggatctactctgatccgtctacattcgagcctttcactggtagggaggatgaagagctaagcgaagtgggaaaagtgaggagcgattttgtaaacccgcaagctaggtttcaaccttactgaaacgtttgatcgggtcttctggttttctccatgttcttctacctgctcctctattcttctccctgcccggactttgtttccctccccgtttctctttcttcttcttcttcttcttcttcttcttctttctctcaacatcgattcgtcaataaacattactgtggcctggtactacacatttgcccttcaaaaggctgctctcgcggtaagtcaactctctatgtctatgttaagaaggcataaagtggaactttagactgattgaactcgtttctcttcattctggatcagcatcttgaatccatcatcgtgtggccaacgcccgctacaacggcctcggacgaagcgacggaggacgctgaagagacctcggatgaatctaaagtccaatcatcgtagattggatgtaacgtttgaatcgattttcgaatctgagctgagttgagcgctggatgtaggaagcaatgcattgatatgtttatgtgcgcataagagaaacaaaaagaaacatgagaaaaaggccgcagcagagcgggcgggtacaacatcttactccttccactcatcattatcgtcactactaccaccatcatcaccaccatcatcaccaccatcatcaccaccaccatcaccaacgccgccctgtaatcaatacccaatatcatgtctcaagacgcagcatcaatcctgcttcgagcgcatctgaacagcataactcaatccttacaagctcttgagtcactctccttaatccctccatcagatgcctccctcatccgttcgaaactcccttcatccgaagcactggcgaacgctaacactggaaagcaagatcaatacaaccggtcttcttatggaggttcagcagggcttcagccgtcctctatctcaagtcccggtggtagtatgctagatgtgtcggtcggcaacggatataattctggaggaatccatagagcgccaccacctatcccgggtgacagctccgagagggtagaggctgtggccgcttgggattattcagggaatgtaagtggtccgcaagccctcgctttcggttctttctcattgccgcttccttcttcttcttcttcttcttcttctctctcttgctcaagctgatgtcttgttgtgcttttgtctggcggtgaacggattgtggtgcggatgaaaaaaggccgctgacgatttaagctttcgcaaggacgaccggatcatcgttgtcgacgagttgaacgtacgtctccttgttttacatcccttcctctatccaccaactaagacacgagaactgacatttgatctctgaaaactcggctattttctctcttggggttacgtgtgaatatgtgtgggactgtgttggggtatatgtgaaacatatcagccggactggtggaaaggacgtctagcgaacgactactcctcgaatccgaggattggcttgtttccttcttcctacgtcaacaaattgtccgtcgtctgactctcttttcatttctgtccacgttcgcctcgtcattgagttgttctgactttgcttgtattgtctatctctgagaatagaccttcaaacaacaactgggctaataaacaccaacctccttctcaacctcaacaacaaatgcaaccctattacgctcctccgcctccttctcagatgcagtcataccaacctccacctccgccacagaaccaacaagttcaacaagtccaacaagcaggtcaagtcggaccaccggtcgctccaaaaccgagtaggtttggtggaatgggtcaggtcctggctacttctgcagttggtggtgttggattcggagctggttccggttagttctttgccttccctctttcctccgacagggttctgagtggtgagcttgctttccctttcatgcaagtactgatactcttatctttgtttttgtggataccatttcgtcagctattggaggaggcatcatcaatgccattttttgatatattcttccgtttatctgtgactcgattatttatgttcttattaattcattccccctttcctcctgtcctgtcgataacaactcaagccctgtatctttctgcctcactcctagctctcagcatcccccttgcgcgctcatacgacaaagcccgagatgggtagaacataggaagggggaggaaaaagagatacatatcaccagatgctacccatcaagctgattgttccttctgcgccctatagaagatcgcaaacgacgatagggttcagtttttttctctcattgaaagcgcgcgtcgttgcagaagaaaaaggaaagaaagaagagacgcaacgaaccccgacggaatcgtggccacctttcagtgtctccacccaagtgacagccacgccatcagaatgacttctgtagaaccatttgacgacaccccaaccctcaaccaccctttcttctactcgatctttgatgattctccccctctctttaaacttctcggtatgaacttccatctgggcgacacccagcccactggggatcacgttcaacagttccattcctaaatcagcgtggagtacggcatgaaagatatctgaagaatgaatcgatggaatctctgtatcatcttgggcatgtacgatcaagatctttgtagggtttgaacgaggaagactggcgagggctgagagagtagggaactgggtctgaaggaatcgaggggacgtcaaagtgtcttgaacgagtgggagcgcgcgaagaggggataaaagaggtaagaatcggaagagagtgtatgttttgagaagggacgggatagacgagtatggagacaacatggtcaacatccgtgggtgaatacctagaagggtagtttgatcagtgatgtttttttttcctttttttcgaaggaggatctccaaagaacgaaggaggacaaaccttcttcagcgagttgagcaacaagcaacgccccaacacccgtccccaaactctggccgacgataccgacctgatctggtctccctccattcctattgatcacccattcaaaggcagctctagcatccaatacaagacctcgttcggatgggacaccagtagagttagcgaatccacgataatcgatcgcgaggacgttcatgtcgagcgtattggagagagaggagatcaagttaactcggaacggcgctgctctattcccggcctatgatttgaaacaagataaatcgttaccactcatgaacaaagacaaacggacacgaggggaagggagataacgtacgttgccgtgaagaaagatgagagtcggtcgagtctggagcgcatgatcataggtgtcttcatcgaaagccttagaaggtgggtactgttctacgttctctatgtagaacgtcctaggtctatatcacaatgaagaaacaggtgaacagggggctgtttcagcgctacagatctagagtacacaagacgagatggaaataagcatacagaagatgccaagcaccgatagattcgccgtctgatgtttcgacctggatgtttcgcgccttaaatggagcgagcccgtaccgttcaggagagtcatacctggcaaagaacgggtacgggacgttgttcataaagataacgctgtgaaccaagtaggttaaaatcaagatcagtccaggcgaacaaacggaagagcagaagaagtcgccttactttcgttgtaacacggggatcagtagagcaagtaagaagcagacataagctgctcctccgatcgttagcaatcgatgagctcttgcgaagaagcctggcttggacgctccatctttagcgtcgtccttttccttagtgttttctttcaatttgtcattcgttgagctgccagcggaagctgtggatgcgatcagcaagtcagcgttgtcggtttgagcatgcgtgatggctagatggttgcaaccacaaggggaatatatgaaatcaacaagacatccccatctgatctatacaattcaatatagatgatcaaaacagcattgcctacccagctctggattggccagattaccctcgaccggttggtcgtctgccattgttcgatgttgtctggctagatgggagtgaggagagaaaacaagcgagcaggaaaaacaaacggaatcacttaaacaggtcaccatcaagcctctcaatcttgagctccttaaggaccatctctattcatctcatctcatgctcttggtgatcgcagagatatcatagtatcgtctgtgatgatagagacgagaagagtgtgagaacaagagcaaacggtctccgcttgttcttacactttctcgccgcgtctttttcactcactacaaattctttcctcttcaaccatcatcaccaacgtccgcatcctatccgtccatcttcttatctttgccattgtcctcatccagactagttctgagaaaggcccactatggcaacgctccagtcgacagccggctcgaccaccccacctccgaagtttgttgtgccgaagcgatcacctccgacatcgcctcaatcgtaccgaccgccgtttcctccagaccgctcctctacattctcttcctcttccggctcgtcatcccactcgtcctcatcaaggcatactgaagttcctcatccagtcacacagtcttctacctttccatctcctctattgaattctgaagttagaggacccaagggttacaccccgctcaatgacccgcctctttcggcaaaggccaaaggaaagaaacgggcgaccgtggatggttggatcgatctcgagagaggcgttggatcagacgaccctcgttaccggcacgatcacctagaagaagatgaatcacaaccgtcaatagagcaggaggaatctgaagaaatgaatgctcgaggttgggatccagttggccaggattatactagtagacaaacagaccagagttaccctcccccgttatcagaagcggagcaggaagagaagagaattgccgatgtatgtttttcttttctttgcatatcaattttgctcccttatagtggatagagaacaatgtgtctctcttctctttctcctttatagccaaaaaaacctgacctttcgtatatcctcttctctcgaacagaacttggcaatgtggaaagaacgagagctctctcgccgtcgggcagctcgagaatccaagatgctacgctcttcaggatccatcaacagaggtagccttagtgatagctcttttacggacagcctttcattctctactggactccggctcggttctcggtcgggtagtatatctcggaacagcaggtggagtttctggggcggggcgggagcatctataaaagagaatccggaagtacgttcttctttctctttttgtttttctctgtctgcttatccttttctgatcaagcaaacctcattgttctagtcaaatcaaacaatccctcacgcatacacacatccccatcctggatcccatccggagcctaacctgaactccaatgcgcgttctcagccgaccctcaaaactccgatgtcacccacttcacctgggccaatctcgccagattttgagtataggggtcaacaatggatgggtggcgccggcagtgatgggcaagatcaagtacaaggaagaacaagaccgatgagaacgttgggattttgggagagttggtgtgggacaggaagggacgaagcaccaggtgagattggtgaggatgatggggatgaccaggtcggaaagacgaacccgttcgaataaacaaacccggtaggggccttcttcttagtttatttaattctccgctctagagcttcctctcaggctcttctctttcttctcttctctcgtgcttttccacttgatgtcctgttcttgaggacttctgtctcgcttagttgtgaacgagattttcaagcaaatcatatctccatacacacatatacacgcgcgtccgcgtagtatcccttccattccttcaattcttttctttctctctttgtgtcatcgctcgaactataccatccatccatccatccatcatctcgtttccacgcactctgctatacatccacgttttctcttttttgttctctttcttaactctttcctttcatttttttttgtttctgttggccatgttgatattctattttacgttcatgttgtctgtttctccctccttttttctccttcacactttgtaagagaggttatgtagccctgaagttggcatggaatgtcttcttctcccttttcaagcatattgtgatcacaatccatctcttcaaaagatatacaacaggaagtgtgcggacaaattttcgctcttctggccaatccgtttggtcgaatttgacctatttgagataaagaatcagggttcggagggttcttcgctctcattctcaccaacgaatctggtaggtgtcagaggtattaatcagattggtgtagacgtcttatatcgatcctgcctctttctccttcttctccttcttgcttttcttctctttcttctctttcttttccttcttctcgaccttctcgaccttcacatcatccccggtcttttcaacccttggtttcttggactttctctctccttctcttttgtcttctttctcggcaggagcagtcgtggtgttatccttagatgccttgacctttttggattttttgggtttctcttctccatctttcgccttgacggcgctggcgtcaatgctggtggtagtagtagcagtgagggtcgcatcggtagtggaagaaggctcggcgggcttgacggcatcggaagatgaatttttagcagctcgctttgcgagtctctccgctttggccttggctgctttctcttgggatcgttttttctgttttattttgattgatacatgtgttggaaccaatgattcagtatatcagagatattcgtttggacggagagagacagaaggagactcttactagctctgcagctttctctgctttagccttctttgaatcctccctctctgcgcccatcttttcaattcgatcggtgatcgtcgacatgatagagacactgtccattccttggatatcttctgtcaacaggaatgtcttgaacctagccagtgatcttgtgtgaggcttccgagagaaaaagaatgagaaatttaagagatcagaataatcctggaattataatctaagctcgaatcggggcacgcgtccattcaggttcccgaaaacaaagagaacagagacagacctttgatttcaggtgagtctctccaatgaagtcgctcttcaatactttgttagggcacagaatacataacttccagttgtttgttccaggaattgggtaaagtgggtcttgagcgactttgtccggcggtgggataagaggtaatgctattttgttgatatcgttttgaatttacgagaggagtgagtgaaaagaaatcagcttgagattgattcaagcttagatttgattaaaaccacgggaaagacatacgttccgaatcagactctaaatattcatatgggaatagagatcaagaatatggaaagttaggccaaatactcctttctatatgagagcaaacgaagaatgaaatagaacaaaccttcatcctcatcattctcatcctcttcctcatcctcgtcttcatcgcccgacatatcctcgccttcaccggatttctcctcattgtcagactcttcctccccctcatcatcatcactgtcattgtcactatcactatcactttcacttccgctctctccactgacttcatcagctcccccatcgagtcccagcatggccttaatctcgttcaatcctgaagcttcatcttcctcttctctctccctcttcttgtttaatcgtttgaacatcctgcaggtctgtctgtgtaggtccggtcggtgcttagcctgtcggacgaacgagctgataagattttggtttgaatccaaaaaagaatcccaaggtaagcgaaaacacgtgacatatagctgtgtattcttgcctgctacgatttccgatatcaatcaacatgtacacacatgcgtatacgcgcataaacacacaacattgaaggacgatgttgtctggttggggatgaggtaatccgatagataggatgagagttgaagactgtcattagagtacagtagagttccatcggagaaacgggataccttatacggcgcgtcctagttctcatcgtcatcattctcatgtgcaagccaactgatatcttgctgggtgtcattaatcttaaaaaatctagatatctagcgagaagataaaggagaatgaaaggaagaaaagtagaagttatggatcccgcgcaagagaataggatctctaaatctatacgatcggtttaaagaatgagaatgttgtcgacagcctctcggaccttgacatagactgcgtccttggtatctatagccgggatctgatcaggaagaaatggagagaaggatagcacgaaacggtcagaaatagttcattagagcttcttccttgacggtcatctaatagcatgtaaagcagagagaatggatgaacagtagagagaagacatacttcgtagactttgcccttctctcggtagtaatccaccacgggcattgatgtctcaatgaaagttcctattgttggtgcaaaccaaaggtcgaatttgaatgaaataatctcaaccctaccacaatgagagatgacccccttggggggaattggaacgttacttacggaatcgcttgacaatactctccttgttgtcatcagctctgccactggtctttcctctctccatcaatcgctcaagcatgacttcctccgtacacgaaaagaacatgaccgccttagaaacacagacagactcgtcaaacttgatggcctggtccatctttcgagggaatccgtcaaccaagaatcgaggcttcgagttagggtctgagtccgtatatgtaaggtgagatagatcaaaaggagattcactgctcagtatcatcaaaccgataagaaagaaggtggatccagccaaacgaggaacgtactagcccaatcggcaggaggatcctgcaaagcggccgtcatcgcgttaagtaagagctggttaagtgattccaagaaaacacgcaccatcacaagttcttttcagacaacgaacagtatcctgacaggcatagcaaataaaagagaacgaaccttgacagtgacctccatagggaccacctggccttctctgatatactctcggatcatgtcaccatactgagatccgggtcgatcctgttcggctcgaaggagatcaccagctagtttttgatcagccggtcaatcggaagtcgggtcaatgaagagatcaaattggattaagacgaagaaagagcaaaggagagagatatgaacaaaccagagagatgaacaaagtgataatcccgaacgaggttggcgcactgcgttcccttgcctgagtatagaaacccacgaaggagaaacaagtcccaatcgagaaaatacaaagaaagagaagattcagttacaagtatagagatacaccaagactgtgtcgggccatattctcgaggtgtttgacgatacaagcgatgaatacgtcggatggacttctgcctggataagaaatgagggaaggcaaaggaatatatgccgaagagagaagaacgagatgatacgtaccgacaccgggtcctccgaggacaaagatcacaataacctctgactggtcgaaagccggggtctctgaagtcgttggagccatgttggttggtaggtgtgtatgtatgtgtgtgtgagagagagagttaatggagttaataggtgaaagtggtaaaaaccagagcccgaacagaatacatggaatgaaacttgtttccttttcttgcttgtctcactctggaaatttcatcatcgtctcctgtcttctagccaaaccccgcttctctgcccagcatctatcgactcccgaagaactaaacttgagcagatattcatcaaaaccacatgtagatcgataacgggtatcaaaactctcgcccaaatttgaagagacaaggaagaaggagaaggaactaagaaggaaaacaatagacgacaaatggagacatgaagaaaatataaaataagaaaggtagattggagatgatatatattcctccttctctgtatttatctaattatgtttgcaacattgttccagaaaagattaagaaagagagagaggagaagaagaaacttctcaaggaaaagcgtctgatctacgcggcagcctttcgaggctgtcgcttcctgtagtggatggtatgagggtgcttaggaagaacgatcatcgactcatagtcggtagcgggaacaccaccctccaacttgagctccatgttctgcacaaacgcagccagaatagttgaaagttgaacgtaagcaaacgattctccgatgcatcggtgtcgaccagctccaaaaggctggtagggagattcagtccccttgctgatcgctccgaatccgtaatcgaccttatccccagcgttgttctcgtactgctctcccgccttggcagccactccactcttatcggtccatcgggccgggtcccacttgctggcgttctcccagattcgagcatccatctgtgcaactccaggagaagcaagaacatagtaaccctgtggaggaaaaaagccgtgcaacagggcacatgcatcataaatatgccaaccaacttgtcaatacattgaattcgtagcagaacataccttagggatcacgtattgaccagactcggaaggggcagaaagcgcttggggaacggagatatcagagataacctttcggaaaactattgaatatcaaggcggcaacagaaatggtaattagcctgtaaaacatgcaaataagaaacctcaagaacaaaaaaggcacgaactggaatgaataggcgcatgaatccggagggtctctctaatgcaggaatccataaccttaagattcttaatgtcatcatattcgagcatccggaacgatccgtccggctgtccaagaaccgcaacttgctcgtcgtacagccgttggtagacctctgggtttgcggcaagctcaagaagtgtccaggatgaagtggcagaggaggtgtgctgaccggccataagaagagcaatcctagatatatcagttttcccagatatgtttgtcagcgaacttccaaacatactagttagagtggcctgagtgatgagaagagatactgacatgatatgagcaatctctcgatcgctaagaggtcggccgtccttgtaagtttggttctggagagaagcaatcatatcgtgttcgtgctaatgccaccattccatcagttccaaacgaatgggacaagaacaagaacaagaacaagaacaagaacaagaacaagaacaagaacaagatctccgtcaggaccaaaagaacttaaccacctggctctgcaaagaggaatctcaaaactcacgtcactctctccgtttcgcctgccttcaatgatacccaagtagaagtcactcatttccttctgggcttgatctcgcttccagtagctcggaaggggcaagtaagggaacaaaaagttaatcggggtaaatcccctatcaaggttctcatacttttgagcgaacgacttgtcaagtcccgctcggacctcctttccttgcagggttctagaagctgtgaggatcgtcagctcgccaagtgtcttgagggcagggaaggaactccactccttggatccatctttgaatgccttgaagctgtcatcggtcttgagcatagtgtcaaactcttcaaagatcattgggatgtatgccttgaggttctcgagcgaaagaccaaacttgacaaatttcttttgttccataaagacgtgattcgggcaatcgtatacgacatccttgccaaacacaggagtagtgagatgcttttggtgtggaagccaaccagaatgaggattcgagtgtgttagatacatgtggagaagaacgaaaagagaaccggcaaactcacagtataggcctcctcggcgctaacttggctaagctttccaccgagaatcatatcatttccctaaagatcaagaagactaaagtcaggtcgggaattcgactgtctctttcgattgaatacaggctagaggaaatgctaaccttaggtcccaaagcgacggttaccttccttccaatgaggatgaatgtgaacagatcgccgtgctaacaggacagaggaagacggacgacgaggtaagtttcactcctaatacattgaaaagaaaccacggagtcaactaaccttctctcggcaatcaaagtagaatttgtaagggtccatcccatacgctacaagtcaagatggcaacagaagctccatcagatggtcagttcgccattggtgagagaaatgaaggcaagacacgttgagaaatcgcgcgtacaaacggcggaaccgagccagggcacatagtggaatacaacaggtggcaagctagggtcctttggccagaactgttaagttgtatgggatgtgtcatccacgggtaagaccaagaaaccgcggttgaagggaaagaaaataaacgaatgacttgaggtatcagcgatcactcctttgatgggaacttttacagatggtattgagtctctactgtcatcttctgtcttgcttttttccatctctctgtttcattcttccttgtcttcgtttctcttcagtagagaggaaagatacacagactccacaagaacgtcttcacttggaaaaagcataccttcctgcagacaagacacgtacacaagagacaaggggaaaacacttccaaaagaaaaaaaaatgggggggggataaaagaaagacgtacgagctggtaagagacattgatgaggacagccaagatagggaatccaaagatagcagccaatacaagaatcggagtggaaggaagttgttctctaggaatcaactgagcgagctgtgtaaagatcgattgggacgacgacataatcagaaagatcgagtctaacagaaggaaccagagcggagagaaaacgacgagcaaaggcgaagaggaagagagagtccggtattgggagaaagagaggtgatctctcttaaaaagatccaagcgttcgtaatcttctggtcgatgctggaaaggatcaacagaaggacgaaaggaagaaggaaagaaggagttgaacggaagaaatcgaatgtttgtcgttggccgacaaatcgttcgatatttttttccacttgtatttcattttacttatctagcctttagtatgaatcgctctgcttctaacacacatgcatctatgctctttcgggtacaactttagaacgtcaagaatcctgctacgtgtcattctcaggcagacacgtccttgtatacatcgaacctcctaccgaaaggctcagaattagagcgagagagaacggagaaagaaaaaaaaaggagaaaaaaaaaagaaaaaaaagacgcgtatcagtcagcagaatgagagcacgttccaactgtagcccgtgcaaacaacgaaacaaagccctacctctggacagtcacaggaataccctttcgggcggtgatcaggacttctgggtcgatcaacgcatgcacaatcgattccttctcgtccgtcgtcgccagctggagacccatcgggtcgtacacgctcgtgtgaccccactttcatgacaacagtaaaagaagacgataaaaaactcagcacacaggaacttggtcgcagaaataagaatgaacagaaacatacggcctggtaggcgctcaggtcggagcttcgagccggcgaacacatcgatacaaacacctggttgtcaactgcccgtgctcgttggaggagttcccaatggagagggccggtggtcatgtctaggagatcacaaacaagagattaagagcacacatgtgagtcttaaccgattggattcgagtacaagttcctgagtgactggagaggataaagcatcttactgaacgcagcaggatagatcaatgcaacgcaacctaattccacagcaaagcgatagcgaacacggtcgatcgatcagtcatcaagacgtcacacaatgtggacaggacaaagtctcaccttgacgagcggcgatggctgccatttctgggaactgatttcagattggacagatgatacgtaagcaaacccaagacatcaagaacaacccgaaagtcgatggctcttgcccgagttagaatcaagcatgatagaaagacatactcgaatatcatagcaactgttcgtttttcagatagcacatacacaacaacagaatcatatcagcgaggcattcttgaaagaagcgaaaagagagagaaacccccgaagagaaagagtaaggacttacatcccaagtccaatcttaccgaacgctgtgtgtcccatgatttgattcgttctctcgtgttaactctgatttgggacagacggatgcacaaaaaatcctaagagaagagaagacatacgggtttcaaagctagtaatatctcttccacccgtcagactatcgctctccttgaatgtcatcttccccgggatgtcgatatcaaacagatgaacctttcggtgaatagcgacaagctcgcccgaaggatcatagaccgtacatgtgttgtaaacggaatctgtctctgggtcgatttctggaatagagcctggcgaagaggataaatggttttgtataggatgttatcatcagcacaatcaccagcaccaatgatcgacaggactccattttcggcaagaaaagagaagactcaccaccgataagccagaccccagcctccttcgccacggctgaaagcatactcacactctcgcccccctcggctgtcttctctgttgtcaaagcagagtttatggaacctattttggggattcgttcggcatatttcctaaagacgggaactgcataaggcgagttgaagacttcctttttacccaattaaatcaagttatgtttttcgttgtgcatgtaatttaggttggaacacttccatcagtcgagaattcgaagaagtagagttgagcgaaactaagaacaaaagaaacaaacaggtagaacaactagatggttcttgatgccccccccggctttggcggctttgaggaccatctcctttgcatgggccaagttcgcctgtttgttcgctccagttccgcccaactgaataagtgacaatctgaaaggagaagctttgatggatgccatttctttggtaagtttgtcctgttattcttttctaattttctgtagtagtcaaagatgaggagaagatgaggagataagcgatgagagataggagatcgaaaacgcctaaagtcgatgagtcatatcagactggaaaccctttggatgtctttcgttttgtttttttcctcgtgactgaatatccaactcttcatcaggccagatgagggtccatatgttcatgagtcagggatctagatggtagaatatgattgtatatggatctagtacacaatccaagcgctccatcagcgcaacccaaaaagagaactatgaacccggaagaggaagaggaatgaagcgagatttgagtaaagcaaaaggacaaacgaggaggatgatgtaacatatacccgagattgaaaaagctggttggaaagcagagacaacaagagtaacaagcaaggaagcaaaaagaaataacgagcggataacgaaactagcgatgacagacagcagaagcgagtagcagaaggaaagaaaaaaaaagttgttgggagaagaggcgagtagtatgtaacaaaggtggcgctctcctagatacagtataccggaatgtgttctataacagaagaaagtacgaagggcaagagagaaaatgccgagaaaactcgaagagtgacgatcggaacaatcgcctctagcttcagagttgtctcttcggctgtagagcaagaatcaaacgatctactttctcttcacagcggcctcctgagcttggccgcgctccactgtctcttcctgattcgtcgctgcatggcagtttcggtgtcctcgtcaactgtacgcttggaactgttgcaggccttgatagccgaatcagggcagtacgagtatgatccgctcttgttgcaggttccaacgctgctaccggagatccagtactggcaaaggtaaggaatgagggcaaagaaagggttgctggtgatacagagagggatgaaccgaatgggagcaggttagagtccaaagaccatgttggtagaaaggggtccagttctacaaaccgaaacatactttgagtggtaaacgcaagcgagataggtctctccactgagagaggcctagtacgtggtggaaactgagaagccggagtatgaagggcaggagtctgggagataaataaacaagacaacagatattagattgatgtacaagttgagcaagaaagcagtatgaggagacgcagaggggcagatgaaaaaattgaacgaaaaaaacatacagctgcagacctgctgggaagtcttagccgcactcgtggttcgctcaacgatcttggtgggaacggccgagacaaaggtgaggaagaaagaaagcacaaaggccgagaagagggtagacttgaagagcatttctgatagtgtactggttgaagtagggaaagtctttatgagggagtgaaagggagagcttgtgccgtttgcgagggagcggaaggtgaagaagagacggaaggacgaagatgcaaggttgaaaagagaacggggaagcaaagccaaagaagcaaacggacacaagggaggattaaaaggatgaggactctggagaaaagaaaagacatcgtactcctggtttgttggactcaatctttataggaatgctggaaggaggatttcctgattaaaaaaaaaccccgagaaacattttcgccagagggcccgataggccagagtgtcggagtagggcatggtaagaagggattggatgaagaggaggtcgagggaagcattaagatcggatggaaggatattcaccgaatttcgtcacgctatttgttccagaggttgatgcggaagagtgagagatgagaagaggcacgaaatggaaggatcccgggaaacacctataggagactacacatagatctgcagctactagagcaagcccatcagccaggttcactctcggtccgaccttcccgatttgttcgggatagtaaacagagccgattaatccattctatcagatagaccatcgtggtcgctagaaacgatgatcgagagtgaggataacgcaacgtctggggaaaatatttatgatggcaaaattcgtaaagacaactgcgtcaaagccttctgttcctatgatattcgccagtacgccgtgaccggcgagaagcggagatcgggaacgcagcctgaatcgcttagtggggcggatataaaaagtctatcgggcttttctggagatctcggggctcaactgaggttttccaagcccgagacatatcgcttcccgcggtcggaattcaccgacggaagcttctttcataggcctgaaggtgatatatcaaccgcggctggtggtcaatggcatttaattatttaattcctcaaggtttgagccccattgactaacagacggatgctctttaccctctgctctcttcgctagaaggatcgatcgccctataaacaatgaataaatttctaccgggcagtccggtccgtttggtctgttctgtaaaccccttcaattgttctgttccctgtctcgtacacccactcttttactacgcggtctctctaacattcaaaggatagagagtagaccaacatgacaaattggaaatcccgttgaatctagattttctctctcctcttctccctttcacttggaggacgacgtctttttgatcttttgtttcttgagctttttcggaatcttgtctttgcgcttctctctcgtttcctccttcagcgcctttttcctttcctgttcgtcattcagaccgttgtaatatagatgcggaagtgataggatgatcagctcagtgtcttctagcccgagacgcttctaaatacagatcagtccgaaacagggactaacctttttagtcgccttgtcctcatggcgatggccccggggtcccttcttctggaatccatcctcgccctcgtcctcgtcctcgtcctcgtcctcgtcgctcgcgctcgcgtcttggccttcttcgctatctccctcttcatcttctccctcctcttgaataccaacgataccgacacctccgctgcgggcgtatattaggttctttccctcacccctgttgacctgatcgacgtctcgttcgggatcatatacctccgagagtgatcgcggaatatatgacgagttgaaaatcgcctcatcctgtgctttatcgatctctgactgtgtcctcggtaggcttggcgggacaggtgacttgacagatgacgaaggttgatcgatcgatgtcgtcgccaaggaagcttccagagaggcaggaatcgatgaggatccacccgcatcctccacagcctcgatagaaccggcttgagcgtcttgttcgatccactttcgaaggacttcttcccaactctccagctcaagatcttgctcgttttctttcttcccctctccgttgtccccaccctgctgtggtggttgttctccctctccggtcgttgctgctgttcctcctcctccccgtcgtcttcgtttggcatcaacggccccagtcagtcgctcgttggtgatgaactcgaacgtccgtctcagacccatcacgtgaacctctcctccggatcgtttcttgaaaaagtcgatcacgttccggatgtctgatcggagaaagtcgtatgcgtgcggatgatcatgttcgaccgattgggagacgtcgatgatgtacagatgatcgtgatggaacctgggtgaacgggtgggcaggcaggcaggcaggcaaagttgtgtcagtcatccgtcttgggaggtcatgtaataattctttgcaaagacaagagaatgagatgaggaggaggaggaggaggaggagagacgtacaatatattgtattcggatagatcggcatggactagtttacatcgctgccacatcactcgcatcaccatcaatagttcagcatacaagtctgccaactttgatgtctccatcgccggcgcatccttcaatcttggtgaaggcctagtcgtaaagacaaggcgagaggaaagacgcagcggaacgacataagcaggatgtcttgagtatgaggccaaataaagggagggaaaggggggaaagagaggaaacgaaaaagacctcaccatccgtcatcatttccaaggaactccatcgccaacacgttttctctaacttcgataggcgtcgggcatcggatttgctcgttctccaacctctttagattacgcatctctttctctgcccatactgatgtagttttgcacaaagaaagagtagaaaagatgtgaacgtgaataagaccgggtacggcttcggcacaagaggagagagaagagagggacacttacgtctgaccatctttctagggtttccttttccgtacccacctcggaatcgatgctcaccagtgacgtatttgtctctgtctttgaacacaaggatcgaggtcttgtagatcttgagcgcgatatggtccggcaagggcgtcgggttcgggttctgaggagtcggggccggagggttcggaggaggtagtgcgtggtagacgtttgcctgtgttgatacaaatgaggatgcacatacacatgcggacatcgggaaagagaaccgcgtaagcctcaaacgggaacacgaagcaagacagacggagagaacgcacctcttttccggtggaaacacaaccctcgacgatcccaacgacacccctgttgatcatctttaccaagaccaatctggtccgttgatcgagcacctgttcgaccgtggctcgatcgctcttatccttctggttcgctctctcggaagctgcttttcggttgatcgaaggtcccggttggtacggtgccacattgatcaacctggccaccctcgacatttcagtctttgtacttccaccatctgtgggttcacccgtgctggtggcaccggggttgactcgaggtttgggtgttgtccgcttggtcggcctgttcagcgcaggaagaggaacggaagatgacgcaggtgccatcgaagtttttgagtttgggtttgacccggaagaagcggcagcggcagaggtgacagagtgatattgtctcagtcggttgtactgctttgagaagtctatcgaaggttgcacccgtgggaacggacggtcagtctaaaatagatccagacgttggttcctttctttttgataacaaaccagggaggggaaggggaagggaaagagaaagagaggacttgcttcgttcggctccatcccaatcttcatcgttcacctcacccattctcacgtactcatccccactcccttcatcgtcatactcatactcatcccaagcttcctcctcctcctcctcttcttcttcctcttcttcgtgatcatcgttagtttcctcaaagactacgcctcttaaggctccggatgcaagcccgggaagatccttgggttgatgaccgtcctcgtcgatgaatgccgttccaggaactcgaggagctgcgtattcttgtcggacaccagacggatcatccggcgcgtcgtcgaactgatcggacggagagaccatctgtgagagaaaaggtggatgtctacgtttgagtcagaacagggagagagggagaaaacgagaagggtgaaatcagaatcgagcctggttcaaaatacgggaacagtagaaagtctgtgtggcacctctactttggatgtgttcgggttgtggattagctggttttcaaactgctgacgctttcgttgactgtggagattgtgatatcccaaattttgaaattaaccctaacagatcaagcaaagagtttgaatcacactcaagtccgctggaccgaccctgatgaaaacgctgggactacaaatttggaccaaattgttgtagtatctttttcaagatttgtatattgctttcttatttgcctggggtgttttctcatcgtacacatcaattttgaaagaatcatttgataataagacagtaaagaaagagaacacggacaagcgagctagacgaaagaagaaaacatcaagagttagctctcactcgcgctttgttctcaacgtcgaccacaaccaagaacaagaacggagagagggaccatagaaacgaagggttcgaaaagagatgaacgctccgctggccgttcttaagagcataaagcgtttcagcatctccaaaccgttaggccggattactctgcgataaattgtgttatttttcttcgtccctgcgaacatctcttttctctccgttctttctttttgtctgttctgtccttctctctcgttcttgttccggttgctattcacgggatgtgcttgtgtgatctgaagaatgaaaaggtgacactaacctaatacataatatgatggtagagtacaaaggaaaaaggcgacaactacaaggtcggaaagtgcacaacagaacgaaagacaaacaaaagtcagtattcgtgtggacagacagaacgtattgaaggagggttatagattgatgggtagatcagaagcgcatcttttggcaagtgctagtcgagtcatcaaagcgtgagggttgagttcaggctcgttatgactggggcgacatgttgtcatcaggtcggacagtggagtatgtgtgtatgtgtgtttggtgtatttgggagacgcaaggccgtcgaagcaagtgaaaagacgaaagactaaccgatcagagaggatgtgtatggagagaaggaaggaaagagagaagagagagcgaaaaaatcaaggggaatttatagcaaggacttgcttacgtaattggtaaattttgggcagcccaaactccgacccttctcctgttagggttatccaggtttgtgcacacccagtccctcatctttcaccagtttgatcctccgacgcttttggacagacacactcacccttggacgcaccgacagcaaaccgaacacacaacacgcaacatgtctggagatggaaaattgtttgacgacctgttcgtggtttcgtccgttgacaagggaggcaagaagtttgaccggggtccgtttgttccctatgcgtgtgtaccgttgggtatgtctgtgtttgctgaccgacattccttttctctctttgacgtgatctgtgtatcgtgactgtctgtctgtcttgcgatattaccggacggcctggtccaacctaaaaatcgacactgtgcattgatcttatatgatctctgggctctcttttggtgatgatgacgatgatgatgattgggggcaaaacaaatgcagtgtcaagaatagaagcctcttcgtccgcactgtcgatgaacctgacgctggacatcaactctgaagtgttcccgttgagcgtgggcgaccggatcatgctgctcctcagctcgacactcttccctgacgaggccgacaaggcggaggacgagacggacggacaggcaggcgaatcaaagagggaggcttggagaggtggtgaggaggggctcgcggctgatttcgattatgttacgtacggcaagatctacaagtttgaagacgtcgctggcccggaaaaagacgcgtacgtaggagggggagggggtttcttcttttgttcttccttctccgtccccttacgatagaaacgatactgattggaacgggattgttctttcctcccatcgttctctccgctctcattccacgttccgaacgtgtcaaacagaacggtctacatctcgttcggtggtctcctcatggcgctcagagggagctacaggcatttgagtaatatcgtcgttggtgagaacgcgtactgtttgattaggaaatgagcgtttctctttgttctgttcttttttttcttactttctcttctcgggcgggaagacgtaagagaatacgggaagggtttgtttccggatagggcaagacagaaggaggaggagaagagggaaatgacaagtaaaaggaagagaaaaaagagaaacaaaaaaaagagaaaaaaaaaagagagggaaaggagaaagaaagacagatacagtgacaaggaaggatcatcaatcgggagagctctaacgtttcttgtagacacaagctttcaacacggtttctccttctctgaggacatcatcccaggtgagggatccctcgttggaccaggtgggaagaccggaccgggtgaacgagagcgagatgaaatgagtgtttgtctcgtcctgtgtgtgagtgtgtgtgtgtgagagagaaaaagattgttagtatgaaaaaaacaaaaacaaaaaaaaacaaaaccacaagtaaacacatcgtcaagaacgaccgagagaagaataaagagagactgacagttcgagtcaggtcaaacccaaaggaagaaaccatcttgacgaacgcttcgaccgaagacatccttgatttcacttctgcgatctccaatcggcctctagaaggagacgaagaaagcaagcaagcaagcaggagaaggggttaggctaggactgcatacacacaagagaacaagacaagacaagacaaaacaaaataaagaaaaagacaagaacgaggaaggacgaacccgtctttgaggacccgggcgatctgtctgatcccgttcacccagtttctgcccatcagacttaacgagcaaacggcggcgtcgacgacttcggctcctttcgagcggccttccggtccttcgcctcccggaagatcgatcgtctcacaaaagtcgcctctgatcacccactcgtcgggaacgagatcgtaggagagcactttgaagcctgagggaacgagcgactttgctagctcggcatcaccacaaccgagatcgatgatgagcgaacccggggccagggtcgatcggagggaggacgtgatgacggagactggcgattggggccatgtttgagtctgggatcggaatccttggtggtactaaggggagaagagagagagaaaaaaaaagaaaaagaaagaagattggctggataagaagaaggagagaaagaaaaggcgaaagaagaggcaagagagatagacgtacatcagagaaaatctcgggatcggacttcatcatttccagagcggaagccgagctggtcgtgtatagctgttcgttgatccatctgaatcaggcagcagcgcaaagagagagaccgatatgagcgtgcgccggtcagttctctggattgttttgcgaacgcgtttgatatgagagaataaagaaaagaaaagaaaagaaaagaaagagaaggatgtggacgaaacctgaatcgggcgccagcgagcttcttcttcatctttgcctgcatgggagtgagaccatgaaacttgtcgccactcaagagtccttcgtcctctagagggatgacaacggtgttgaggtcgtcgaccgtggcggttgacggcgccggttggttcacggacggatctgcctggaccgattcggccgagggggcgacggcgacgaggatcgaggcgagtgccgggtcgaccgtcttgggtttctttccctttttcgactttttcaacggaggctccgacgtggagtcagcagaaggggcagcggccgaggtaggagcggaggcagggttaggagcaggggcagaggcaggggcgcgggcagaagtcgagggagggatggccttttggttcttggaagggctctgcgcgctagtagcatcttggccggccttttggttctttttctggttctggttctggttcttgtttttgttctggttcttttttgatgctgctccgggagcagctggtttggattcacctgcctttccggcctttttcggttctacctttgctttgtttccggcgttcttgtttgctcgttctgtagtaaagggggttagagacagaagcaagatcagagggagggagagagagagagatatgactgtgaagggaaggggggaaggagattgacagcgcaccttctttctccaagtttgccatcagcttgtctagattgacggtggccatctcgaacgatgcttctcctccggcaacggcggcggcggcggcggcagacggtcgtttccgtttgttgcctgaaggattattgtttgcggggagagagctgttggcgtttgagggaaatttcccccatcctggggtttcgaacgacatgccgatggagtgggtgtgggtgtgctaaaggagagagagagagatagagagagagatagagagagagagagagcagctagatgagtctgtgtgggaagagggcgacgggggaggtttctcaaattattcagtcttgagggcggggatgaaatcatcgggtggttacgcgaggagcacagcttgggcgtgttaccaacccggcctccgcccccttacagagagagagagagagtgagtgtgagtgtgagtgtgagtgtgagtgtgtgcattagagagagtgcgtgtgtatgtacaagaagacgcacagtagagggaatacgttagagagacatagagagagagggagagagagagagagagaggatgcactggagaggatgtactagaaacaatgtgtcgttagggaatgcattaggaatgatgtgtcagggaaagcaacagagagaatgtattacagaaggtccaacagagaaggtccaacagagagagagagagtgagagagagagagtagactgcaaggactagcaggagtgtgctagggaagatgtgctagggaagatgcgctagggaggatgcgctagagggagtgtatttaagaatgcaatacaccacgctacactacaccacgctacactacaccacgctacactacaccacgctacactacaccacgctacactacaccacgctacactacactacgatagaatagaatagaatagaatagaatacagtctgatagagtaggatgcactacgatgcgctagaatacattacaatacaacacactacaacacactacaacacactacaatacactacaatacacttcactggccacactcgctcactcgctcactagatggagtgggaggggggtgaatgacacatgcacagccacattgacacgcagtcatgcatctcaaagcagtgctcgtaaccttcgtatttcagcccaccccgctctctctctcatctgccgcctgtacgctttgacctcgaactgcgcacaccacgtgacctcattcttttggttacccccccgccccctgacaccaccaggatggccttcattctttacggttctttccgcttccatttttttctttttctttttctttttctttttcctccctcctcctttcccgccgctcgctctttcactctcatctttcaccctcaccccacccgtacgttcaccgttcttgtgtgttctcttggtcttggtcttggttctggttcgatcgttgctctaacaacacagtctgatcttgcttctctcgttgctccatccaatcggtcaatctcacagctcccgtcccatctctttttcttttcccatcacaaatatgtctcaagccgttcccccctcctggaaggtatgatctcatctctcttgtgttttttttggtttctcttttttcctcttcccttctccgtccccaacactaaccaacattataccctcccacccatctacacccacacacactcacacaggacgttggcaagtcctcctccgatctcctcagccgagactaccccctcgccggaaccgctctcgaggttcgaaccaaggcgccctccggtgtgtccttcaaggtcgccggcttcaaggactcccagtccaacgccatcaacggtgatctcgagggtcgatgggctgactacaagcgaggactcgccgtcacccaggtttgtcatcttctttgctcgtgttgtgtccatctctttttcttttttcctttctttctcttgttccatccttttttttttttctctttttttttttctccttctccttctccaatctcaaaagaaaaaaaaaaggtgtgattctcggaaatagtcgggatcgatggaaacgactcgagtagaacacaaaccaatcatcctagatggccagtctatcttggatctctgttctctgttctttgtccctctctgttttgcttctcttcttttccttctgcctctctctcacacgcccagatctctgaccacccacctacccacgttcacaaaaatcacaccaggtctggaacacctccaacttgctccgaacccaggtcgagctcgagaaccagctcgccaagggcctcaagctcgacttgaccaccacgttgaacccggcaaagaacgccaagggtgccgtcgtcggtgccgtctacaagacccccggcgttcacgcccgagccgtcgtcgacctcttcaagggcccgaccttcaccgccgacaccgtcgtctcccgagacggcttcctcgccggagctgaggccacctacgacgtcacctccggtgccgtcaccaggtatgccggtgccgtcggctacaccgcccccgagtacgccgccaccgtccacgccctcggaaacctctcgatctactctgcctccatcttccaccgagtctcccccgagaccgaggtcggagccaaggccgtctacgacatcaagtctgccggcgtcaacctcgaggtcggaaccaagacgtgagtctctttcttttttcctgctcttctcttgcctagtcttgctttgcatccctcttcttaccaacgctccttgctcaccgccgttgaaaccttccttttctcctttctagctacctcgacccctcctcgttcgtcaaggccaaggtcaacaacgccggtgtcctcgctctctcctacacccagggtctccgacccggagtgaaggccgccttcggtttggccctcgacacccagcgactctccgccccagtcgcctcctcccctgcccacaaggtcggagcttccttctctttcgacctctaagttttcagtcgtcagactgtgctttctttgacgaacggacacctcgttctctcttccacctgaattcgatgtgacccatctgggttctctccgtttcgtccatccgtccttggtttcctcctttgattctttctcttctttgtctattcttgtccccatcccccctttttttttctcgcctccacttccacctcctcgcttcccccttttttgtgtatcacatcggttcgcttggattctatggttctttgtgtgtttttccatctttggaagttcatagacgcaaacaataaacaacaaaacaagatacaacaaagagagaaagataaacgcaaaaagaaaacagaaagaaagacgagagatgttgcgctcgacgagaattccgtgt

SEQ ID NO: 477 - DNA, 304 bp, Xanthophyllomyces dendrorhous
aggcagtgaaggaagaagtaggcgtggaaggtaggaatcaggcaaaatgaggctggcaagcctcaaaactcggcacacgcatcgctgcgtccgccatggagaggtgcgaccccctccaactctgtcgtctcggcatggtcgataggacggggagagaaaaaagattgaagtcatcacgttgagtgcaggatgcctaacaggcatcctgcacaccctggccagtcggctcacagggaagggtgggtggtaggtagagggatgcggtcgaaagaaataacactcacataaaaaatggtcagccaag

SEQ ID NO: 478 - DNA, 47727 bp, Xanthophyllomyces dendrorhous
ataaaaaatggtcagccaagcaaatttacagcaacaagacgggagtttcaagggttagaagatctaatcgcagaaccaaaaagaaaacatcatatcattagttgatgttctaaatcggccggttgttcaagttgggaaaagcatggtggtagatcagagaaccggatctcgtccaggacacccccgtctgtgtttgcaaacagagggcgacacttcagacggcacttcctattgcatttgatggtgtttgtcttcttgctcaaaggaatagaaaaggaagagggatccaacgaacaagaagggtaaactcaccagtggttctgttggagggaagaagagaggaaaaggactccttgacggctgaccctttttgtacatttttcttcgccgcattttttcgaggggtcttatgcattaggagaggtaataatgtggcgttcaagagcacgtggaaagccttggttaggtattcaaagaatcaagtatatagcggtgcaacaatttcatccaactattgcttttttgttcctttcgctcggtagaaacgaaactgaaagcactagacgatcaactatacagtcgatgccctctccgtctcagaagagacgcaagctcgctcaatccacatcctcaaaatctgttgaatttgatcctatcgaaacggtctcatttgcatctccttccatgtcttccggacgacccatgagcgcaatcgctgctcgtaaagcagcggcagcagcagcagcagcagctcttactacttctgtttctgcttctagttctccttccgaaactatttcatcttccggagatagctcggccagccagaatggatccaaagctcaaatctcctccgtcaagtctacgaaaaagaggaaacctactctgggctcctcttctgcctctgcctcgacctcaacccctgagcctattaccaagacggcttcttccgacaaaccgctaagcgcggtggcagcaagaaaagccgctgctgcagaagtggcttcagcagaagcgtccatttttactatcgcgagtctgggctctcaatccttcaaaacctcgtacaagccacccaccgcttcttccaagaagcgaaagcttgacaaacccaagcaagcgcctataatcgactcaagtccctacctctccacctcctctaccgcagagcaggttgtccaaattcccattgccgcgcctccctctcgaccccttagcgcgattgcagctcgcaaagctcgtgaagcagctcttcttgcaacatccactactcttcccactacgagtcctcccactccatccaacaatactcccactcatgctctcgagcaacccaatgatgacgaagaagacgaagagcttgaaaaccaccttgcgttcgaaaagtcgcctccattatcgaggtcgtttcgaggattcgacctacctggagacatcgaccgacaggaggtctatgcagagtcattggacgaacagagcgagagcgaggaagacgaagagatcaccttaaagatggatggtgaaatcgttggacttgggttctctcataaatcgcatagaaaaggatggagtggactagagaaggaatcaaacattgagaggaccacgaaggataaagaagaggaggggaaagaggaagacatggtggcgggcgatgaaggcttcagaattgaagctgatgggttgatggacgatagtttgatcatgggaatgaattcgccagtggaaaccgagaaggaagagattatcaacaaaccatttcagaggtacaagaagccgtgtgtattgcaatttctttggtcaagtaatagtggataacaagctgatgctgatatactcattggcaatgatgtaacgctcgcgtgttcgttgagtccatccagtcagccgtccgcatacaaaggtgccatgtctacttttttccctgcgcttggacaaaacgttattcttctgtccgagaatcgtttaagaactgtatttgatgatgtggataacggagagaatgctgttgtagtactcttgagcgaaaacgaggtacgttcactccatcttagagataacgtaactcgagactagtgttcttactgattctaaccggtcgacttgagaacataataggatctgatcttctctggaacatgcattctctatcctctccacgcttccctctctctgttcggtacaacgctctttcccgactcaaactccttccctgtctatgcgcctacgagtcatcctcttcctgttctcaccccttcccatgcctcgccatcaggctcggccgagtccctgattaaaaagcttggtttggacattgaccaattgaagggcttcaaggctgccttcctcatcagggagggcaagagtggattggacacgatgggaaggatcgttcctaatttcgagagcatctggatgggcgatatggctggttggggtgttcggggattctaccctgttcgtatactactttcctccatcccaaacttagaagaatgtgattttgttctgtactcatacctgctcttatgtatttctgtagattcttcatcagtcttcattcaccgcacattcggttcctcttacatggcacaccgctttggagcagagcattcctcgaatttcctctactcaaaagtctattcaaccgcttccttgttcagatgatggccagtctcaagacggcgacgacgacgacgacgatggacaaacttcccagcctttcactgcacttgtcaaaggtcccaaacgagctggaaagtctggattctcgaggttgctcgcgaacaggttgctgggcacctatagacgggtcgcatttctggaaacagatcttgggcagagtgagtttggaccggaggggtcgatcagtctagtagtagttgagaagcctttactaggtaggttatttcacatccagtatagatctcacgatacctcaaaacacctagtcatatatgctgatccttcgatgtgttttctttcaaatgcagggccaccgtttactcatcctgctatcccttttcgggcacattacctgggttcctcctcaccaagacataatcccacccgatacctgaccctgatcgccgacctgcttgaatcctatcgactttcaatccagtaccctcctttccaaggctcatcctctatcgaccgccgcaatgattcggtgattcctataatcgtcaacacccagggatgggtcaaaggactcgggatggaccttctcgtccgattggaacgaatggtctccccgaatgtgatctacgagtttgatcctgcggatgaagaagagcaaggctgggaagccgccattcctaccgaaggtggttggggccgattccgtcctcaacaagacttcggtgagatcgaaccagatgaagacaatgaccagaggaatcgatctgggccggacgggtatggccatctgacccgatcgaatcaggccaagagatatgctctcaatccgattggagtatccccgatagcagccagatacggagcagttgatcttcgaatcttgggactcatttcctactttcattctcgattcttcaaaacgatcgacccagcctcgttatcaggggaaacctctggtcgcctagcatcctccaccatggtcaccaagtgggactttagtacgccgctcgtcatgcaacgaccttggacggttgattggactaaggcgattgagagaatatatatggtaggatctggagcagaagaagtagcttctgaagagatttggagagctttgggcggttgtgttgtcgctctcgtccgaacggatccttcctcttcttcctcaaggtctgtggttctacaatcaacatcgacgggtttcccttacgagtctggtcaacctcttccgttaccatccgcaactcaatatctaggactcgccattattcgttctgttccatcccctgacgcacacctctcatctcaagcgagcaagacaatccaccttttgactcccctccctccggatattctgcctactgcgagaattatcatgcgaggggatacagagcttccagtgtcagccatgttgaattggaaggatcaaactgcgatggaaggagccgatggcgttgctgggttgagagatttgcctttcctggatcaccgaatgaggccgggggcagatatcatcggtggagacagacggaagatcaggaggaatgttcagaggcgaacgtgatgtgttgataatcaaacttgttgattcttgaacagaaacatagatgccttccaaaatcaaatctctaacttgaacaatcgtagattaagaaataatgacatatataatatgcaatactattgataagggcagtatgtaaacagcaagtaattgtacacgcagtgcactctacggacgtgtacgaggcatacatgcagagactacgagaaatgatggatgaaagaaacagcaagcatctaaaaatcatgggctaacccgtcccaatcacctgggaccttcgctgccggacaaggaatgggtttgcttttgactagaggtggctgagacacacttcgtttctgaagaggcaagcttagtgatggatctaaattgattggtgttgtattagccgtcttggagtgaacgattgtagtttttaatgccttatgattggtcgtgccatgcagaggttgattagtagaaggaagcagtgtttcgggggaagaaagttctggaatgatacagggaacaggctgaaggcgttgttgaggttgagcgatggcaattgtgcccaacaatgaagtgtgtctttttaagaaggaagttgacggcggagcaaatggtcttgagacgggagataacggctgctgggctagcttttgttgaagtgcttgagtaagtgctccggctacatctgacggatggtccgatactgccccatccgaccaaacgtctgactttgcctgtcggacagcctgcgtgacatcgactttcaaagaatacgaattccggcgtttcgcagcggaaggatcgtctgattcgcaggtcgaggtacattgacggaaagcagagctgacggccgatagggatgtttgtctttcggacagacgtcctggacgattatgagagatggcctgtatatccatccaattttcagtgtctgtgagaaagatcggaggagtcagatgcccatctggtgcacgtcgaggaacagaatacgaagttgatcgaattccgtaaatattgacttgtttgggtgcgactggattggtaaattcgtaaggatttcgaaggatcggtgacggaggtaaaggcaaagcggctggacgggtaatagccagctcagaggtctgagcacgttgaggtgctttcgacgtctgagatcgacttccttcgcgtcgttctcctccggactttcggcactctcttccactaggaggtggtgatctatgccgagaacatcttccagcggtacccgaaccgccctcagttccactccgactagaagtagcgacctcccttccctttctctcagccatcctctctttttctttacccttctcgctctttagatgagatggcagaaaatcatctcgatcgactcgagttcgaggactcgatgcaaccgatgtgttccgcttcttcagccctggactgtagcctcctttgaacccaccccgacgagggctataggcggatcgtctgtttcggccagtagtaataaacgagagaacaggcgtttggaactgttgacaggtagagtcacctcgatgggatgatgggatggaagactctgcgcgtgaaacagaaaaagcaagctcagaggcgttgtttggatgcagagtcagaagcgacgatcgcctctttttcagggtggtttctacccagccctgttgtagtttaggcgttccagattgctgatctctgctttgatcgatttgacgataagagtcggggggaaagccccctgtcggtcgagaagatcgtaacgtcccgacttgttcgtcctcgagtaattcatcgtcttcggagtcactttgaccaaaaagactttctcgcttgaagcgatacttccttccgatgggcgcgctgatgccttcatcgtcctgcagaccctctccttcgtcatcctcctcgtacccatcgccctcaacatcaaagccatcgacttgttctacttcatcctcctcctctttcccatcctcatcctcatcctcctcatcatcctcaatatcctcctcatcatcatcatcgtcgtcgtcgtcgtcctcatcgtcctcttcatcctcgtcttcatcttcgtcctcatctccttcctcatcagggtcatcatcttcatcacccgagtcttgtagtgacttcatcaactccttcgactccttcgctaacatagcgggccgagctgaagtggtcgcgacagcaaacgttaattgaggcttcttgacagggacacacgtgacctcaggtggcacaggagcaggggaggagcgggatgacgtttcggaatgggctgtggagtgctgggcactcggcatggaaagaggagtcgtctgaagaaatgtattagggggtatgactttgtgagtctctattgatcatgatgaggaaaaacaaaatgagtgagatcttaccgagccagaatcagcaaacttcagcgtgggcttcttggaaacggttgcatccgtagactgtgtcttggccaatgacgccaagatagtcaccggtggggcaaaatcactgagaggtagaggtggacgctatatatcaaagcagaatcaatggtgagctcgatccgttgtcgatatacaattcaagtaccaaccttgggtaatacagcggcctccccgaatctgatgtgtactggtgcaggagaagggtaatcgctcgggactaagcccagactagactcttctttctctggacctcctcttacatcggacggatggaggtccagtatgttagacgggcagtctactgcttcgccgtcctcttctcctacttgatctaagatgtcacatgctccgttactcattctcctgcctttgagttgtcggatattaccatatccagcaggcgaggaggtgttggatgaaagaggtgttgattgtaaagaatgatgcgcagtcgttgggttggaattattcggtgtacgataggagagcggctttgactgatgagagtgagagagtaggatttgagagagaagcgacatttgtgacggagccggaccaaagatggcgctctggttgagattctgttggatagcaatcggagaaaccgattctggcgagtacaaaccgtcggaagaggagagtccgtccgagagacaagttggagaagagacgtctactccgtaggatgatgatgatgacaaagaaggcgttctggtgagcttgtatgggtcgcaggcaatattcggatcaccacatgataccggttggtaggacactggtgggcatccactctgtcttagggggactgggcgttttacaaagagacccaaaggatctgaagacgagtttgtggatgaactgtgatttccggataaactctcgttgtagtttccctgagtcaaaggtgggggaagaaagccaggggttggagttgtcgttgtcgtttcgggtgattctatcggctgggctattaggttattttcaacattggtgatcgtccttctcatcagcaacggagaccctaatgtttcgtctccgtccatatgagattcttttgtaggtctatccatcatcgtttgttattccgtggaggaaggtagagtagatagacagttgctattcaaagggtgccggaccttagaccgcaggagaagattggctcgaaactacacgctcatggcgaaggaaacctgtcgacaaagatttctgaagcctcacagaagaagaacagtgaggtgtcggacgtccctccagaaagtagtcagggtatcgagacgtattccaacaggaggagaagctgattaatggaaagggaatggatttcttctgttgggcgaaagacaaatgggaacctatataaaactaagggcggaaaaactaacagatttggtaacacgtaacctgcgtgcctctgtcatttcatccttcgttcagcttaccgaaagctcatctagctcttatctacctggatcaagatttgtcaaatcttctagtggcgtattatctaactctagagaggggaagagagagagaggaaaagattggattaagatatgcgtgccttcctcactgaccatctcaaaggtgagcagattcgaatgggtgagcaaacgagtttgaaatgctcgtttaccaggctggcacaataaccacaggaacgagctctttggtgatgtcaaattgctaacgaccatctagatacatctgaagagaattaaaaagagaacgagactaatcatttgcttctatgaagaatcaacatcactaatactagtacccgttcagttgctgattactgaaccaattggagaaagagactaatgccatctgtctggtcagcgctttgaccgcccagtgcctaagatcgagctagctgacactaatacctgtcaagaaaggtagagaaacctgtcaactctttttccttttctttgtcgatttcttttcattcccttctcgcttctttcacttctttccaccatctatctcgtctttgttcttcgctcctaatacacttatctcgttcttggctcaatatgaatacccaggcagtcaaggtaggctccccacgatcttacttggcacgcgcacatttcagcttcttcctcgagaagaggaagatcaactgtcaaaagattctgatgcgttcgaggttatttgaatgtgtcaataccaaagacaactcagtcccaggtgacaggtactcaaagcacctccatcgtgcgaacgctaatgatggccagcttgggttgtatcacgtatctcaggtaatttcatgctaagcctgtcaagttgactatatgctgatgggttcataacaaaaaacttagagggctactgcccgaagagaacttcaacgatgaaggcgttcaccctctagctcgttcgggcacgtcttcctctggcagtagtggcggatctcagcttggaggactccgcatcaagaccatcaagaagaatttctcgtgagtgataatcactcaacctgccacagactcgatttgctaaactcttatcttgataactccgacaggcctgaaggagataaactcattcaatggatcgtaagctcctatgttcctgtgtttttgtgaaccaacgcagtctaattttgttcctcgacaccgatcaaaggagcaaggcgtgatggatgctgtcgaaaagggggtgagttgaaagagcgccgattgaagatatcttctctaggagaagatagctttgtctaggtcttaattgctaaacatgcaggaaggacaagccataacgctgactatttcttgataatttaacagtatctaaaggctatggttatgagcatctacatggtacatagatctggttcctagctatcatgcctcctgttgagaagtttattgacttcaaattgcgacctggcattcacatctgtaaaggaccccaaagaccccttaaagtatgttctccttgtttgtttgtatcacttgaattgagaactgacatattcatgtaaccttttgggtatcaagtgtcatcgaggtcagatccgcatctgtgctgtcggaaatactcaagtactaatcaaatctaatcgtaacagacttataccttcaacttcacttaccacaaagttacgggtgttggcaccgttcctatactttctgtcgaacagaagatgaagtccatgacagtatctacagagccagtaagctcccgtcggctcgcagggattcatgtctatctctttctgacacgttagagttcattccttacgcgcgttccaggatccagatcccatcttcagcgaggtacaagccggaaaaccattgaccttagggcatgtcaaaaaagctactaaggttcatctgtttgactaattcgactcctgagacatagctgatataccgatctgccttctcatgaaaaataatcatggctcgtaaaccaccagagtcttctaaaggtaagcctactcattttcgggctccttcttgttggctcatgccaaatgtttgcgtctatattgacatacaataactcttagcaactcatcttgatgacccagaatctggctgaactacctagtaagctctgaaacctcttcctcttataaatgatgtagtctgggcgtcttacctttttgaaaataggaaaacgatgtgtgtctgtcacattgttctatgaagatcatacgcctgaggagtacgtcctgatttgacccttgaaaagctggtgaccgtaatagaaacctgacgaatcttcatcctatgacagttaccagccccctatgttccgcgctgataacgagcgagataagtacgtggttctgcagctcgatgcagaaatcattcagtgacatcctttaagtccttcgtttaatccagaatgtactttgctactcatgcccaagacgaggctcccgaagtcttgacgtgagtattgtaatttatttgaagtcaccctcttcaaacgagatagttcgaacacaaactcagaattctgtgcacttcgtaatcaacagtatcgatgctctggaaactgggcatcatgggtaataccttcattcaattctgttatatcgataactatcccttacttttgttttcctttcctgtctcagcgtatcgatcaagatccgatccgtcgccgagtatctcccagcatcccttctggccaatgactctgataattatttcacaaacaccaatgccaatcgtatcgatcctgacagaggaagagagcttgacgaacagatgcttgagaaggataaggagctccggtcatatctatggaacgctcaagaggaaaataacatggatggtaggacgagcgcgcgattacctatgttccaaccatttccaagaactgaccaataattattgggctatttatctagatgatcaacaacacctcaggaaaagtgttgaaccactagaagatcgtactgtttacgaggacgaaagctcaggctttgactatacaggagccgatgaaatggaagaagaggtcttggacgtagtcggaaagaataagaagggcggtctccgaatgaataatcgaagaacttccatacgcttgaacaggctggtatgtgggtttctacgcattgtggctaaatccaaaagtcgatggaattgcgctcatgatcactttttttaacttaattaggctcatccagagcttgacaaaacacaatctcaagccgctgttcctgaaactcagcctattgacactacccaagcaatacatcaatcataccccgtgcctaatgaagaatcagttgatgcctatgttttctcgccaagtaagagagtgcctttagcaccatctatgagcataggtatgttcagcttcgaaccaatcatatcttgcataccgataacgactgatcggcttataacgtgatgttaaatgtaaagatgaagatcctattcagtctttctcaagcttgccacatactagtaaatttctaaattccaagaaggctgagcaagcacaaactctcaccaagaaaatgtctagcctgattgatgcaaacacaggcgaagaatggcttccttgctggtgagccgagatatgcttagattctgtgtcatatcatatactagtgctgatcttcagtgcgattctttgcaaaaacaaacgaacaaaaaggtgtcttgatcaccaggaagacggagcggacttgggtgggctggtaggctgtgacaaggcagggtgcaaagtgtacatgcatggtaagacattctttcaaaatcccagtcgtagttgggtgggtaatagttcgttctgactttgtgaattctttcgatcaatcaagtctggtgtactggtcgagagaaaaagaaagactttacgaggagagagccatttttctgtctgaattgtagagtaagtgcaaggagatcaagcacttttatttagaatgcctagtacgctaatccaacatgtactctgcttgactaccgtgggtagcttcatcaagatgagagatgcgctggatggtctgaggaggactatgagacggctcgtcagcagtttgtgagtaatgctttttgctcaacctcaaccgatggctgacacattcccctcatcatgggccatatcatagcgatctttggcgttgttccggcgcgccttgatggtaacatatgacaatggattttcattcgacatcaaggaagttgccatgaagctgagtgagtcattgcttttatctatttatccacatctatgtacgtctgattcaagtcaatcaatgtcatgcttgattttgagataggttgcgaattggctgaagctcgtgcagtatctcaggtgagcttcttgatattattcctgagatggtgacggaagttgactagtggctctaccgcggaggaattccttgctgatcttactatagcgtctcgagttggaaggtatgagtcaaacttgacgaatcacgaatacagtgctcaatttcacactaaagttttctctattttctaggttttatcatagttacttcgagaaagaagaagaacagaaagatgactgtctccagatcggccgagtctcttgcaaaattgaagacgtattttgataaacgagataccgcgctcgaagaccaagtcgtaggaatggtagacaaaacgtctgaagaggaagatgaggaggtaagtcatcatcactaagtccatcctgtgtctttggacttgaatgatactatatactgactcaagacttgaatcttctatgtatataggtcggaaatcgtgctacagagcgagatataagcccctctttaacagagattcgtaagtcgcgattagtatcgaccgatagtatataagatactgactaacacgctcttctatgtcggactatggaatcaaaagaagaatcaacaccatcaaaatttagcgagcagaaagagatcgagcattcgaccgtgatggaggttttagaagaagggctagccaagacccagagtcgatctcagtttcaggattacgttccaagttctttgccaagatctcccaaaagaaaatcagacaccgtacaagagcaggaacctctgaggaagagatatcgagtgtcaactgctatgtcagagatcaatttggatatttaattggccccttcatcatcttccctttcctttctctttcatttcctctactttgcggcggacgtctccacatgatccatcgatcaccccttcgtagactaggagtctttctggcttcattttcccttttcgaaacttatcagttctcttcgcgatctcaagtcttgtcctgaatcgtattctctatggatactgcatcatgggattagtggcaaagtggcattgaatcaaacaccccctttactgccaattgctttctgattaggcattttcctactctgcttagcgaaatcttctaaatcttgagccgagaagtagtggcttgcagctgaagacccaagtccacgcaagggagagaataaatggaataaaagaatcagcacatacccaaggtgtcttatgcgaattaacaaaagaggaaagaacgaaccttccaacaaccattctttcttgatctccatcacgcttcttgcaaattccttggaagtcaataccaactataagatttcacgaagatcgtcaaatcagttcaagacccactaatgagaatgcgtgtgatgatagaacgagacaaaagcaagatcaaagaacaaacctcgtagtacaagataaaacgaggtggaggttgagcttggaacattgacgatgatggatgaatatggattgatgcatctatataggtgacagagcgaaggaaagcatcagaacacatattggttttgagtttagaatcagagagagggaaggtcatactgtttttagtcgttcgatatcctccatccttgttcaaccgagcctgtatgaataaataacaaggtacatcaacactatcaattggcgcatcctcatcagaagaaaaaaaaggcgtaaaaaacgaacggtgttctggaaataacctgccacgatcgatcgttggataggtacaatgtcgctcgagtttggattggattcaacgacgacttccactcgttcgcacagggctgctagttgatcacgaacgtctcgaactctcgtgagacatttgtactgcagaaaattctgtgttccaacgatgttcaagatcaaaataagtttgttggtttcgatgaacgaataatatcatgtcgaaacatccatagaaggaccgagagatacgaacctcataacaccattgttgagagtaatctgtatcacgccatgtctcccagatgttgagtaatgtgaaatgatcccctcctggcttgacaaagtttttatgcgcggcttcggcatggaccttcttatccttcggtcggtaatacaatgagctcgattcttggagcatggcgatgatagaaagaacctgatatgaagaacaatataaattagagtcgatcgtcgacaggaatataacgagacaaaagttgagagagatctcacttcatcagtacagtggaaattttcactattaatgactgctttagccaactgaggatccactggaaactctgccatccgtcttcccatcctcgtaagttctccatgatggttcatcgcccccaacgcatacagcatttccacactcttcatcaacgtttccgccgccggaggatctaagaagtcaaatcctaagaggtcgtttataccgagtgatttaagaagaagaacaacagcggataagttggttcgttggatttcgggtacggtgttttcttctagctcgttgttgaacgcccacttggtgaataaccggaagcactgtccagcacccacacgtcctgcacgacctgcccgctgattcgctgctgctcttgagcactattggtgcgagtcaaatgatgaagagtcaatcatggatagtccgaacgctgataagtacaaaaagaaagacgcacaggtactaccacgagagattccattccggtcttgggattatacgagttttgcttcacaaatccagggtcaatcacatacacgactccctcgattgtaatcgaggtttctgcgatatttgtcgccaacacaacctggtataagaagaattgatttgagcagcttgatacctgacagaaagtagcatagacagctcaagaaagaatagttggcacccaccttcctggatccttctggggtaggctcaaagatctttgattgcatctcactcggcaagttcgcataaatgggcgcaataatcaactctggcaccttgtcccccaaagctctggatgtctctgcaatgttctcagcagcagcatcaatttcgtcttgaccctgagtggcaagcataaacatcgtttttcgattcatgtcagcaaaacagaagggttacggtagcaaagaaaagaaaagaaaagaaagacaggccgacatacagtgaaaaaaacaagaatgtctcctttgggagcggttacatgaatttggaagatggtggtgatggccgcatgaaggtaatttgcttctggctgagccgtgtatcgaatttccactgggaatcgtcgtccaggaactgtccatcaaaaacataagaaatgcgagtaagcattttaacttgtgtatcatccagaggaataaggaagatatacccttgaaaagaggagcatcatcaaagtattcggcaaatttcttagcatcaagtgtggcactggagattagaagttttagctctggtcggaaccgtgcaatatcctatgagagaagaaacggaaagagcaatgcaagtagaatggtggatttattaattcacgagcgagtcataagaacaatgaaaatctaacacataagagaattcttttaactaaccttcacgagaccgaatagaatatctgtactcaaagtcctttcgtgagcctcatcgatgatgattgccgaatattcacttaatgctggatcagttaagaagattcggagtaacattccgtccgtcatataatgtagcaccgtcttatcacttgtgcaatcttcgaaccggatcgagtatccaacttcgttacctagtctgacaccagcttcctcagccactcgagcagcgacagacatggcagctactcgtcgaggttgcgtacaagcaactttcatcccgttcttggtgtagccggcctcatggagatattgaggaagctgagtcgtcttgccagaaccagtctcagcggtgacgatgagaatctggtgctcagcgatagcgtttagtagttcctcccgataagcgtagatcggaagagattttcgaactgcatcgatctgatcggctgttgtgttgagcagtgaatcaagaagaaggtatagagaatcaagatcagatgagatagatcaatattatgaacgaaactcaaaggatcacggaccttttgtttgagcctgagcaatagcctctttgagctgcttctcttttgcagtcatcgctccatctccctgcatgacaccatcactaatccattcaatttgttgagcctcatcaatcacaaagtcatactcctcccccatcacgatctccttcttgtcaagcgcgcccgtcttgaaactactagctccagcttgactacgttcccattgatcaacatccgtcacgaaggcttgaggatcctttttgttttcttcatatcgtttgtagagcacgttccttttcttttctgagtcaagttttccttgttcggttatgtagtcatccgggagttgatatccgtcgacaccatcgtcaatcttgagacgttcctccataattcgaagaagctctttctttcgttcaagttcgcgctcctctcgcttcgagaccttcattcctcggaataagttttcctcgtcgataatctcgagcttgagaaggtccatctgttgagcctctctttttgcaaggtactcctgccgagaacgctggcgcagatcaggcatagctcgttccctagcggccgcatcctcggcaagggctcgccgtttagatgcttcagattcctgggcgacggacgatcgatcagtgacaagtttcttggttttgtccttgtctcggtctctgattcgagcggcgaacgcatctcgctcggctatatcttccagacgctctcgttccaggcgttcttcctctgtctcgtccggtggtggtggtggcttgtctgaatcatctcggtctccaccggtttcagtgctttgagcctgactatcaagcaattcctgttgtcggaagtactcttcctcctcttcctccctaattcgttttcgaatctgtttttcctcttcgtcactctcccaagcaccctcatcatcccgtttccgaatagaccctcgatcagctcgcttctctttcttctctcgctttctctcctccttgtctttatccctttctttctcctttgacttccccttcttgtccctcctagaagaagccgatccggtcgttcccccggaaaccacttccgcctccaggagaagaccgtaccgcttgtccttggaagcagtcgtggtcggtgttcctgtagatgaggttgtagctgcgtgagaagacgactttgacttgtgcgaacgaggaatctttgcaaaaagcgaggtagcgaaggattgggtgtctgttgagtcgggtaggccggcggagacgagaccgttatagagcttgtcggtcgacttggaagaaacagctatgagcatatggagtacacaagagattccgagagcattatgtcagttcatctatgcttccctgtcgtcttcgtaagggaaaagctgaaaggtcaggtggaacaagttgctagcgacgcgtatgatacaagaaataaacctcagcaacggtctcatcaaccgctcttcacctagtcaccaacagatataccagtatgtgtctatgtctggatcgagagaaaccacagagaagaagaagaggcaaaaagacacaggacgatgagaggacacgaagaaactggactgaccgatggcagcgatgtattcaaccatggtcttgtccgacatgcccatcagcctaaggaaggtgtccccgatgaactgcttagtggacgtatccatggtgtggttcaaccctttatttcagagattgttctttcgtgtatgttcggacccttgagcgtccgacgaagtaaagacgtggtgaagagaagatgtatggatgtatgaatgagtgggtgatggatggaaggaagaatgaaagaccaaactacaaaacctttcaaatagaatactacaaaactgttgtgatcatcttcaaatacaaatcggtcgtaattagaactataaaacttcttcaatggaacgtattctgatctgacatctactcttccttctctccatcatcccgagcagtgacaatgtcagacctcgagagagtccgtcaagatagactgggtttaccttccagcgaacacatcaactcggtcaatgtgtacgagctcatccattccattcggtcccagatcagagttagccttctctttcgctctcctggtttggattcctctcggacttgcccggtcattgggtcctctatagaatcgagtactcatctgttttgctatggtcttccttcatcacgactctagacaaacatagattcagctctcagctgggagaagctgaacgcgccagatatcaacttctccattcttcgaccgcttcttaaaacgtatatcaatgataagaacccagctatcatctatgcaatcctgctcaaccggcttcagtttctcagactcgcccaggaagatctcgctttcaaaggcctactggaaagtcgggcgatgttttgcgagattctcgccatgaaacttgtgagcctgaattccttttgaacgggttcttcttacttgtctgataacagattccgtgacttgtttgatgatgccgacgtcagacccgggcatttgcggcttcagatcttgaactcattgactgtctaaccagaccatggaacccattccaaggcgtaaggggtttttaatctctttgtcttgtcatcataacagaattaagtcaatgttttactgaacagcgactcttatgatcaacttgaaggcttccgaaagcgtacttggaagggtcgatcttgaggacattaaagagggcatgcagaacaccctggaggtcgccatcatctcttcctccaaatgtgaatcattcatgcatatcgataggctgtcttatcatactgactttcgtattacatgcgatgtcttctgtttcaagacttcctatcgactcctcttctccaacgagtgatctccctaattcatgctgggaccatcgtctatcatacctgctccggcgttcatgctcgaaggggacttcttgaagacggataccttgggcgaggacgcagaagacggatagggcttgctggtgacgaactcaagttagtttatcatgtctgcgaagtacagtctacataagaagaggcgctcacaggtatcgcctcatgattttgtggttttctataaattcggttgatgtagtgaggagagtcatacagtatacctgtataacgtccgagaatctggctggcttgataccgctcgactaaaagtccctttctggagggacacgatcgaattcatcaagtaaatcccactttcacattcttttgcgctcttctacagatcttgcacttatgttttctcttcccattccggatgggctcgtagcttctttctgctattcatcagctttgtgctatgcattcggtatcaaaatttcgaacgaattcactggacggaaggcttcctcatttctatgggtcttggtttagccctagatgaggttcgtttgtatgatatcaattcatcacgcaacagtgaccttgttcaatctaaatagagcttcatatctttgtctgtctatgtagttcgctgccactaaaggtatgagcacggtttgatttaacctcatcaaactaaatctggcccatcctgaccgcaagaacactgaattatctttctacaccccacttgatctatgataagaacatggacttctgttctactcccaatctctgttcaatggtaagtctttccggcttttatttctgttacattcaatacacctaatacagccttctcattgaatatatcatctataggcctagatctctccttccttctcatctttttcacctacctgatactccgagtccaaaacttgtgcctacctcatcatcaccgagaggatgaagtggaaacctccaagcttgcattcgatatcttggcctgtggagcggcgatcctattcccgagattggctttcacagtgatcagaggaaaggttatcgttcttgccctcaaaaagatgatggttgagtaagtcccaaccttttcatccttgtttccttcagctttcttgctcacagcatcgtaagacacaagagaagactgataagacggagctgcctgtgatagttttgtcctgtttatgatgttggctttgacttgtttcacaggaatattctatgcccttataactcttggcaaatctacctggacggcacgatccctgtccgtgtatattctttcattaaaactgtgttctacagactgatcgttcgagttgattcatgtttgacagggcgtggctcatggctcagatttggtttggttctagctgttagcatgcccagtctcaatctgtcatggtgtctttctattcttcaatcactgacgagtacgattttattttatcgcttttgaattacggtagacctttcttttcaatccagcgccagctttcatcctgttcgtaaagcctcatttcacacgagtgatgttaatctctcctaatctcttcaataaacatatcttcttgatctagatctttggcccaatactcttgatttcttacgcagcgctatgtaatactcttctcgtgaccagtgagtttctctcctttatttactcacatcacggcgtcgatgatagcagttcatcgtgtctggtactcatggtggtggttgtatagttcttgtatcaattttgtcgaaccggtatgcaaaggtttcagagaacgcgcgtgaggaacaagcctttcaggacgctgttgctaccgttggtggtgtaaagagagacgccgtgagttgacatcatgcacctttcgtttccgatgttaacctaaacgtacaatctgatcgtctcaacactggtcgtctcaacagatattttcttatatagttccgtaagttctgcttccgttaatcatactgttaaaagtgagatatctgatcgttctcttggtgtgcaggctaaacatcatagcgactatcattttaggtcctctgagttatgttctgagtccccgaactttccactccctcaatgtgttcctcattcgatcgagcgtacgtttgaaattacacatatgaaattcaaagaatctcatgactgatctgttgtctgtcactcaacatggtttgacagacgtttcccttgctcttggttgtctcgctttacgagcgttggaaaattaaaaattctaaggcgatgaataatctcctcgggtttgtctccctttatgttcttttttccagatgtttgagtccttgccttctttaacctttgattcttcctgaagcaggtcgttcggcggatctagatcggactggatcgaagatgtctttactacatcaaccttttctctcggatcgaattctatagccacccgatctgattctcttgaccttctcacccgatctgaagaactcgaggccgaaatctctggtgcatcatctcctgtagagtcttccacttctgaaactatcatgggaaagctaccatcggacagaactcatatggaaaccccaatcaaacgacgaaagactgttcgagttcaggactctcaacaaagcacacatggaggatcgacgaatggcgtcttgacatcactcacgtctcctcttgcaaaactcttccgatctgattcttatcaagttatcatgaaagaaggagagggaggtaaaacaggaagcgacgcggaggagtccttgggtatgcttcgaaaagaggtcaaggatatgaaggaaaggcagatcaggatggagaatttaatcttgtctgttctcactctttgttttctgtatcttcttcacaacgcctggttgacatacaatactgacaccaatttgtttgtcatcttattttgtaatgaatcgaactggactggaaacatgaagggcgttaacgaaggaagttactaacaaatcataatctaagtaagatgtcttgcttttctatctgataagatagtcaaaggaagaattaggtggaatctggaaaaaaaaaatcccgaattctatgctctttccaacgccgttctcttaattctctcctttcattcttcttgggctattcctgtaacaaagacataaacggcaagcagagcttctctccagaaaagataattaaatttaacaatagtgagggagaccagaagcaaatcgatgatttgtccttcctcttccctgatggccttacctttaaaaatccaaaaacggttagaaaccgcccggagacgttcgtatgacgtttttctccgaacatcgcttgctagctcgttggacgagctcctcgtttctctagatggcagttcgataggacaggtagaagaagagccagcggagggaatgtattgggtttggattgtaaactatggtgagcaaggaggagatgtcgagaagaagagggaggtcattcaacggttactgggaaacgatgcgatctggattcctttgatcggtcttgtcagtctgtccagtcttcctttctcttccatcggcttgaacttgacttgttttctggttccactggatgtcgtaacgtatggttcgaacacgattgaaaatatgcacacacatacacagacattttccattcttcgcttcccaacacctcaatctgccctatcctttgttcttctttaccagaaccaacctctcctgcatcccgcatccacactggatcttcctaaacctctgtatgttgaactagcttgtccgacggctgtcttacctcgactacctccgataccaaatacgtttgaactagaaggcgcagtggagttcgagaaggggaaacgaaggtggccttgtggcatcgaggtatgggaggattttatcagtgcggaagaggaggctatgttgatcaaggagatgcggactatcggtggatgggtagaaggggtcgagaaacgtctatctgtgagtaggctcctctctagcttgcattgaagcttgtcattcatatattgactggttcgtctggtgtttgcaccactcaggttcattttggcaaggagtttgactattctacaaacctgacgaaggcgagcgaccatgaaatgccggcctatatgctcaacggaggtccgttggacaggttgccatatgtgaatccgaatcttccggtcaaccagatgaccggtcagatctatccggctggaacagggattcctccgcacgttgatactcagtatgttgttgtcatagtgttgatctatacagctggtcatatagaaacaaactgatccgcttgctgtgtctcccgagcagttcaccttttggagaggtaggtgtcttaatcaagcgaccactcaatctttgatagtaattgtcaacaatcattaacaggaccatttatccacttcgaacaggtgatatggggaattagcttagggagcaccgtcacgatggaacttaagctttgtggagaaattgaggaaaaacggatgcgggagcccaaacgatgcctcactcctacatctaactcaaatcctatccaatcctcgaatacaccactatctgtactattgaaacggcctcctcttccagaagttctttctccagacgaactcctgttgatagatctacctcctcgatcacttcttgtgatgaaaggcccgtcgagatacggttatactcatcatatccgaccaaggaagctggaccctcttggtgaatggggagaaatactgaggcagagagaagaacggtactctctaacgttcaggagtgtgaaaacggatgaggtcaggctgaagggttgcttgtgcgagtgggatcgcttttgcgactcgagattttgataatcatgatataaaactgcttgaatcacatctacagcatacagagatactcttgcacacatgtacatgatcatccacaacgcaagcaagaattgtgatgtatgacgggcaggatgcactcgcaaaagaagttagtgtttaatgaaaaaagcagggaaatccgttcaccttctttttgctctagacagtcatcatcttctttttctccttgcgtgagtccttctctcctttcccacccagcacatccctctcccctcatctctttacttgctctgttggaacgatttcctgtgttctcttgccgtcgttcttcaagaatctttgtgtttatcactccatgggctcatctcactcgttctcttcacctccccgggtttcatcggctttttgaatcgcgtctatcgtgtgtgtttcctttcttgtcgtgaccatgccatctctctttgcggtctatcggttgagtctttagggcgagacgtgctcctcaactacaagtgcacatttctgaagggaaaaaagaaaaacgaaagaacctcactcaaccgatgtccggtttaccacctgcctcaaacttgccgcctaggcctgcccatcttccagcacccccaagctttcttccagctcctccgatttcttcaatctcaaacaccagctcttctggctcccgaggtgacttctatattccctcctacggcaggggagatcgtgatgagtgggctgtgagctcgagagatgaggacgaccgcgacagaagagatagcttaggtcgtgattacgatggtaagggttcttttctttctccttgtttcgctctctaggttctgtcctagttcgaacttggtccgcttttgatcgatcattaccagggctcacctgctaatgatcttctacatatgttggtctcgtctttgttcgcgtctgtgccttagatcgaaaaagaagacgatcgtcgtcttcatcagaatctcctcgtaaggaagcccgacgtgaacgtgagtttctttaaaagaattaagctcgaaacattattctaaacaatcaccacactggggtttcaatcaagccttatcacagaattctgcatatccactggcctcccgaatgagcagccgccaatattacaatccgtcgtcaagatcgtccggcccctcctccggtttctcgaattcatctactgttattgcaaccgatccagacctttcagagcatttgatgcatttttctgattgggcggctgccttcagatatcaaaaccctgaagtcgtaagtttctttatgtaaacattcagggtcctcaggtgtttacttacaaatcgacgcgtgtttctatcaactcgaggttgcaaccgatgatcctatggaacaacccaagaagatgcaggaacgctacgagacgtatcgtaaaaagtttctcagtcgacaggtgcgcgatctctctcctctatcttcctctcaatacatgaactgatcggccatacacgtcacattcccttctctggaataacagctttatggcttgtttcttcttaaaaaatcggaatgctggtttgtcgagaagtactcgctcgagcccgagatggtcgcgatgagagaacgtgtctctcaggaaggcagaataggattggtagacgctttcgtgacagagctgaaggacggcaagtttgatcaggtgtcatttgatcaagtggatggtgaggcaaagttccgttatatctattgcctaacttgccaaaaactgacatattcctatgtgttcctttcccattctctctggaaggcaaagatgaaaagagcgaactgaagccgtcagaggaggaggaggatttgcgaggcgatgcacagaagcaactcgtctctgttcagcccatcccgaatcaaatcttcatcaagagcctctccccaaatgtttctagagagtccgttgaaaaggtttctatttttcttcaattgtgctatagacgaaagatcgacgtttgaactgacgtaacgcaaggcgttccttctctcagatttgtaaggaaatctctggcttcaagcggctcagtctaggtcctccttcggagaagcggaatttccatcgatccgcttgggtgacatttgaagaaggaacagatttggatgccacttgcgcaaagttggaaggagcccaagtcagttgactctcttctcctaatttattcttgacgtcctgatgttcattatccgtattcattttactttcaggtcggggaaaatggatttacgttacatgtcgccatcaactctgaaccttacgtttctcgagcaagacttgctcctgaaggaacaaacaacctcaatcggctcaataaagatttaacacaagctaaggcgatcgctatcttgtttgagtcacaaagtttgaagaaggcaggcggcgaggaagtggtcggatctgaagctatcgatcagaaagtcgaagagttacacgggacaaccgatttggatggtgatgcggctgtggcaaaggttagttttctcttgggagatgttattcaagttttatcatgggtcgggttgattgaatggagtatcatatcaacgcttggcggacgcaggtcaaattccacttggatctgtacatcacgtaccttcggcgggcattccacacatgttattattccgctagcgttgctgactctgcagaagagctccaacggttatcagttcgataccttcgcaagcagaaacgggcgagtctatctcccgccaaggagattaccgcgctttctccttccgtcacggagaggttggaaaaagaccaaaacggggatgaagagaaggtagcggaaggagaagaaaagaagaaagaagccacagatgttgaggaggaccagagtgaacaggcgaaggcttcggcgacgggaattggtggagaaagtgtagctagtgcaaaactatcagaccgtgagtgtttttcttcctttttttccaatgcgaacctaggtggcaactgcgtggctgacatgatgactgttcttccagtcaacatgatgatctggagtcaagacttggatccaaagatcaacataatcttgaacagaacgacaatagaccctactgaggctggcgggaagaacgtttcggagtatggctatccttctcataacctcggatttatcaggttcctttgagatctgactgctcaattgattttttttgccaacattttaacgaaaacaaaagggagattgctcgaatcatcggtccgtttatcaaacaagaggatgaaggaaagttcagatgcaaagtgtgcagcaagctcttcaaggcagttgatttcgttagaaaggtatgtcagatggataaagtagaactcatgacctagagcatctgtgtcctgaaggaacgcgctttatatttaaacgaacacatagcatattccgttgaagcatccggagatcatgaaacccatggacgatgtgagtcttttcttgctctttttctatgcatcatctgtatgtttgcaaggtctcaacaactttcttcctgtttctgcattccaggtgcactttttcaattcgttcgttcttgacccactccacatcacgccttcccctggtgcgcccgctgctgtaaacgacgagatagttcctccccgatctcgcctacctggtgggttgatgagcataggctcctcgactacggcatctgggttcccaatgacaggtatgcctttctatggtgcaacgccaatgtggatgaacccgatggggggtagttataatcctggattcgtaggtttaggaggtaacaacccttatgttcctcaaccgatgttccaccctggcgtaggttttggtatgcttggctctcgaggaggagcagcaggtggagggatggccggtggtaggggagcggggaggagaggagacgagccggtgcaagtggatacaacgctgggcagacctgaaggtgtgagtgaagatccgagagcgaagaaaggtcgggttagctataatgatctggacgcaagtttacctcaaggagatcttcagttggattattagtcattccatcgtttactcactcttcttccgctatcttatattgatcccttgtctctgcttcctttgagccctactctcactgtccccgatctagtggtctcatatttactgtctcatcatatctattcatatgttgcttgtcgagtcgcctttccctattcaaacccctctgttatttcggaactcccttggcatgaccagaatgaagggaaagaatccactttaggatgtacaacatctggctgttatacgaattgctgcttctgaacagggtattcggacacaaactcatccttattcaaatcggaaaatcacctcgaaagattataatggatacgctcatacatactcatgtctctactcctatctctctacttgaattcgtttggttccttcgttttcatttacttatagaagctggatcattcttatagcaggacacccttggtggagggaacatcgtttcctcctgtacgagtgatagcttccctgatagcaagagcgagcgccttgaacgaagcttcggcgctgtgatacaagtaaaagacaagaaacaagatcgccagatggaaacataatgaagaaagaaagtgtcagatgtatatccatatgagagaaagggtaagcaagggcaaagacgaacatgtggtgattgttgactcctcgaatgcagtcgacgtgcaaggtgactccagcggcggtagcaaatgactcgaatacgtgggggatcatctcggttgacactgcccgcattttcatggcaaacaagggaaggtaagcaatagaaaaacaacagttgataataagaaaagtaataagatgaagagtaaagaagaaaacatacaatctccaattttttcacgagtgaaggggaggtcgccacaaaagtaaggtcgagacgagatatccaacacggctcttgataaagcctggacacagaggaagcggataaagggaaaggtcaacaatcccgattggtttgaggactcaatagtggtagagttgaacagaacaaacctcatcaaggggggcgaacccagtaccataccgcctgattcctctcctctcaccgagagcaagcttgaaagcttcacctagagcgagcgcgcaatcctcggcggtatggtggtcatcaatctcgagatcacccttacagtgtagagtaagagacatgttgccgtgcttggccatagcgtggagcatctaaagttggcaatccatcaacaggacggagggacaagaagcaggaagaatccgtgtgagggtcagaagatttggagcggtgatgattggattgattgatcaatggcccgttgtcgtcaatgaagatccagtaaggcttgcttgtcttgttctttccaacatttaggaagattaaacgttcctaacgccttacagttcgaactaatggtcgacccaacaaaccccatgacaagaatcgcaaaatatgcaaaagcagaaagacgaagattaagacgaacatgattaaggaagccgataccggtctgaatgtcgatgatctgctgatcaactccaggagtgtgatcaagagagatcgagcacacgatctgtgtctcgttagtattccgagtaacggtagcagttctgataggaagtccagcagacatcgtgaatgttgaagatgatggtggttgatgatggataagaagcaaggcttggatgaattgatcagttgtccgagaataattagaaaactttcgtagtgaattcataaaacccattagggattgtctaatcattatttgagttttcctctcgttctctcagcatccatcagactccatcccgcttcagtcgtttcatcaaggatgatgctcagattgactatcggcagagtcggggccggattcagagtccagcacggcctcgcctttaggtttcaatctacgacacatgctaaaggaccggtcggaattttttgggatatcggttcgtcttcaacttcgtcttctcaagcttcgctcgtccgccctctgctttttctatcctgtcgagcagacgaaacgactgagatcctcactgtatacttaatacgcttatacgtagaaaactgttcgccatacaactatacctcaccggctaagctgatgcgctcgttacgaaccgtctttcatcgttatggcccgattgcctctgttcgatcttaccagggtttgtccctgttctatttgcccgtattctaacaattgatgagactgatgagaataacggcggcaacatctatcggaaaccctgttcctgacaaccgacagacgtttcgaaatacacgctgaatgagatcgaccgggccggttacagcgcctgtgggctccaaatggtcgacacacctcacctcggacggaagaacgtggcggattggcacatgatgactgacattgtcggtttcgcattcaataatccactacatagtaccatcattgtcatgttcgtccttcttcaattgagactatggactgacaagctgctcaaagtctcttcgagtagtagcttgatagatagaggatagttccgtcaggaatgacttcgcgtcccaaagcgttctgacagaatcccatccatccttcttcttgctttcgtttcgttctctcagcacgacagatagagactattgcagcctcctcaatatgcttagcaaccggatgtacaatatcgttcttgttactaacattgagcatgtcattgaagagctcgcctcaagtgcctccgtcatgtacaactggaaagaatttctcgaccacgcctcgaatggccagaaggtctgttcgaaactcccttgaaacaatggaaggcacgacttactgactgattcgattattggatgagagcaatctcagttgaatctctcaatcgaacctcccatcaagccccatcacaccggattagacccccactggccctcaactgtagcacatgtgcccagaaagctaaaaagctcacgcctcaaatccgaatcaatgtctccgcgtgtatttgaaccctctagagcaacatcgtcatcatcaaccacagccgctacctcaccatccgtgattgcacctccgactaccactacagttgaaccagagccggtaacaatatcaacatccactgaaacgtcttccgaatcttccttttcgtctcttcctttgtctggtctctcaatggaaaactcccagggatggagcagcaccgcattccgagtttccacccaatcagacgccatataccctttgatatgtcctaagatccgtgaaaagtacaacgcggtgatccgatcgatgcccagatctcatcacaacatcatttcattcggagagctcaccaagcagatcgagcggctgcaacctaatattattcagtccctaggtgttgcctcgatgagcgaagttatcgaagaagctatccgggatggcgttcttgtcctgactaacaaagggcctaaaactcatcaactcaagctgagcagacgagtctatcagaaatctggtctgggcgcctggctgattcgatctggatggggcaataagtttgatgagatcaaggcactggagagagtgaaacacagagacagcccttttatcccggtggaatcagctgagccaaagagcgcggaggccaacgtggagaaggatgacaaagagttgtcagaagtcactgccaccgtagtaccgattgaatctaccaatacggtttcttcggcaaccttcgctgattccggcctggtcaccaactctgacacgccttcgactgcagctattcttaccgagccgactcctgaatccgcacctgtcaacgattctagatgtgcctcggacggtcaaatacatgaaattgcgaccttccaggtcagctctcaacaagacctgatgtctatgccaccatcaaggaccaaccttacttcttcaccagatgaaccagtccctgctttgtcaactgaggagtgcgacgactctctttctgttccgaagccagcacagactgagactaccgatgatgacctaacgatcatactgcctcttgaatcaggatctacacccacccccacgcctgaatctacatccgaaaccatgacaacagctagctttactcttaacattccgacgctatccacatttgtcgatttggatgatggatcaagacccagctcaaattcaaatccgagtccaaattcgagtccgagtctggaatcagcatcgggtgtaaaaccaactatcgagccgacgacgtcggcaacgaaatcgaaacggaagagaaaacaggttcagaagcaggttcatgacgaggccattcagaacatagaggcgcttactaagacgaacgagaacgagaacatgggtgcgactagctcgggtgaaggggcgaaggatgcggtgtcggatgtgatcagttcaaactcgaatatcgtttcagatttaagggaacaggtggtcaaccgtactgaagaagcggacaataacaagataggaggggtaaagatcaaaaagaagacaaagaatgccaaagggactgttcaacccaagaagaagaagaagaatgtcgggcagttggaggtgaccgaaactgtgaagagaccaagaggacggccgagaaagagtcctaccccaggtgttttgccgaagaaaaatccaccaaaatcgatcggtttgtgctttcattcgcttgtctctcgaatttgaggttgtatcactgtctccatgctgaaaccgccccaaatactattctcaaaggcatgcccagaaaaaaaagagaggagcctagctcagaagctctggccatcaaagcctctgttccatccgaccggccgtggaggatcctttcctctgttctcgccaaatctccggatactgctccctcccctgcatcctctcccccgacaaccctatcaacaccaccgccatcatcattactacactcgacgagttccgtctctgacttgcagtatcgaaaacttactccgcctgatccgacacgtgtgaaacttttcagctctttcggagtcaagaaacgattaccacatgttttgccattgcaaacgccatcgtcccaccaagcccgcgcttcggggccgaaagcagaacaggaaataacgttgagcatactcaacccgtctttggtctgattattcaagcttattcggggttgacaagacaacttctccgtcaacgtcagaattagagtcggtatattaacgcctagatgaacaagctaatgcgaaataaaggctagagtaagaatttcctcttcgcagtttcttttctttgtacattcttcaattcttccgctttcctcccaactcttttcttgcttcttcatcttcgatttttctatgtttttttcttttgctacatcagaacttgttgtttcacttggatctttcctaaaacctatcaaactgtcaacccacacagtcctgttgcttgtttatgcttactctataatcgtaccagtcctttttgagaataattcatatctcagaaaataaaagaaatgagggatgaattccatttgtcgccgcctttattgcgttcggcgttggagagcggcacttagtcaagtggtacatgttaagcaggaaaggaagacgcaaggatcgatgaatgatgcaatgaatacagttgatagatacagtgagcagataagaacaaacaacagagatggagggcgaaggagaaacacctgaaaacagattgaggaaggaagcttttcagatgaaaaggagtcggacgccttcaaccccacccatcagtggtcgccaataccattggggtccttcgagaaacatgccgacctcatcagactgctcgtctacgaggacatctagtgtactttgatgaggacgctcgcagccttcaacagggcagaaccattcatacgatcgagatttaactggtatccgaggtggttttatctttgacttttgtttctttttatctttagcagatccctccggagattcagcagccgaggaagaaggatagacaaatgggaaggtagaatctggatgcgcacaaagtctgacaaggcagtacccgtcgataaggtggccgcaactgaggacatagatctttctgtctgaactggacgcgcgttgaagtagtggtcgaaggcaagacgagcagccgaatgatagaccatattgctgtatccggggcggacgtcgtttctgcccttgaggttgtaaaggacgacgtattccctctggaagcgttgccgttgttgcgtgagaagaggacgcttggtcggatgaagaggcagggccggaaggcaatgagcgttcaatcccatcggattcgacaacatatattgaatcttgacttgaggatcgctcggtgggcgatggccggtctagactgtttgaatcgccttgagaaagatgtagctttggagcaacagacggagatagcctggtgttttcgacctcttcgtcctcgtcttgatcgatatggatggcttggtccatcttacccttattcttactcgcttccttcttcctggccttcttttcctcatcatagtcgtcgtcatcatcgttgtcgccgtcgttgtcactgtcactggatgaatctatgaagcctcctatatcaagctcgaacgaccgggcgaatcccttcctagtatcttctctcttgaaaaccactggagattcgaatatgtgctcgatctgctgatgatgaggcacaacatcctctccgctgtccgtgcggtaatctgaccgaagtcgcctcctgccttcggcaggagcccaggttctagacaacgcgcctcgtaagccgctgccgtagaaagactcaagtgtctgccatcttaatgatccagaagaaaatgctcgtgagagtatactgaagaagctcgaagtatcttcctcgtggtcgcttaggttgagcagaaagtcatcttggtaagaccaagcctccgggtctgagggtgaatttatatatgactgtggacctgagcgagaagtatggtcggtcaggtttctgggttcagactgttcgttatctgagctgctcgtatcaagtagaataacctccactggagacgatgagcgagaacctggtgtgggtgagaccatgaattcttcttcgccgtcgttgtcgtgaatggtagttgatctcaaatcagctgcgtctaattctctttctctcccactgactatcatcatcgacaacgacgacgaccatcatggctcccaaccctcgaacgtttcttgatctctctatcggggattcgccacttggcaggtgaggcttactgtgtccttcctattttctcatcttgctcccaaactaatatgcatctcatcccatacagagttgtattcgagctcttcatgaatcagacacccattacggctgaaaagtacattatccttcctttctttctttccttcttctcctttggtctttcatcgctgctttgcacagtcgctcatgagtggctcttgtctcttacgtttgttgactcttgttcatcagcttccgagcattatgtactgggtcagaaggagtatctaagacgtcgggcattcctctgtcctatcaaggctccatctttcatcgcgtcatccgttcgtgttcttctttatgtttatcctctcgaggtcgtaaagatttgatctataatatagcaatctgactaacgacggactggtctcgttaacacagccgaattcatgattcagggaggtgattttacaaagaagaacggatcaggcggagagagcatatgtttgtcccctcagtttcttctcgcttcgttggcttatccgtactatgcatcgctgatctgaatattgactattctcgtgcataaccaaatcagatggaggaacattcgacgatgaggatctatccattccggttgacaagcctgggttgctcgtcatggcaaacagaggaccagctactaacggctctcaattcttcattacgctggcccctacccctcatcttactggaaaggtatgatctcagcatcttcctgttgctcctcgtttgcacacgttgacacgcgtcgagtcgagaaaaactgatcgtcgtctttttttgtcttccttgttcagcacgtcgtttttgggcgcgtcgtttctggttcgtttgccttgcctagttgtgctgttcatataaatatatttgacatacaaatccatactaactctgcatcgctctgtttgtctcaccttctgccgttcaacaggcctcgaacatgtccggtctatcgaggctctgccaaccgactcgaaggatcgaccgttgacgtcagtcatggtagtcaaatcgggtgagctcgagctcgtcaagaagcctgttgcgagcaaacctgcttctccgccttctcgaacgacccgaagacggtcaggatctgtctcatctatctctacagattctggagatgatcgtcgcgcccgaaaacgatcccacaaacgacgttcatctatctcttcctcttcttctttttcatcctctgcctcggactctggttcggattcggatgatgaccggaggagacgatctaggcgatcatccaagtcaagtcggtctaaatcatccaaaaagacggtttcgtcttcccgttcaaaaaactccaaacaagttacgtcaactgaggctcgagatgaaccaagagacgccagaggaatccctctgtacagggatgagacagatgcagagattgatgctcggctggagagagaagagaaggagagggaggaaagacggaaaagggatgagttggagagactcaagaatcgcttaggaaaatccaatggaggtggtgctcccacctcaaactactctcgacatgattcccgtgtgaactcgaatgaatccaccgtagtcaattacaagggtcgagggtcgatgcgtcatagagaacaaggaccaaccgtcgaccttccgtcttatgcacctcgatataccaatcgacctgcaccccctcatcaacgtagccgagacagcaatgcccccaacggcggcacagccgatagatcagctagattcgatacgtggaaacatgatctcgcaggttcagatgttcaaccgagaggtgataggcaggccgatcagcacgtctccgagaggttcataaaaggacgagcctccgcatccaggattgcgttcgagtcggaggccaaaggacaagatcaagagcaagaaagagcaagaggtagtgcttatattgatagagacgagccccagtcgatcagtctcaagcataaggaaactgagcgagaaggtcggcccgagacgcagactctggcagatgctcatggagaggagtaaatgagactacagaagatgtttaaaacaaaaaggaaaggaaagtagaggaagggtgattttctgtttcattaaggcttgctctcaaattctccagctttggtcttatcttatggcctttcttagttcgctcgcatgtttttcttttcctcggtataatatggcaaggaaaagcagtttcaaaagacccattcgattgtttaatgagtgaaagaatagaaaccccttgagtgagaaaattccgatacagaagatcaacctctgtaaacatttttgtcgtttcccagccatactacttctctatttctctgcttcctttctattgtatatccgtcatctgttatgaattcttgaaaatctatctactggacaaggctacacggaacaaatcaaccaagatcagaaacaaaggtaagcgaccaagttcaggattagaatcactcaagagcagacaacacagaagacgaacgagaactctttggccttatcgtagtgaattccaatatgggtcggcacaccctcgactcgcttgtaggcgttcaagttcttgtgcaacgtgatctggaatacagacgccgaaccctgtcgactaacaatagttgacgaggcaaggaagaaagaccaaattcggaaccatctgttttttttttgtttttttgtttttaaagtaagtcagtaggttgatggaagcgcgatgtgtcaataagcttgcctaaaaaaagtgctgttcacaaaaggggaagataaagagtaagaaaaactgacctatcaccgtacttggccaaaaccttctccttgttgctgatccagttctggtaccacctgtagatggtggccgagtagtggacaccgagcacatcgacctgcttgacctcaaatccgacagcctcgacctccttaaggacccaccagaggggaatggatgcatcggctccgggaaaaacgtacttgttcatgaaaagtccccactggagatcctcaaactgccaggacggtcggataccagcgacctggaacacaaaggtaccatcgtcgtcgaggagatcgtaaacctgtcggaggaaggaagagtactttcggattccaacatgctcggccatctcaagagaaacaatcttggtgaaagactggggaataggatcgatgaatcggtaatcggtgcacaaaattcgtcctctgtcctcgggcacaccgttctctcggagtcgctcagttccaaacttggtctggttgattccgagggtgactgcggttggatttttgaaggaacgccagagtcaacacagcccattctttctccatgttgacaaggctaaatgagaacaaacctccggtaacatcacacttgtagttctttccggcaaaggcaaccaaagttccccatccacatccaatgtccaaaagcttatcagtgggctggaggtcaagcttctcgcagaccagcttaagcttgttatcctggagctcctcgagggtctcgggtcgggtgatatcgctgatgactccagaggtgtagatcattcggggtcccaagaaccactcgtaaaagtcatctagatagggtcgagagggtttgatgtttgaggaatcaagtattaaattatcaggaccgagacgtgtgaggccagacgcagacagactagaagactcacctcctcgatcgtagtggcctcgaacctgctcctcgtcctgggactgagagtgaaggatgacctcgggggcaaaggtgaagaaaacgtatttgaagagctcgggggtgaagttaaaagtaacaaagtcgtgtcggtactcaagaacctcaaggacgtcgcctgtttgataataatgtatgtttgttcaaaatgaagcatgaagaaaagaagagtcagccatatgagcgttgctcttcggcttttctagctccgaaagatgggctcaagttgcagaatatgacagaacaaaaggatattgatgagaatactcaagattgcatcttgagcagcaagagaatgaaagacgaaacgtacccttgaagtcaatcttgccctcaaagtacaaatcatgaagttcctggtaaggaatctttcgacccaagtactttttcctgacctcctcgtccttgaactcgaggtaatgtccgataggtcgtccggggagctgcaccttatcgttgatcctgcctccaaaggtagaggtcaaggtccagtaaccgatgaggacggggaagaaggtgatggcgagaagaataaagtagatgattcgggagtggttcaagatggggaacgtccattggatcaacttgggagtgatgatcaccgccagggcgagatgaagattcgaaaacgcgccggagccctctgcaggcaaaggggaaggagcgacgacgccgtcggccacgacgtgaggatgcttgacgaccatttctttccttctttctagcttgtcctttcgtgttgtttcttgttcttgcttacctgtcttcctttctaattctatcaatgaagagaaaagcctaatgagacagaagaaagaagatgaatgagaaaaggggcaagacaagaaaaaaaaggaaaaaacaaaaaacaaaacaaaacaaaaagaggagatgggcccgacgctgtttaagctcacgtgcagatacgaatgtggcgggaaattcgatacgttcaatagctatgcgtgttgtaacctttcatggttacgtgcgtctctccttacgctttcctttccagtacttttactgaagagttctctcccatccatcccatctgatacaataaagccatcatatgggatccacttacgatcaagcgactggccatctggcttcccttcaagctcacctggcgtctttaccaccaaatgcggtacctagctcggatgatcttacaacatatctcgctctgttcaagctgatccataggttggcatcaacccatatcgtccaggccaagtcagagacggccgagttgaggaacgcgttggataaactggtgttagaagagaacggatcagagtatgagaagaaaaggctcggtcaagagattgaaaagtgtcaagactttcagtaagctttactcctgctttgttcgatattcgtgacatcggctgacaccgtaagctcattctggtagacaggactcgtttcagaaattggggatccaacaagcaattgagaaactcacagctggtcaagataccaacattcaccaagtgactctgaaatttcttgagcaagaaaaagaaagcatgatgctgtatgttttctcctcgtctttatgtgatatataacttccttcttacctttcttcttaggctctctgcccaaaaaacctctttagacaaagatatcttgagtcaacagcgagaactcgaccagctcaagcttgagctcagtggagtagacaggaagatggaagatcttttaaaggtaagtgacctctggtcgctcctctgtttatatacatctttcacaagcggctgatcttttatcttctcgtatgtgtgtgtgatatatttctagatcactcaatccatccaaaacggagtcactcatacacttaacaaagcaaacacatgagcgttgctttttcttcgacttctccagtatattcctccattctaggccatcggctccccatagctggttcgaccacacaacctccgcccttatcacatcagaaaacatgtatacccttcgccttgttgtattatagtctctccctcgatacctatctttcgatttcttgtcaatcttttgacgttctgtgaaattaatctacacatcagagtcgcctcctgtgtgacctgactacttctgagatataggagtatatgcgcatgaaagatttcatcctgtttcagccagtcccgaccagcttcttattcttgctagtaaatggcgaaggtcatgaatgaggagaaagaggatccttgcatagaagttatttaatgataactctaactatctgtatgtttgtatcgaccatacaggatgaggacagagatagaatacaaaagtggattagttgatgtggcgaaaatgtctaatgaaaatgtgctggtgaggaaaagctgtgctccgattattgaagattttgtttgcaacctgttttttttggctttccctttactcgccctccacccgtttctctctccctcccaccttcacatccgccttctttattcctaattaaagatggcccctagtaagagtacacccgccaagactggagttagtggcacgaagaagaagagaggaggagagcagggagagtttaccctcaagcgagtcaagggttcgtctattcctatcttcaaaaatcccatgaaactcgcctccgatgaattacttacctatactggactttgtcgatcgttactcctttctatcttgtaggagagaacttctacgtcaatgcccatgctgctaggaagaagaagttgctcaccggtggaaaggctatcagggatagagacggaaagatcaccgagcaggctgctttccagaagggagaggaggatgccccgaacggtcgagttcaggctgacaagcggtggttcggttcgtttgcttctcactccccgatttcttcttattctctttcttccttctcgggtcccaacgagaaagaatcttcggtgcagtgtctcgagttggatcctgacatatcatcccgacaattctatcaggaaacacccgagttatctcccaatccgctttggaccacttccgaacgtcaatgagcaaccatacgtctgatccctactctgttcttcttaagcggaacaagttgccaatgagcttgctcgagaccgagggtaaaggatctgagggcaaggttcgtttttaagctttgttcatccatgtattcatgattgcatccagaggcgtcttgtctaactcagatttctgggatattgcatgttcctccttcattatcctcagcgcccgcatattgtggacactgagccgttcaaggacacctttggaggaaaagctcagagaaagcgacctcacctcgaagttggaagttttgcagagcttggaagtatccccatcagagacgatatcgccgagagcaatggtacgaactatcttttcgtttttttagttacttcaccccactttgaaacctatgtcgaggccaatggctcataatgtgcttgtttcgtcttcgtacagaccccacctcggagaaactttttgtcgaggctgatcctaatgatcctcgagatgctgctcgagagcgaatctacgccaaaggaacttcccgccgaatttggggagagctctacaaggttcttgattcgtccgatgttgtcatccacgtgttggacgcgagagacccgatgggtacactttgcaagcctgtgttggattttttgaagaaggaaaaggcccacaagggagtggtgtttgtgctcaacaaggttgatttggtccctacctgggtgactgtacgtttccggaaacatcctttgcttcttctttcttatcgctttgccccaatctcttgtcttctgatgatctgacgcggtgtttccctctgactttgtcttttctttaggcccgatgggtcaagcatctttccaagctagctcctacgctggctttccacgcgtcgatcaacaactcatttggcaaaggatcccttatccagctccttcgacaattctctgttttacactctgacaagaaacagatctctgttggtttcatcggttaccccaacgttggtaaatcttcgatcatcaacacacttaaaaagaaaaaggtttgcacggtcgcacctatccctggagagacaaaggtttggcagtacatcactttgatgaggcgaatctacttgatcgactgtcccggaattgtacccgtctcctccaaggattccgataccgccaccgtactgaaaggagttgttcgagtggaaaatctggcgacgccgacagagcacatccctgctttgctcgaaagagtcagaggggagtacctcgagaggacttacaacttggaccacaagcctgacggttggcacggtttgaaggacgccgatctcttgttgggtacgatcgccaggaagagtggaaagcttttgaagggtggagagcctagtttggaagcggctgccaaaatggtgttgaacgattggatccgtggaaagtgagtgtgctttccttgtttctgatataaagtcgccgatgatgctgatcgatggtggcctttggtcccccttctccccttttaagaattcccttcttcgctcctcctcctgagaaagaagttaaggaggctcccaagcctttggtggtttcccttcccggagccgctgaggctgctggtctcactacggccaagactgatgacgccatcaccgctgctgccactgaggaggaggtggatgaggaagaggaggacttcgaatcttcggctgtgaacgctcagactcttcttggttccaagcgagtcaagggtgtggagcaacctatccgaaagatcgtggtcatcaacaagttcttccctgatgatgtccaggctgttgattctgattctgaggatgagactaaggatggttcttccaagaaacgacagtttgtcggtgagcctgctgaagaagacatggattctgatgaggacgaggaggatgacgatgaggaagataaagcagaggcagaggcggcggaggaagagttgacgtgggatgaagttgtcggcaagggtcctgggttgagcagcacaggtgaacccaaaggaaagggaagggctgccgttgttggacctacgggagccgttgctgatgacgatgaggaggagagcgaggatgaagaggaggaggagactgatggtgaggagaaggctaacggttcgtcaagtctgttctttctatttgtgtatccaattcgggtttgatgtttcctaagcacttcttctcttcattattacaggttctcctaagggagccaaacggttcaggccgtccctcggattagaagacgacgagccggtcaagcctcagaaggagaagcgaatgaccaccagcaaggtttgtgttttctcggcccttgttccttcttcaaatactcttgctcatccttggtgatttctttcttatatatcttcttcgtccgggttcgttcgctaccgatgatactctactctagaaaaaggccgaatcgtactacacccatgcgaacgtcaagaacaagaacagagacaagtctgactccaaagacaaagtcaccggtggagggcgtgctagggctggaaagcgaggaggaccgaccagtggaaacaggaaggggactgatcctaaggccggcgctaacaagaagagaagatagacgagaccttgtcgttctgtgctttcgtctgttgctcttgttcgcattgatatcttgttctttcctttcctctatatctctacattggcttcttgtgttccttttctatctttttagtgtttgctttcttcattccttttttcttctctcatctatctaccctctcgtgcatctttctgtcttggtctttgtttttttcctttagaagaggaaacaaaaactgctatagtttataaatgatgatctatcggttcgagaaaaggaacagaatggaaggggttaaaccttcccaatctctagttcttggtctgataaatagtcaagggtctttatgacctttgccggatttccaaccgctaccgatctctcgggaatactctttgtgacgacactcccagcacctatggtggaaccattccctatggtgacacctggacagatcactgcgcttcctccaatccagcagtcggatccgatggtgattggcttcgcaccttcccgacctcgagttccgttccgagcctcgggatgaactgggtggatgggagtatagatctggacgttaggaccgagcatcgttcggtcacctatctcgacaggagcgacgtctagaatggttgttcctgtgcctaacacaacgtctgttccacatttgatgttgaagccctaagtaagatcagaatatgttaccaagtcagtaggatgtgcaacgatgaaagggagagcgatggaaacacacgtattcagcaaagaagggaagcaacaagtgaacttcagcgtcggcatcgcaatcaagaaactctttgagcaattccgatctctaagaaagataagcaaagagattggccagagctctaggtcagtctatctcggaagacaatactcctgataagcagggtagagcccgaccttttgttcatcttgctcgttattgattgctttgacttgttctctccctctcttagcaagtctggaaatgtaggcatctctgtaagtatacggatgggtgccggtgaccatccagttgaactcttgagggtcttcatcagcgttgggtggtagaggcttgttgggcatgattatggttgtagaaatagggtggatacgacagtgataacgagacggtgagtgagatggtgaaagagaaagaaggctattgaccgaaaggctcaaaagacaagactggtcaagttgagaaggcgatgatacggcaagcaagcgcgaaagaaaggtaagccaacaaacgatctttcggcaatgggagactagcaacataccgcctagctccggtccggttgaatttcaccggcgtaacctctgcgggaacgccggtgtgccgcaaagttgatcgcggttcttgcttataaatcgatcaaaaatcgtccgtcaccgtttgccaggatagttagcgcacgcgtcaaatgattacaagaaaagtcaaatacgcatcggacagttggcaatctggcgcgtgaagggcaagcacgccatcgcgtttgctgcgtcttgatgtgaccttaggtgaacccgcttgaacctggttgctcaatttgtgagtgtgtcatcaagagaaaaaatcctccttgaattcttacacaacctctcttgcacacatttaactctcactcacatcattcattcggaatactttgcaagatagagataaggatgccctcgttcaacatggaagcacagcagctcagcaccagagccattcacgtcggaagcgagccggatccgtacaccaatgccgtcatccctcctctctctcttagtaccactttcgtccagaacggtgtcggtaacctcggtggtggtggatttgaggtgcgtctgctctttatctctgtcttcacccctgttgactatcgagatcacttaccgggcttgaatcattcttatgggtcaatcttctctgatcttcgttgtatgtcaccctcggccacccgcttggcacacccacccagtattctcgatcggccaaccccaacagacaggcacttgagagcaatctggcttcgctcgagaacggatcggacgcctttgccttctcctccggtagcgctgccacccaatgcgctatccagatgctctccaccggtgcacatgtgctctccgtgtcggacgtctacggcggaaccttcaggtaccttgctaaggtcggctcagccgtccaaggtttggagaccacgttcattgacctgaacgacgacgaaaaggtcatctatgacgccatcagagataacactaaggtacgtctcctggttctatgttcctacggtataaggttatcatgcagctgattatgtctcgacgtgcgctcctccttctcttcatacctcctccttcagctcatttggatcgagaccccgacgaacccgaccctccgagtaatctcgaccgagaccattgtccggatcgcaaagtctcacccggccaagccattgatcttggttgataacaccttcctctcgccttacttctccaacccactcgaccacggagccgacattgtccttcactcgatcagcaagtacatcggtgggcactccgatgttatcatgggagctctcattgtccgaaagggtctcccagaagtttctgataagatccgattccttcaaaacgctgggtgagttttatcaacagtcttggcccaagtgtgccttcttgactgacgttaccttgtgctctccttcccctctttcacttcagtggatccatcccgtcgccttttgattgctacttgaccacccgaggaatcaagacccttgcgcttcgatcgattcagcacggaatctccgctcatgccgtcgctagtttcctcgaaaaccacccgttggtcgattccgtcatctacccc

SEQ ID NO: 479 - DNA, 63381 bp, Xanthophyllomyces dendrorhous
cttccctcccacccttcccactcgatcgccaagaaggctgtcgcgctcagggtctggaaggatctcaagaagcgaggagtctccaaggagagcgaggaaggcttcccgttcggtggtatggtcagcttcaggatcaagggtggagcggccgaggcagacaggttcttgaccgccagtcacctcttcacgcttgctgagtcgttgggtggtgtcgagtctctcgccgaggtcccggataagatgacccacgctggaatcccagaggaggaacgacttaaggtgtgtatgcctctgcttctttacaatttttccttgtgcatgtctgaacatctgccttggtctctcttctttcactcaccatcttccagcttggaataaccccgaactttattcgactctctgtcggaatcgaggacactgacgacttgttggccgatctcaactacgccttgcagactgctgtcggaggaaaatagacaacgaaaagtagattaatagatgaccaccatgttcatatagatgtctgagaaataccgaaccaatgatctataagcgagtagtaggatattagaagcgacattatcgttttttgaatttatcatcggctatcgattattccaggattcatgatcgatgatgcagttacgtctcagactttcaacatactcgacgtagagagtagaatttactatttcgcagtcaggtgagacggtctaaggtatctgtagaggcgtctgaagaaaggctgtagcagtaattgacccgtctgatcgttcccagttcacaactctctcctatcagctctgggagcaactgtctcctctcgttcgagagagaaaagaaggagaagaggaaccaccacaaactaccacggccttcgtcgctccgtcagggctcttagagctcctccttcctcgccagcgaagggtgatgaaggcgcatctgccagccttgttcagctttctgtcagacaccattcttagaggtctacctctcatagtcaaggacatcaaggcctcatgatggtcctatcttcaccttctctaccggacatagtccatattcgagaaataaggtcaccaagacgcgactgcaagacggaccactcgtcgctgggggtatgacctccgcctcttctcgctcctgcccgtctcgtctcatcggtcgtcctaagtctatgtatacaccgggatccttcacgacttttgggcccagctcagatcggaaaatgccgatctgggacatatgcgcggggtagaacgagagtccttccgggctgactttgacacttgggggaggcgatcatctcacacctccaaagtggagacccaacggcaccgcttcgcccggtatcttgccacagatgccgccggagtgtctggcggagtgctaggaacaacgtcatctccatctgacgagcaagcgtaccacaagctagctcttcgtctgtcagaaggacatccacgcaccttcctggccttcggggatggcaccttctcgtcgacttcccatggccgtgcccctggccttgtgaagatactgtttgccaagctgagcgcctccccgctgctccaggtccgcaaggtccgagagtattggacgtcgaagatatgttcaaagtgtcaggcgagttctcgggagaaaaaaaaagcgtgggctctgaaacagtgtggaaatgtctacaaagtgagctggatttattgtgtgtgtatgtgtgtgtgtgtgtatgttctgtgttggttgctcactgtactctatgctctctcttagatttggggaacagtgctgtgaacgcgtcgcgaaacatgctgcacctagcccttcaccagaaggagaaccagagggcgggaatgctggtgtctgacgctgctactgctgctacgctagccgctgaggctgaggctggcagaaactaaatccatgacccatcagatcttggtgattcgtggtctgaggacacccaagtccaaaagggctatatatcgaccatcatccgttgcggtcactcagtagtaactaaagctatacataggaatgttctgaacttgataaccctaacactacgaaaatatctcggaaaatagattaatttccttctcatctcaaacaaaagacacaacaccatcaatcacgctcctttcacacactctcctttttgctctctcgttcgacagaaaataacatcaatagccaaatgtccactacgcctgaagagaagaaagcagctcgagcaaagttcgaggctgtcttcccggtcattgccgatgagattctcgattatatgaagggtgaaggcatgcctgccgaggctttggaatggatgaacaaggttcgtcaagggtttcttctttatttcttcttgtcttttgtttcggtcgaactggctttcgaacttggccttgaccggttggatctcggttgttgcgccaaaacgatgtcgaagcaaaacttactcttacctgttcggtttccttccttccgaccttctctctacccttgcctccgatcggtcttatagaacttgtactacaacactcccggaggaaaactcaaccgaggactttccgtggtggatacttatatccttctctcgccttctggaaaagacatctcggaagaagagtacttgaaggccgctatcctcggttggtgtatcgagcttgtacgcgttttcttcattcacctttctttctcttcttctactctcttctctcgaactatcttccctgcgtgtcatcctacacgaatctttatacttacatgttggaacatatgccctgttcttaattcacctcttttgtctcggatggtagctccaagcttacttcttggtggctgatgatatgatggacgcctcaatcacccgacgaggccaaccctgttggtacaaagttgttagtcccttcttctctttctgtcctctttcttctgagctatgccaattcttgattgaaatcggtggtgccgtccggactaatccgtttgtcgtttttatcatatcttcttgcacaaacaggagggagtgtctaacattgccatcaacgacgcgttcatgctcgagggagctatctactttttgctcaagaagcacttccgaaagcagagctactatgtcgatctgctagagctcttccacgatgtttgtctctatttcttttcttcctcccctcaataaactgtatttgtgaccattctggatcctttcctgacgatgaatcattcttcggatgagtaggttactttccaaaccgagttgggacagctcatcgatctgttgaccgctcctgaggatcacgtcgatctcgacaagttctcccttaacaagtatgcccgtcatatattcgttttgttgcattcacgtctgattgtcagctccgattattgactctgatggtgatggtattgaccacatcatgcgatgtttgactttctcgtaggcaccacctcatcgttgtttacaagaccgctttctattcattctaccttcctgtcgcactcgctatgcgaatggtgggtctctctcttcaactgttcttcctgattttcttgaccatctgtaacataaatccttggaattttgaactctatgtcataggtcggcgtgacagatgaggaggcgtacaagcttgcgctctcgatcctcatcccgatgggtgaatactttcaagttcaggatgatgtgctcgacgcgttcgctcctccggagatccttggaaagatcggaaccgacatcttggtgcgttttcgttccttccttctacgttctgttttctatcttctgactccccgtccatcatttatgcttctgttaaaacgtattgaaacatcaaaaggacaacaaatgttcatggcctatcaaccttgcactctctctcgcctcgcccgctcagcgagagattctcgatacttcgtacggtcagaagaactcggaggcagaggccagagtcaaggctctgtacgctgagcttgatatccagggaaagttcaacgcttatgagtatgtcatcttttttaaattttctaattttcttttcatctcttgttcccaagaattattttgtgaaagttctggggctgaacatggtgcatccctttgggttcactccgcatatgtctcccgtttgaataggcaacagagttacgagtcgctgaacaagttgattgacagtattgacgaagagaagagtggactcaagaaagaagtcttccacagcttcctgggtaaggtctataagcgaagcaagtaattctcctctttatatgcaaagggaagattttggcgggagtgataggtaggaagagaagggagggtcatattcattaggcatttctcttgcagatatagatgatcaaaaagggatatcggtcctcttctttgttccgaatacataataagtcatacgaagccgaacatgacaaaagtggttcatgagatcaaactttttgcatgatcttctgcgattttgtacaattctctcgcatcctattaggatcgaaccaggagaagatgagagaaggaaaccctcaccccgtcagataacaaacgagaagtctcatcacacacacacacagatgaaagagaaaaataaactgacgaggataacttccaatccgatttttccagcccacgaaccttccttggtccccgctccggtgccttcgagtccgatcaatggggcccaaacgcctgaagatccaaagaacccttgttgaggtgtatttctcgtctgagcaatcttagatccttcaatttgcagtcgcgcatatataccatcaacatcatcgtcatcaccatcattgtcgtccacaacagcaccggcaacgccgttaatggcagggcttggacaacttgaggcggtttctagcaggtcggaccgattggagctcgacccagggttgcacatcaccaagacacattctccttcaaatgagcgaacaagacataatgagggaagtagtacgctatcgaacgtcttctcacatcccgggttcttggcgtatcttttggcgattctttttgttgaaatagaaaattgaagagaaaaaaagagatccacatgatgaagaacggctctgtagattcatgctcgaaagaaagaaagaaagaaaaagaggggaacgaacggatctgaatctgtggccaaccaaaaagtaggcacaaagatgacaacagcgccctcttcgacaagtctttgaactgcttgtggatgagacaagtcccagcagatcaacattcctgctttaccccatggagtatcaaacacctgagaataggtcttgcccggctgtagataatctctggaccgtcatatgcgcgaaacgatcagtacgaccgactctactcgaagtcgtcaagagcacggacgagaacgaaaagaggacaaaccgctctggatgccataaatttctcttctcatacctctcccacccaccctcaggcctgacaaaatatgcaacgttaatcatctcgtatcccttatgatccatctggctctcatagttcttccattccgttttctctttctcactcagcattctgggtcccttgagtctccttgatgagttggacagtgaaggatcagaaccaaaatcgaaaggagaaggtggaatcgagtgtagagattgactggatgtcaggtcattcagacaaggctcgacgatggtcaacacaatatggagggacgtcaacgttgatagatcttgaattaatctgatcaaccaatatgctggtagtgcataagacttttcgtcatcatcatgaatcgagtcaacgttggtcagccagttcagtgagggttggttgtcacagattagaccatgagaaatcttatggggaggagagatgtaccttgaaaccctgatgagtaggacaagatgaacagatgacatcagtgctcgaatgaaatctcgacctacaaactcttcgaaggtcacccgcgggtttgctctcgagagaaagctacaaagagaaggccgttggaaaaggagaacaaacatctataattccctgtagagcatattccggaaagacgacaacaccatgtccttgcaagctcttctccgcttcccagaggtgtgttctgactatatgaacgttgtgctggatcgaaggaaatatgtattcgtttgattcttctagtgatggctgaggagatagaggagatgtttgagccaggtagattggcaacgttgaagatgacatgccttctctggtggacgaatcactcgatcgaagcgcttgaggtcggatgtgatggaggtagagatggtgttaatcgcatcttgttcgaggtttcgctcgtggccgagccctgaaccaccgacggacgttcttattctcgtatagtcaatagacaaatatcaatcgagtgatcagatacataatatatagagacggtgaataattgaataaaggaataaaaagagagatctaaacaacgttaaagagtgagaaatgagaaacagccatgataacaaacaaaacatgaacgaagagtgaaaaaaaaaaccgaagaaaattacaggagtgagcgagtgtgcgggaaagagtgagggatgaaagcacgatataagcagatagataagcaaacatatagatatacgacgatgcatgaaggaaagactgagaagagaggaaggcgaagaagaattagttcgccctagctcaatgatgaatggactgtaaaccttcgtcacagccatctactccaaggtaaatccccttgccggtcttcatcgaacggggcacaaaggcaacggaggtccgtacagacttgtttgattggccgagaaaacctcttctaggccgggcgatcgccattgggggcatcacgtcgtctggggttggtggcagcgaggacaatctggaaacttgcggctgaggcagatgaaaatacttcgggacggccgggatggatacgagagtgggtatggtagcgtctgtggtctcgctagcttcgattccgttgtcgtctgagcctaggacaaaaatgggaacggcctttcgtttaactcttcctttttcagaggcaacctttctcagcccgtctacacgggacctggctgccgattgcagaacctcggctgcgagtctgagctctctgagctctttgagtccgaagagggtggaaggtggtgaactcggccggcgctgaaggtaggaaaacgtctgagttttcggtttcagcttcgactctttagtcaacagtggtgagacgggagaaggaaagggtaacgtcgatgaggaagcaccgtcaatggaaaattggttggtcggaatgtgaatcaaaggaagagaggcagagaaaagggcgtgggcagaagagatcgaggcaggagcgggagagggataagagggataaggggggtaagaggaataagaggagtaagaggggaagggagacaatattgacgccgagggagagggtgaacagtcgaccgagggctttacagaatcccgacaggggtacctgggcccaggggaagaatctctggacgatgatgatgatgatgatggtcggcctgagccaaacctgaggaggccgaaggacctttttggtttttcgaccgtctggggcgtttttgagggctcgcccgggaagtgtggagtatcatccttaagactgtcggcaccaaattctgtgggcaaaacggcacctggaagttctgaagagtgatcagtccatcttgaggatctaacatgttggcctcttcggtgaaccgagccaatggatgaggtcgaaggagatcgggcaatggagacagaatcatcggcttgttcgagagaggacaagctactttgggagtcgcatctagagagtgcaggagtagaaggagtggaaaatgaagaagaagtccgagggctagcgatagtagcaaggcttgcttgtcgacgagaccgttgaagagactgtccgaagattctttcgaccgatatattatcctcatcgtcatcttccagactaatgtcctcttcagcctcttctgcatctcggaaacggacagtcgaggagatcagatcatcttgaatctcccaagcaatctctgagctataggcaccggtgatgtcaaagagacctggaggtgtttggcggggaaggtcttccgtcagaggacctggactgacgggcgaagagggcgagagcgaggatcgatcaaagaccgaagggaagtcaaccgggatcatcactggcttccgagggatcctcttagtcgaggcgacacatgcagctgtgaaaggcatggtgtaaggaagaagagaaataagaggcctgtgcacggagtgagcgaaagatgatgggaagcacgtatcagctctttgatgtcaaaaaaaaggatgaagaattctgtgtagtcttcttcttctagaaacaggaaacgaacgtacaactggagctttgttcgattctatctgagcaggttgcgcaagcacaataagtgaaaagcaggaaagcaaaaaggggagttgggttccggttaagagttcggaaagaagggaaggaataggaaagcggtctagccgacggagggaaagcaagaagggtgcgcgagtgaacccagaaggaaagaagggacaagcaaaagaaaaaaacacaaagaaggttgggggagtaggtgcgagcgtgataagggaaaagaaaacagaacagcaggaaagaagtcgaagagaaagaggaaaaatctaatgtgcaaccttttgaattctttctttttggggttgatgaaaagatcgagaaggaaagaatgcaatacatacaaagtagaacgcatgcacggaaggcaagccaccaagagaactcacatttcattagaggatattctccgtaccgatctccccggctgggggtttgctgagcgagagggatcgatcgtcaaggtctcggaggagggagatagtgagggacaaatggcacatatgtttggttcctcgcgatctgatgcctgtccggtgaattgtttcagcatgcgtctacactgcggaacttgccggtcaatcgccggacatcttgcctcctatccctctccgcgtctctaaccgtgacggtgtcacggttgagcaaaccggctcataggttttgtcagcgagcttatttctctgcctctctgcctctgcctctgtctgtgtggccttctcttttcacacccgcgccgtctcagccttcctccttctctcttggccgttgctctgaaaattttgctgtatagccagctgcgctactgccatatggccaatgtctttcccatctgcccttgtgtcatctgccctactatcaacatgctgacgcgtagatgttatatatctcactcactttcagccctttgagcctctctggcgacaccggagccaaagaaaaatacagaaatcatttgctcgacatactgccttgtcccttactgcatttgttcagattgcccgcctgggatggttccctctctttgatcggggtgatcatctcgctttcttacccggctcgttcttcatgctccgagaccgcttggtcctgtctctctatccctccatccttcccttcccttcctccgtccacctgtcataacttctgttctctttcgtgctttcttcatttgtccgtattccttctcgcttccttccgttgatcgccttcatatcttgtcccgccgtatcgtttgtgacacaacctgttctattcctcttcgtcaggatcagtctatccatcctaccactgtcttcaaagttaactcatggatctgaccagtttctcgtttcctcttgctttcttattgtaatccgataagcatcgcttagcttttcttgttctctctcatatcctcatggtcgtcttgactttccggtctttacgcttttgttcttgttcaaatacatagaatacaaacatatatatcgaacaatacgaacagaacaatcgacagagaagttttcgaggcggactataaacgatgaaacaacaaaatagatgattgtcagcaatgaaatcgaagaaaaagattttttcaagacaaaatagaagaagccaggaaggacgaaatcagaggtgtcgagttaagtttgagatgacggctttttgtcctctgcggttgttcggaacaggtctgagaagtatttcttcattgaacgttccttcctggccttttcttcctgtcttctcttgtctttctgtcttcagtcaactaacctagttcagaagcactgacaaccaactccaaaatacggacatattaatctaaggtttaaaaaaaaaacattcctagaacaagcaaaaacggagtcagtgttgtactttttcgttctgcaagacacataagacaagaggagacaaggtggggcaggtttcagataggggtgaaagactaatttcgatgatatgattcagcagttccttagtagaggagtctgattgaactatgcatttatgactatcatcacgagatgccaagctaagagaggagatggagggcggaaggatatgggcatgtaaatggcaatcagtgaaaacactcacaaatcaattagcgatctattattcctttatccccctgtgtctttcttgaagctttgcttgatagacaaaggaataaaagaatcagtccaaacgaaagaaataattcgaacaaatagagaaaaaaaagggatgtaggcgtgacttaagcatattccaaggtcacgtgtaaagtttaaactccgactgtcatgatctgggttcagagggtaacggataagttacgaagggtgtaaccagacgggaatgtggctagcaggggggaggaagttcaggctctctggcttagtgactttgacgagggcgcaaagcaaaaagagtgggagaacaagattgatataacactgagaacaagggtaatagggagtcagggagtgacaagggaatgacaaagaattcaggcttgagaagctatactatcggtggtaaaggagacccgtcttacatattatcctcagactccaacgattaagcataagagaacggatcatagaaggtgctagaagcacatgcgctaccagactatatgcctccatgttgatgcaatgagaaagcataaggaataacgaggcaggaggagaactagaagtaaaggaaggttaccagggtgtaacttcgggtcacattcctgacattgacactcactatagatgcaaccgttcctccacttatataagttttatgtgatcaatagcttacctcatgagatacaggcgtcatcactatctcctctctttaccccgcccgcccccgaagtgggtgttctttcgtatcggcaatcctttggctctttctcttcattctgacctcttcgtcctcctctgacccaaccatcaccaccccactgcacactatcgcacaccactatgacagagccaacggtgacaaagccgccgaacctcaaactactgttgatcggaaactcctcggttggaaagtcctccctccttctcagattcaccgatgacgattttctaaacgaagacgagactacggccaccatcggcgtcgacttgtatgtgctacctttcccctttatcttggtttatctcgtccttctctatctggacattcgactgatctttgcttttggtgcttcattcctcaatcccactttgactctcactcttcatctggtagccgagtaaagtcaatagaatctgaaggtgtcaagtacaagctcagtatatgggtttgtccttgtcgttctttctttttcttgtcttttgtgccagggctcatgtttgtcttttgtcgctgggatgctctcttattttcttaaatactgacctcctcaggatacagcaggttcatcttactctctcacattttcgaggttgagtcggaccatagattgaatgctgaactgacaacctcattggtcatcgacttgtgcctggaaatgcgtaggacaggagcgattccgcacgttgacatcaagttattatagaggcgcccaaggtgtcattctaggcaagccttctttacatgttctctatgcgcttccggtgtcacctgcttacccatctttctttactcttgacaatcttctctactctttctacactcgtcttatcctcaacgttcctttcttaactcggcgtcccttcttacttttcatattccatcgcaactcatgttcggcagtttatgatgtctcttccagagcaactttcgaagagctttctcgttggtttcatgagctcgacagttacaccaaccctgaaatcgcccggatgatcgttggtaacaaagtggacaaggtcagtctcagcgactctttccaaaaatgaccttgttgctaccaaatgagaggtaaagaacactcttggatgttgactccctgaatttctccctacatcatgttacccatcacaggaattttcaagacaagtcaccactgccgagggaaaagcgtttgcagatcggatgaattgccagtttataggtttgttcaggctcggcccgtattcttctccggacccttctcggctaggttggctcgtagatatggttttgactaacatagcttcctctcttgaactttgactatatggtattcccgatgatatctatcttcttctctacttagaatgttctgctaagactagacaaggtgtaaaaacggcattcgccaccctcgttgctcagattgtctcgactccatcattatttgccaaggacagctcggtcagcttgactgaatcaaaacctaaccaaacgatcacgcttgaagagactccggatgcggacgcgcaaggcggttggggtctcggtggaggatgttcgtgttagacagattcttccgtcattcccctctttgctttcatctttcacctatcaccagggcttgtgaattggcagaaagacaggtcttgtttcttcgtttccttcctatcttataggtttctcttgctcgtcttgctttctacttatttacattctcccatacactctctactcggcctttgtttctactatatacatacacccttcctcccccctccctttccaaatcaccaacttgtcactcttttgtctcttccactcttgtatatcttttaattttttaatcataccttctgataccatgtctctttctctcgccctgtcaatgttcagctttgacttttctcccctgctgcgctgaattcgatcgttcgacgcatgtgtaattttatttatggatctacaaatccacaagccagaaagatcaacacatcacctcctttccaaaataagagaacttccatcttgcggctcataaacttcgactgcagtaatcagacccaatcatggcaagacctttcctacctatgatcatatttcatggtatcaagatctttgaatttgacaaccgttcaccatctcttctcacttctcgctccgatagacagcctacggagccggtatggagatcctttcggggatgaccgacgatcagagatgtcgtgttctggacgttggatgtggaaaggtgagaatgaagcgtactggtatcagtgtgagctatgggtcgggccgatcccatttgactgaccagttggtttgaaatccttcttttctttccttttttttccccttggcaatgtcgatgtcatcgggttgatcgaccaaagggtgaatggtacgtcttatgtcatcctgaaataccaaaatccttacttcgagtatccgttgtacatcaaatagctcaaggagagctgaaagaaggaaggaaataggcaaacgaaagagagaaaagctgatgagtatccctgtgcttggatttacacaggctcgaagaaatggcttctcggtttaaacagccaacttacacagggataggtaagtaccagggttaaacacgcttttttttaataggcaaacaacccatgtcgttttatctttctttcggctttggcttttcagacatcttgcctagaccggtcgttttaccgacggtggtccattacgtccagtgtgtatcttattcggtctttccgcgaagcagatgatgaaatcagcaggcgcagaaggtctaaaaatatgttcctcccccttgcctgtttgctttgaacaaataaccgacgattctatccagagctgaccgaacagcactccctctaccctttcctaacaatcattttctcttcgttcattgccgaaaactattttcctcactcgaaggcgaggatgtataccctatgcttttaagtgaatgtgtgagagtcttggctccgggtgggatgattgcgttcatagaaggccgaaacgcgcaaacgatacaatccaattcgggacgtccggttgaccggttgaaggaagtgatggttcgtgccgatgataaagacacgttcacccatgaattcagcatcggatggctactgatcgcgagctattctctacaattggatatgcacttgatacgtcggatgacgacgtttccatacaaatgaaatcagatcgagaagttaaggaaagatatgctcatccgaaaaggcctggatacggctgacctgctgatgtctctaccaaaactgatgagggacacagggctggggaggatccaggtggaaagcctccgaccggtcaaaagaaatgaaaacatacaaagtaagtcggcgtagggtttgtgtggcaaggaaagcccttgtaaacaaaggacctctttttagtaaatcatgctgttttgattttcatagactaaagaaggtatggcttgcggttaatgaactcaaagggcttacagttgacgactcattcggcgctctcgcctacgacctggatggcaattcccaagacgcctctgccactgacctgaccgtgttctctggatggaaacaaaaccaagccgcatccccagagatattgaaacgagaaccaatcaactgatcgattagatctggactgttatcaattgtttgtactttgggccctgaagggaggtggcacggaaagagaagaagcatgtatttgataccactcagaggggtatgcatacgcttttcatggatccctctttcctcggacactttacacatgctatgctctccttgtcctatctttgccccttttctttcttcctctcaactttgcgtcttccgttcatccggtcgcttgctctacctttcttgcgtcaggtctgattttctcaactctgcccaaggggcgacccagcgtagacctggtctgaatagaagacggataggtgtatgtgaggatctatgcgcgtgttcgtctgaaacatccaactctatacatcctctttcccccttatatccaacccgtctgctggctgataacaaagaagcaggaaagtacgaggatgtaatggtgcattgtttcgaatagaccagggttcatatccgttcctcgccctggatcaacatgatatgccctggatccatctcatgtcattattctcttccgcctttccgttgttcctcttctttcttcttcttctcttctttcttctctttcttccctctctctccctcttcccttcttgatcttctctcttcggcaagatcaatatcatctactgaccaaaactgacattggaatcaccattgtttgtgccatcatgtctcaccgtcatccctcagccttacacccttcatacgctatgcctcactctttctcatcatcatcagctgatacctgtcaccatccgtcagggtcttgttattctcagggcacatgttctacgtaccatgcacattctcccccacgcgatgctcctcgaaatgtcggctctgttcatactgcgaagaatcctcaattcgtgtcagggcgcaagcgtggaaggagcatcgagaaggatcatatggtccttgagcgacccatgtttgatcctagaccgactagccatcgcagaaccgtctcgatgaacatgtctgggagaccttccaacacagcatcgcttcccgtagaaccccatcctctctggctctcgagtgaattagcgagaacaagcccaccaatgtttgcctatccattcatgggttgtcttcttcgatcaccgctgccagcgccccctccgccttcctctcgtcggtcgtcttctcaccgagaatctctgtctccgactctacgaatagccggatcatcaccaaaggatcgtgtcgttccaggttcaagccagatgagcgcattagttcaaagggaatattgccagagcgttaatccagggcagagtcctgagcggtatacggtctatgagaggagccgaacctcggttcctggattggtggatttcacaaacacgtacgcgaccctgattttgcctgaactttcaatctctttctttcgagcttcaccctgaactcacatttagattttaactccatgtcgatgcctatgaacctctgcagcgcgcctcgtatggtgtctggtcttcccaaggatccgagtcgtattccaaccaacttagatccccatcaaccatacccttctcctccaaaatctcggtcggatcgttcaagcgcgcatacatcaagccattctccacagtcgtctaccactactgtttctcgatcttctcccgtctttgtaatgagtccaggagacatacctctacctctcccgtccccctctcgacgtcaacctgtcagcgttttgattcattctcgttctcttgagaatcatctttcaccgaacttcaagagaaggcgaaccacttctcaaactagccctcctcattcctcttccagttcaatgtcctccactcgcgccaaccgacctctcgcccctgatcgcacctcccgaaaacccaacaagcaccgggcatttcctcctttgagacctcgttcgcctctcatagcaaaacctggattgttcttggcggaatttcctgtaccgtctccttacaaggcgagcatcccggataaagatatctacccttttccaccggcagttttgcctcaagaacacaaagttacgaccgagcgcgtcgttgatcatcgacatgaatactctttacctcaaattaatcaaacccgacaacgaacactgtccagttcgaaaggacacgcaaacataagcgtcggatcgctggatttgacgaaggggaaccggcctgaacatcagtcacctcaagatgtgtgcttgccgagtttcgaattgcttctaaacggcatccaagagatgcggatgagagaacaatctggagaatcaacggggatgaccatcatggacgcagtctagtgacgatatctggagaattttgtctctttggattttgtatgtatgcatgcacataagagggggaaggattaatggaggagtaaccgaggtctatgtattttgtgttcttccctttgcttcctctggctttctttattttttgtcatttctggggtttgcatgaattaacggtttgtacaatatatatatacacatacacaatttatgtattcaattcatgttgtgatttgatgagtcggcgatgccagatgtgcaccaggaaagtaacggaatcgaaaacggggttgatctcttgctcgtcggtttaatctagccaaacgcttctcgctaccgaagaatgaggaagagaaagaggggagagaaaaagattgaagaaaaaaaaaagaaaaaagaaaagaaaaagcaaaaacaaaaaaaggagaaatttgcgggtacattgaacaagagttttggtttattgtccgtactgattttgatctagctcctaatactccaaaatcttatagcgccagccgaattatgatcgagatttcagcgaccaaaacgagcactgttgatgaatctatgtctcaatgacacgtggaactattgttatctttgacaaaaagaaagattatgaggatttcttgctatgctaatctgtgttcggtctcaagaagcgtaagtctgtcttgtacaagataaatccatccagatggaaaggagacaacaagaaaggcaagggagaaaagatactgatggctcggatacatcagggtgagagaaagcatacggatggcaatgtgaatatgggcatgggcataggaagagcaatcgaacgagattcagagaggaacaagtgtggaaagtccttaaaaatagacggtcaaggtgatgaatgggcaaagacacaaaagtaagtttggtggttcgcagagaaaataccctgaaactgtatacatgaagaatgcaagtacttaccgagatgaacagcttgtttagcgagtctcgtcctgcgcgtcataagagctgtcgatggcacccatcaaaagcttcacgagccagactgtatattcaagcatgtgtttcaagtatagatccgctacttagcaaactggccaaacatacacaaaaatggcaataagatgacatacgctcaggggtcaagtccaagtttgactttcgcttcatctcgtctgcctcggattcatagttggatgtgcaatcgaccagaccaccgatcgcagggtgtgtatctagctcagccaagaaagcttgggctttgagatcatttccaacctgggcgaactgcagagagagggcatccggtccgtatcgagttctcttcaactcgttgtttgcattctggatcactctgaaaatctgctccttaggttctccagcaggtgttccatctgtgatggcaatgatgagaacaggcttctggagctggttagcgcgagcgggaccaagaaccagaggttgcaaaatcttctggtcgagagacgttccgagtggggtaagtccagaatatcggatttggcctaggagctgcaatgcgccctgctccgaattgatattgtttccctggacctgggagttgaggaaccgaacctggattccatcttgatcaaacaagctagcagccatagcaactctagacaagatcaacttgagatcgtctattcgttctcctccctcctcgaaggccatgcttccagaatcgtcgattaacaagatagtgtcaaacaacgagagcttcacaagatccacagccaactctttgggcattttccattgagaagcgatggtttcgatggcaccgctttgagcaacccgttgggcgacttgtcccagacttccaggagggtaaaaagcagccaggttttgatcttgcacacattgttgcagaacactttcgaccattctgggatccaacgatgaccctcccgcttggtgggactgttgttgagaaggaggttgtccatattgttgttgctggggaggttgtccatattgttgttgctggggaggttgtccgtactgctggggctgattctgtttctgctgttgaggttgacccccttgtcctggataggttgactgagggggaggaggaggacctccctgctgctgagagggttgtcctccaggctgaccttgagaggacgcgttgcccccataaggagattgttgttgtccttgactgatggagcgagatatatgatatcagcgtttaaagtgacagtgaagcagatggtctcaaggaatgacgacgtacctaggaggggctccatatggcgagccgtatgcctgttgtcctccctgctgaccgtattgtctaaagaggcatggtgaagagcattcagttcggaggtaggaagaacaagaagaagaagaagaagaagaagaagaaaaccaagattgcaggagatcagcttcaaaccgaagcgattctatatatttagagatacacggagaacaaaattacccagactgttgacctccgggaggaccaggaggagccgcatactgctgctgttgttgcggaggaggagcgccgtaggaaggagcagcccctccaggagcagctgcctgagcggcgttggcggcggcgagtttcgaagcaagtcctgtaaagaccgcgtattcgtcaggcgacacacatgatttcagaccgaacacacaccagagacatatacgtacccattgtgatatcaattaaagagaagaagcaagaggtgagaaacagacgatgatgatggtggtaggtaagagaagaaagatgtacaagatggcgatgcgacgagatgagatgaaatgagcgagggtgggaatggaagaaagcggtgcaaggctctcatcggttttgccaagccaattgatgacgtaagcgcaattttgccggacattccgtcctcactcttgtcgtatcactccatcttgccagacgctctgctggtagtttctgtggccgagctctgtcttcgcatactgaacatgctgtgacctgggtgtcttctcagaatgttatcaagtcgttacgatacattccttcagttgtcatgttgttgagttcacaaaatgtagttctacgtatatgtcgcctttgcttgagttgtatttgtagtatgcgtgtcaatcgaatgtctatctccgacatagacaccggctcatggatagagctcaaatatgagccggtgatctagatattcattggagcatctatcaggattcttagcaagaccacaacccaataagatgctgcgctagaatacagaggaggacgagagaccaatgagaggataaatcgccatctgacgaaagctgcatcactatgtatcgatcttaacctatgctggtgcattccttcacctcggcgtgctcgccctatcagaagagctgacttcatgggatatctcatctgggatgagattggttttgtctggcatgtggaacatatgtgtcgagtatccgtcgaaggttggtcatatatatcttagcttaggacctagtacttttgaacagatataccgatgcatgtacttctttttgaaacactcaagaagggaataataggattcacaaacaaacatgccagcgatagattcgtatttgactataaagagtgaattcgatcgaaccgttatggtccacaaaggccctgaatctagctcattctcctttgataccttgcacaagtaacacaaatgaataacgtagtattgaatgacatgtagttatcttgatttgatgatgacaaggaccgtatacccaaagaaaaagaaaattactttgacgggaatatatagactaaagcttcgctcgctcaccggacttggactcctcatcctgctttttgagcccaaacgtgcgttccgccctggcctcggcctgatcgcccatgaggggcgggaaatgcgagtgtgcactaaccctgatatcgctccaaatgtcctgtttgatcgagccccatactcggccagcactctttggtccgtagcgatcggaaagtgattgagcggcacccatgagtccctcatccgatggttcggagagcacgtcaactacgccatgggcatagagctcggacgaagtgaaccggtggccgagcagagtgtctctaagaacacgtgcagggacgcggccacgaagggcagtagcaaaaagaacctggacacaacgagtgttttgagagtcagttcgcgtcacacacccatacacacagtgacgagaggaatatcagggcaataatgaacgaacagggaaaggtgcgccgaaatcaatctgaatgatccggcatgagcataattagtgctacagctcttctagtacgtatcccgagccagccacatgagagttgaccacgaacctcattcatacaacaccagaactttcgaccggctgcctcttttttcatgaccctgaaatcacacgcaagtgcaatcatatagcctccagcaaaggcatggccattgatggctgcgatcgtgacgagaggaaatgtcaacaaacgaaggtagagcggattgaacacggctaggttgaatgagtgatcgtcggcgtaacaggagctacaaatcagttgatgagccgggatagcgagaaggtagcaatgagacctaacgaactcgggtgaaaatccggattcttgacagagttttcaaagtctagtcctgtatcattgatgtgtcccagagaggtagaccggtttcagttaactcgagattcaatgaaagcatgaccttcagctattgcgcataccattgctgaaaaacttctcgccctccccacgaacgatcacggcaccaccgacttgattcttgattggtttgtccgtgccttgctcccgtcgacgtacccaccaatctttctcaattgcgttcagtgcttcgccaaactcggccaggagcgactcagtcaaccggtgatccggcggggacgagagcgtgagaacgtaagttggattcaagtttggagacgacgatgggggtgtagatggaaaggtgattttaacaagagacatacttgatagagtatatacaagatggatagtggatggttggtagatcaggatgcgagatccaatctccatctactccgcttagaatgttgaccgagtgccgacgacgagaatgagaagcatggttacgatctattaacagtaaatgtctacaacccgccacgtggtttacacaacgactgtatggctggtctaggcctcctacgtagtgatgacctcattaaccgaagtccatgtattatgtaatcggcgcgcggttcctttttcacttttttcttttttttttctttctccacattccgtaaaaccactaactgtttgtctggttctttcgtctatcctcttcaacgttcatccacacagatctcttacctttctttacgcttctataactacccttctcatagtttaacgagaacctattcgatatgcccgacgctcctgaacaagaacgatcattgatcgtggtgtcgaaccgattgcctgttaccatctcaaaagatgcgtcgggagaataccacttcaagatgtcatctggtggcttggtctctgccttgtcgggttgcaagaagaccatgaaattcacttggagttcgtcccctcgttctcattcctctcaaacttgctttcctcctttatgaatagcataaagagcatcaaagaacataaactcatcgcatcgttcaacattgttcatttctcttttggtctcttaaaacgttctacctgcaatccttcttacacgggtctcatctcttccgtctcttctcggactcttaagtcggatggcccggtcttgagattcctctgaaagacagagctcacgtcaacaagcgccttatggacgaatttcagtgccaggctgtgtacttgagcgatgatgtggctgacaaacattacaagtacgcctctttgttgaaggacgcttcaaaacgtgtgcgtgttctaaccgatgaatatatattctctttctcagtggtttctccaattctatcctctggcctctcttccactaccaccctggagagatgaactttgatgagtctcattggttggcttaccgagccgtcaatttaactttcgccaaagttgtactttctctcgctcgaaagggagatatgatctgggttcaggattatcatttgatgcttcttccccttctgctccgagggctcatcgctgaccgcagcgacgagtcggctggagagatcaccaagactgagctcggacgagtcgtcgagggtatcgatgagggcaagtctgaagaaactgcgatggaggaccaaggagaaaggccaggtacgagtgatgagaagctggaggagaacgatgtgaagattggattcttcttggtaagtagattttcattagcatgtcggtataaacacagtgatgacatctgatggcgccttggttcgacaacatgcagcataccccattcccttcgtcagaaatctatcggttcgttcgtttccttccctctgtaaaattgtaatacttcctcagggtcacttacctgcgttcatatctttgatcgcagaatccttcctgtccgacgggagattttactcggtattcttcactgtgatctcatcgggttccatacttacgactatgcccgacacttcctctcgtcttgcactcgaattcttggtcttccaacaatgcccaacggagttcagatggacggccggtatgcccatgttggaaccttccccatcgggattgaacccaaccagttccacgaggtacgcctctcattgctcaacttttcacccatttgatcaactttactcacaacacaatctttctcttgccatattttatttctcgcctgatgaaatctgctcgaattacagggtttgcaaaagccttcggttcagaaacggattaaggaactcgagcaccgatttgagggtgttaagttgatcgttggtgtagatcgattggactacatcaaaggagttccccagaagttgcacgctctcgagatcttcttgactgagcacccagagtggatcggaaaggtatcgtcgatctacattttcatttcattcagagataagatattgttgcttctttggtttggagctaacctaagtatccggcatgatctggttgcctcaggttgttctcgtacaactggccgtcccttcgagacaagatgtggaagagtatcaaaacttgcgtgcggtggtgaacgagctcgtcggtcgaatcaacggtcggttcggaactgtcgagtttatgccaatccacttcatgcacaagagtgtgcccatggatgagctgacggcgatgtacgccgtggctgatgcttgcttggtgacgagtacgcgagatggtatgaacctggtaggttatataacattccttcctttgtttcctctcttttttccattgatgatagaactgacctgaatgaaccgttattctgaatcaatcgtgtaggtttcgtacgagtacatcgctactcaggccgagcgacacggttcgatgattctttctgagtttgccggtgctgctcagagcttgaacggatcactcatcatcaacccttgtaagtgtttcaatccttacaaatagagtatacgtgaccaaatacagatgttgaaagagagtctatgaccgaatcattctaggggacgttcattcgaccgccaatactatccacgaggcgatgatcatggatcccgaaactcgaaaggctaactacaacaagctgagcaaagttcgttatctcaacttccccatttgtctggttgaggttccccatacttactctattgttctgtttcaacagtacgtcaacaagtacacggcagagcattggggaacgactttcgtcagggagctcaccaaagtcagcgagaaggcacaagcttctaaaccggatctggttcagaagtttgcagataccaagatctaaaacgtacatcgatatacctgcgtttgcacatacacgctttgtattcctgcccgtttccgttgtttacctcctacaaacgctgatattctatattccttctcgatctgtttccattttgactacccattggactgtggcctttttcctctttttctcctacaatgtatctttgccgcaggctcagcctaattgagccgattcctttttcatccggttcttctcatcttaatctggtatttgataaaatatatcgactgatctctatgtcctgatctatgcgtcaattagataacttctctcagaaatttgaaggtgtggaaggagatgtaagggctcgtgaacggttgtgtcagtcatgaaggcttgtaaagcgatctgtagacattttacctcctagacaagaatcgtccatccaagattcgtcgagaggacttctattgtgttggtcggtctctagtccaatctcttcttccctttttttgtttcacctcacggaactcgaaagtgatcatctgcagacgatgatcctcgacttgcacgattagaaactttagtcgagttaacgaaagaaggacgtcgagatcttcctactgaaaatcaagtatcgagtcaccagttagcaggtgccaggaactgaggttcagccgagcgctaaaaagatccggatgatgtctccgttcataaacggtccctccgtatggatgaacccagcttacgggtagattagaaacaattgtcgtcaagccctgtttcctgaacaatctatcttcttcgagaagaatttgagtataccttatgcggatcggagcccgaaacaagtataacagtcatctcttcaatcagtttatgccagtaaggggatttaagaagattcggtgaacctttataagctgcatgatagatggtatggacgtccaaacaccagagagtaaccgaaacacaaatgagaacaatgacgagaagatagatggaaaggaagaagttcagtcggacgcgtcgaagtagaaaaagtcgcgtgctgataataacaatcgagtgtttcattacctgtactcgacccatcctctccgtctccctcaccgctttgtcatgtctacagaaacatcggggaagcttccagttacatcgataacaccggaatatgaacctcagatatcagactcccctctgccgcctttgacagaagcacaacagttggaagtcgtaactgaactgatgggttacccgcccagaagggttctttgggaaatcgtaggtcacccacgtatctcatgtcctatatactattgagaagatattgatcatcaagatcaaggaaataaactacagcacgagactgcaaacgccgagatattctctcttctcgactctatcgagacttatcttcagagccgggacgtcgctcccgatcccttacccgcaacgttcaacgcgcctccaactacgaagccatcgtcgcggagaccggcccctcctccgttaccatacccgacaccggatcgactcgagcaagagctcgatggaggattacattcgatggaaactctgctaaccacacacatggatgcggcgatggaaaaactacagtcgtggtgctaccgaaacgcgttcaccgttggagaattcggaggtgtggttatcgtgagttttgaaatttcttctacggaatgagaagaaaacactagagggcgaagttgaatccaactctgtttttcttcgttttgctgtggctttggagcaactgtagcctgcacatgagggtctagattttctaaggggtaagtacatatccgagcttccggaaggagagaaaacgctccaggctagacttgcagcccttcgcacccaagtcgagcaggtacgttcttctgttctcaatttggcctgcactcggtccatactccttcttgccttctgattagctctcccaactacttgaacgccagaaacggaagatgaaagcgctcctcgttaaagcgcaggccaagtcggcaaggtcactggctcgagcagaatccctcaagaaggatcttcaattcatttctgatttggcagccaagtatgcccgtacgcgaatctttccttttgatatagttttctggacttcattatcggccatgatggagttatctgaattaagatcttcttctatttgctctttacctctatttgctcgatgaatgacgatacagtcaaccctttaccagaaacactttcacgtctgatgacttccctccaaacgctgcagaatcacgcatccgcccttccaccactcccgacggaaccaccttctgcgcacacgctatctcaatccgatctggtcatccagcatccgtctgacttgactcgagcaggttatctctctcgagtagctctgagagcgctacccgccgacgtggacacaaagtcaaggagggaagatgagggaacaggaaagttacgagagatggagaggagtttgaatgcaataggagggctcgaggggagtcgagaccaagctgaagtcgacatggaggaatgactagttgacagatacgatcgagacgcgtaggcaagggagagacgaatgccactagctcttccccgagacgggattagaaccctggatcgcgactatccgtacgattggcgagcgagcattcgtgagagcctgtcaggaaaatatacccaatacttattattatgataacgacgcccatacaacccttcggtttgaaaatagcatgcagtcttcgatgtgagaagcaagggtaggatacatgcaggaaagtagagaaagaagggtggattgacaaatattataccgacttgcaacagcacagagtcaggaggtccaacgcaaaccattgttcaggaaagaaggcacgtggatccacggcatcagagagcaagctcttcttcgcacgaccaatcgctccgaattttaacctagggtcgagagatctgctccatgactctgtgacggtgggggttgaactgtctcaggttgattttttaatttgtccttccaggccttccatgccaacagcccctcacccatctctttcttccgtttacatccgtccggctcgttgtcgtctttggcccatgcacggattcgctcctcggcctcggcgtaggtcacccattgacgtttacgctgagtatcctcaaggaaatggatagagagggaaattacaggaaggtgaaagtaatgatagatcgtcttgtgatcctggttgacgtgaattgcggtcggaggaatctcgaaagggagggatacaacaccggctggtcgaatagtgcatgacgacagtcagagagaagaaaagagatatgattaggtgagtatgtgagggtaccaccgaaggactcagatcgaggacataccttcctcccgtgcttctcgtcgagcagcctcgcctaagctctctccttcttcccatcctcctttaggcactattgaaagaaaaaaaagtcaatacatttgtacgttgtgggttcgatagatgaggccaaaaaagcaggaaaacagctggctagactatcaagcacgtacagatccactttgtcggatgttttctagaggtcaccatgagaatccgatcagtcgcctgatcataagggatggccacacagacggttcggacctttttccgaggatgtgatggaggaggtatgctcatttgtgatactgatgttgatggaatgaagatgaagacgatggatagaataaaactgatgggaaggtgaggagacgatgagactcatctcgcttccttctatccctccaaccatcgtctccgacaacgttgtatctcattcaatcttgtcatattttcatctttcactcatatctcgtccacttctatacatctcataatgcctcctaaaagacaagcaagacctgtcgacccttcattacttcctgccggaagttttgaccatcttcaaccagatcagattcagcaagattctggcaaatatcttcaaccagccacccattatcaacagacctttgagtctggtactcagtccaaccttcatccgtcgtacggtcaagatcaacagtatcagactagcaacatatcgccttacagcacgcctaatgtaggccatgatgaaggcgcctatcagactggcacgttcactcaacctgccacgtcggcagcggcgtcagcaacagcttcgatttatcctcctcaatctggatccgaccaggcgctctatactcaacccatcccagctgagcacatccaacagccatcccacagtacaggaattccttacaaaggacccaagatcaatcccgcgtttgtgccctcgcctgtaacagttcgacaagttgaccagaacctctggaagcaggatgatggagtttttgttagtggatcaggaatggctatgccacctttgagtactacggatgttcgagttgttgaccatggtaggtagctcttcaatcgttgattaatgtttactatgtagcgaagctgatatctgattatatcgagcatcgcaacaggtaattcgactccagcccatcttcgtctaacaacatactctattccagcgacatcggacctggctcaaacctcacatgtaccgctcgggttgattgttcaacccttcgctcgacttgctcctggggagtatcctgtcccactggcaacatttgggaacaaaggtccagggcgatgtagggtctgtagagcgtacatcaatgtctggtgccgatggattcaaaatggagagaagtgggtctgtaacctatgtgaaggggtcaacgaaggcgagatactcaatgccttgcttgttcctattcagactgctctttgtaacacactctaatctcataaacttaatatgctctggatacagtttatcaagaagactactgtcgacttgacggcatgggtcatcgagaggatatccaagaccacccagagcttcttcacgggacggtcgacttggaggttccatccgaatattacttccccaatcttccacctacatcagagaccgatctgaatgctattcattcgtccaagcactctaaaaagcctgacctgaccaccactgcgcaaccaaatcagcagagccaatcgtcaactgaatcgtacggcgctaacacgtggtcaagtacattacctgaatcgatccgacctgactttggtaaagcgccaacgggcctactggccaacttgacgctaggcgatcaggatgccaaagaacttcgtcagcctagaccacttcgatacgtgtttgcattagatgtttcgtggaattcagggaaatgtggactgatcaaagaatggtgtgaaggacttcgcgaaatcctttatagtaaggcaaaggacggtgaggatgaaggcgaaggtgaagtgaggctggaagaaggatgccgggtcggaatcatgacgtttgacgagtcaatccatttctatgatttcacggttcgtcttccaacgatctttgttcttggtttgtgtcctgaatcttacaaagttcgaaaacatcaactgtaggagacacgcgagacggcccagatgcacgttgtttcagatattgatgagatgttcatgcctatcagtgaagaatcgttctttgcagatcctcgtaaatctcggtgagtacaatttaaccttgctttattcagaagctattcgcagtttcgaacatagagcctttgactgatcgtttacaacatccattatggttgcgttaatcatgagcagctctcagattgaaacgctcttaacaaaccttccttcactctttgccgagaacaacgccccaagtgcagctcttggccctgccgttcaaggatgtctgcttgctctccgctataccggaggagtcctcaacattttccaaactgcgctaccctcgattggatcaggagcacttaaaccgagagacgagatcaagatgcaaggaacagacaaagaaaagacactattcgtgcctcaagacattttctggcgaaatttggcagaggagtgtgtagatctaggagtaggagtcaatttgtttttgttcccgaatcaagctattgatgtggctactcttggtgtgttcccctcatttccatcatgtttgtttcttcacaagacttctggacagaatgttcactgatagtattctggctcaattttctcaggtgcacttcctcacacgacaggtggtgacctattctttctaccaaagtttgacccagtcagaggaggtggtaggatgagagcggctatggaacagtttgttcatcgagaaacagggtacaacgcgactcttaagatacgttgctcgactggtaggaacacttctgagcttgactttgttatacgcatcttccttgacacgaagcgctgactgattgtctaattgggttattctctcaatgtaggtcttcacgttgatcaatacttcggatcttttctccaacggtctctttacgatgttgagtttgcgtccatcgatgctgataaagccctggcggcctctattcggcatgaaggagcgctagatgaacgaaagatggcttatatccaagtcgccgtgctctatacatctcgagcaggaaaaagacttgtcagaacccttaatatacaagtagccatcacggcactcattgggaacatctatagattcggagatggagaagctacagtcgctttgctagtcaaagaaggtaagtcttccattcatgccctcacaaggaactaagtgatgaatgaggtcgttagtcgatctgatcgtgttcctatatgcttgaatacttgtatagctatgggtcagacagcctctcggatgttaccccaggtacgggaagagttgaacgaaagatgtatcaagcttcttgtcgcctataggcgacactgcgccttatcatctaggccgaatgacgtaagttctcacttctcgctttctgttttcacatggagacttgagatttcatgccagcttctgtttcggtatcatcgtctgcaaagatcgttttaccggaagcattccgaatgttgccgctttacattttggctcttcagaaaactaaggccctaaaaggtaagtcgtcaatgaatatctaaatcatgctttcttctctaatctattttattgttgatggttgcttaggtggtgtcgtcgtggctgatgttcgggtggcgtatatgcaatacctccgaacattgagtgtggcttcgacgatgatgtacctgtacccccagatgtttgctcttcacgcgctctcgccagaagatggatttgcggaggaagggagcggacgaatgaaactccctcagatgatgcggtgtggatatccatggatggaggcccatggtgcctacctactcggtcagtatcaatattctattattgactgcttgcttggcagatattgatctaagctccaatatgtcaacctcacttttttggccgccttggcgcttgtagtcaatggagaagtagctatgctctggcttggagcatatgtctccccacatctccttaatgacttgtggggcgttgatgatcttcaagatcttgatgcccgaatggtcagtcttctcgtttctcatgcatccttctgtatccaacttattctgaagtaattttctcaccatcatgcgttctctcctcgaatgcatatgactacagtcatctcttcctcggctaccgacccatctgtcaacccaggttcgcaacctgcttacccacttctcactccttgctggtaaggagctctcggtcaatatcgctcgtcaaggtatcgatgggccggagcttgaatttgccaatatgctggtagaggataccaataaccaagagatgtcttatccagactgtatgtgccaactttcctctggttgacacgttcaattctatattctgggcttcaggaaccttgctatcgcattctaatatcgttattttgttgttggtggcatttctcctgcactagacctttctttcgttcacaaaggaactcaagagcagatcagaggaaactcaacccaagaagaaggaaaagggatcatgagttggttcagtcagtcgtagtagccgttgagacgagagaatataaacatgaattgtgccattccgctttttgtgtgctaacgactgggatatcgagaacccaagatgacaaatagagcggatagatacgtgaacaagagttgacagacgtgtactgccgccgcttacataagcaagcaactatgatatctcatcatccatctacaaagaggtaaacctctcataaccaccactcaaaacaagatggatcaattgatgcaaactgcaggagcagcaggaggactaccagcgggtgtccaggccgaacaagaagctcttcggttgatttttccacctcatctccaatacaacactgtatgtagtccctacttttttcagtcgctttctcaaccctccctacgtcttatataccaccttctgagcgttcgaacgaaccacaacctgttccacttcgttcaatctcgcatggtcttttcggctttctcagaatgaattggccaactcaaagacactcgctttctgcttttccggcgcaactgccggaatcctcgggctcgaatccctcactggtatcgtttggtatctgggcacgattggttccttggctttgatgtacgcgatcatcaaatgccaaggtcggccgaatttgttcttccagaaaggatggtgggatctgctgagtattgatcaggatggattcctggcgtttttgttgtgttggattggaagttatgcggtcgttcatggtacgttccaaaggcttcctcacatccctgttcccatccttcgtcgttgtctttctcgcttgaccacaagtctgagggacgtaggctgtgagaagaagtactgatagtttgtaagaagaaccctctccttttcttaacatgctcgtgtatagtctacgattgaacagcatcaagagcatagagaagaggcatccggcttccattgtatatcggcctctgtacataattggtataaaattatctgatatcctccagttttttggcttttgagtggctcagagaataaagaagaaagaatcacttgctaccaccgtaaaaagttcggatacgacatgtctgggaaattctgactcaagagtttgtgtaggggacgctctgaagatgagatcgaaagcgatcttggactacatgcacaatcgagatcttccgatgaaatatcgtttctgcatgacataaatcttttcagaaaacttgaaccatcccacgatgttggctccctcattttgctcgttcttggtctttacagctcctcccgaattcgctcctttacatcctcaactacctcaccggccttgtcgacgcccttctgagcctgagccttcgcatcctcgaacaggtctccagcagcatcaacgatggacgccgctcgctgggtaaggaacgaggtaaggatgttggacttaatttgaagctcgtccttcttaatcgggttgagcgcggaggacgaggcaagcttggccaatctgcagataaaggatttgacaaaaaagagaaaagaatagagttaagagagatcgacgtttgtttgtacaagggcaaagaccaagaactgaaaacctacctagctttctcgttggaaatccaagttcggccattctctccaagaacatctaacttcttcaagactcggagatagtacttaacagactcctggtccttggctcgaaggaacgaaggtgcaagagactcagcactagcaatcaaggccgtgagcgaggtggcaagtgttgggttgaagaccgagccgacgatggaatccaggtctccgatcaagccagcgacgtcagagagccctcctccagcgactcgactggttccacaggctttgtttaggaactcgacaaaggcctcctcggttcgcgccttctcgtatgactctggctggaagtcgatgctcttagaaacaccggaggggaagtacttgatggtcgggtaagacttgacaccatatcggttagagaccactttgttcgtctgctcgtcggcgttcatctgggcaacaatgcactgtgaaacaaaggacggcgaaagtatgcatagtaaggatcaaacggttaaaacggagtaaacagcattgtgctcggatgggcgtacgtcaggctcattcttgaaatcggcagcaaccttctcgagaactggcttaagactcttgcagtgtccacaccagggcgcagtgaaggcgacgagagtacccttactctcgtcaagggcaaacttatcgaagttggaaacagtaagctcgagcgtggccgggggagggggagccttgaccttgctcttgattccagttttgtcagagacgctaagagagaccggagagacaacagagttcgacatgaagatcaggttgacattatgatgagagcagtgcgcacctaaagacggatacaagtacttacaaggcaacaagagaatcaagatctcgaccagaattgtaatcgaccggcttcagggaaccagcagggaaccacttgatagttgggtatcctttaacgccgaatcgagaaccggacttcttgccttctccgtcggcatcgatcttagcgatcaggacgtccttgccagagtatgtgtctgcaagctgctcataggtaggtgctgatatgatggtggaacggatggcagaaatgaccaagaaaacaaaggttgttttagagctatgcgattgaagaggagaagaaacgcgatgcaaagaaacggcgtaatatacccaagtttttgcagtgaccacaccaaggagcactgttgtgtttagagtccatcagggaagttgaaggaagggagaaaggaatttgcaaaggagaataaacatggagaacgaatgattgagtaagccgaataggttcgaatagtgaaaaatccgataccgagatggaagatgagtacgaactagaactcaacaagggcacctttggcctgaccaatgtgctgatcgaagttgtcgtcattgaggacgagaacgttagaagcgaggacgactgccggaaagaggagtaacgaaagaagtctcatgatgagagatagatgagtgagatgagagttgaagcagatgaggatggacagtaagaaggccagcgtggcaaaaaagaacaggaacggtgacgaggcaagaagctaggtcgtcatggtgacggagccctccgactagcggccatctcttgcgcacaggcccttcctctcatacgcgcacacgggttttgcctgcctgcctacacgctcgcacaggcctcctccgttcctgttcctgttcctgtccctgtttccactccttgaagcccatcatcagtattctctcttcccttctggatcttctccatcttaacttcgtctccgttcgttcggccttgccaagaagaaagcttcatagatggctccctctcgtcgagtcttctcagggagtaatagctcttgcgagcatcttgctcattcattggaatccgcttcgtcaacaaagatcctttcgagatactccaagatcgtccgttgggcgctgaaagagaaataccgtacctcggcgacctattcctcttctgaaccagcctcgattctcttcaacggagcacatcatcagaatggacatggtcgaccgaaggtctgtcttgttctctgcaaccttccgctctctttgtttctcttttctcctttttcttcttcctttctctctccctggcctcatacttgggatcctgacccacacacataaataccctaccatatcagatgagtccaccggaatgttcagagtgcagtctctcattagaccgaccgttcgcgtgtctgtcttgctcctttcttggctgttggtcatcatcgtcgtccacctcgaccggaattctcaaagggaatcacttggttgaacacctggctgcttccgatcactcgtttggtaagctttctcaatgatcctcttgtccttctctcttgggccgttcggatgctaataatgatttttttatgagcgccgtcccccttcaggtatcgattcttcgaccggccggatatattgcgctcaatgcgcagacttcgtagctcaccctttacttgagtcagaacggacccggctggcattacgggaagaggacgactgtctggcactgataagaaagggtacgtacagttgtttgtgtgtttgatgtagaggtgtggcacgtagatctaaacgctgatcgacattctccgtcatcccttccttccttcttctctccaccatataccggccctccccagcgccgtcgaaacgaaagcggcccctcgctcggtcggatcccacatttgtccctgatgagagagagcaggtcttacttctgaacgccaatcctctgccttgtagaggtcagctcccatgttgcatctattcgttctgacaccagttgaccttccttattcgcatgctttcatcatcttcctccttgagcacaggtctccgtgggttccgtaatattggccaaacttgttttctctctgtgatcctccagtcatttgttcacaacccattattaagagactactttctcgctgataggcacaacagaaccatctgtctcgctcgtcggacagctggtaagcagaaggagaccgatgtgggtgggtgtatgctctgtgagcttgacagggtgtttagtgaggttcgttcgaccagtttttcctccaatcacacttcaaaccggattcactatcttgagtacttattgttcgttggttcccttatcgactagatctattccgaggagcagacgccgttcggcccaatcacctttctatactccatgtggaactcatccgctgatttggccggatatgcccaacaagacgctcatgagtacgtcctcaagctttatgtatgatcgagtaaggagagatctctgatcccattctgcctcttgtccaaacgtaaactgtcaaacatagatttttcatcgccgctctcaatcaaatgcatactgatacccaaggacttgacagtgattgctcctgtcctattcgtgcgcatcctccccccttgctgcttcttcccaaactccttttctccctctcttgctctgtcgctgttgctcccattcaatggtaatgaccaaatgtctgtgggttctacgtttgacagatactacgttctcgggtctgctacaatctgacgtgcgatgcggctcctgtggaggaatcacctccgcctttgacccgatgcttgacatttcgcttgatctgaggaacaaagggtcagaagggaaagcggggagcgaaggaaatacgctgaaaaaatgtctggatcggtacgtccatagtcctcattgtcctttgttcatccgttgcgtttggtattgaggatcacactatgttatcaggtatacctcccctgaaagacttggccaacaatatacttgtggaaaatgcggtttggtgtcctccgttcgtatcctgcttcctccggtcgatatttgcagttttctttctgtgattgactcaacgatgttccttcacataaaccgttaactctcgtgtgtgtgttttctctggtcccattcaacgttgtccaacaggactcgaccaaacagctcagcataaaaaagattccgccagtcttgtgtttccaattcaaagtatgttgcgtctcccccgttttcgttctttgtactcatgcttatattgtctttgcgttcagtagaggtttgagcatcaacctggatctacatcaatcaaagtagaatcaccagttcgatttccctcttcgatcgatatgacaccttatctttctcaatcgatccgaacaaaattgaaaaagtcctcggccctgatccgcgggttcggagaagagatgatatatgacctagttgtggtcgtgtgccatcaaggccagctgaacaacggacactgtttgtctatttcacatcattgcgtcttgtcagagcaaagacatctgtctctgtgtatttggtctgatgctcatatgtatgtaaacatgatagacaccaactttgctcgattcagagaggagtggtactactttggtacgtctttagcattctcggttgatgtagatctcatacatcaactgtcctcgaagctgattagaaattctttaacctccaacttttttcttcttcttttcatcaacagatgatgaaaaggttgatttccttctcaaatttcgtcatttcgtctgcccttgtactgatgacggggtttctcctcgacctcacttcctattaggtcttgccgtcgaccttaggttatgcgcttggatccagagcgtacgcgaatgtcacttgtttctcgttatcttggcacacaccttgtctaatgatattcgtttcgattctcattctatgcatatattttcttcgcagctatatgcttacgtgcgtctacaatccgtccttcctaacaattttccacatgtagagcgggtctgtttctgatctcttcgtctttcttcatccacggcatctgcgtctgtttagctatgttaaacggtatctggaatatgcgccacttcgtatatgagctgccgaacgaacaatcagggtttcatctagttggctggctggatagagggatgtatcatgacggtaaactaaacgacattgcgaccgtctagttagcaaggttggactgtgcacccatctggctcctcatatcagaccgaatggttctggtagtgttttctagatcaattttatatatgccagataaagagaaagatagaagagcaatggcccgagaacaaacaggaaagaatgatcacattgaggttgtggtacataagtagagaatgggccactaaagagtggaagaaaagggtatggaaacagaacattaaaaagcgtgttccttaagttcctttttgagggagaatgggaggtgtatgtgttgagggtagaaatgagaagggagtttaatcgaaggtcatcttcttgccctcggcagggacgattcctccggttcgagctctgtggtattagggaaaggaaaggagaaaaacgggggaacatgatgtcaggaatgtctgtttgatctaagaattcagctataagtacagatagaacgtgaacttaccctccacctcggggggcacctcgacctcgtcctccacctcggcctcctcggtcaccgaaaccaccccgtcctccacctcgaccgcccctgtcaccaccgaatccacctcggcctccacctcggcctcctcgacctcctcggtcaccaccgaaaccgcctcggccacctcctccaccggcgttgtctcttggaggggcaaagtcgatcctgacgttccttccctggatgtccattccgttcacagcggtgagagcggcctgggcggaatcgatcgatccaaactcgacgtaggcgaatcccttgggagcaccggtctccctatcggtgggcatcctgacggaggcgacctgtccgtgagaagagaaggtctcccaaagagcgtcctcgttagtgtcgaacgaaaggtttccgacccaaagggtggtagccggagggttaggagctcggtcagactggtacggctttcgctcttccctgggggctcgggcaacggcgtagtcgactcggcattctcggccgtcaatctccttaccagaaagctcgtatcccttcttggaagactcaaggtcggcgaaatcgatgtaacccatacccttggatcgaccggtctctcgatccatctggattcggacagagacgatctctccacaggactcgaactcggatcggagccagtcctgatcaacattccacgaaagatttccgatccagagggtcaaggcgggggggttaccctcctgggcaacgttcgagttgtaggcggcagactggtcggcgagcttggtcttcttgaggggggcctcggcctcctcgtcagcctttcgcttgcctgtaagtgaaatgtgaagatgaagagagggagagggaggaagatgagtggaaagaacgaaatcgaaacaaaagaacgagttcgagttgaacagatagggaatcaagtcacgaaccgttgctttcagcaggcttggcctcctccttcttctcctcttcctcctcatcagaggaagactcctcctcggacgagctggactcctcagagctggaagactgtttatgatcgggtagcacaaagatgaggacagatataaagctgcctaagcataaatatgaagaggaaacgaacctcctcggcagcggcagcggcagccttcttgacgggcgaagcagccttagcggcgggcttcttctcctcctcctcgtcggaagaggactcctcctcagagctagatgactcctcagagctggactgtaattttcaagcattgacaaaacaaacatgagcttcagcttgaattcacgtgcgatcgagcttcagttcgagaacgaaacagacctcagccttcaaagtctttccgttaacctatgaaatgggaatgacaaagagaaaccaacgttaatacccgtcctctagcaactcgataggatcgaaaggatgaaggaaagatacgaacagcggcatcaacgacagtggcgacaccagcggcgacggccttagcgccggcaacaaccttggcgacgggcttctcctcctcatcagacgaagactcctcctcagaagaagaggactcctcctcagacgaggaagactcggaagaggacgaagggggaggaggagtaggctccttcttcttctgtaaagcagtttttttagtagacgggaaaaattgattatcagaaagatatgaaaattttcaacccaaccagaaaaacgaagttttgacgtgtccaaccaaagtacgtgtcagttctgtttttttaattaaacttgcagcctcttggttcccatccaggcgcgaggaaccaagcactctcgaacaagatgaaacgtcgatacgtacagacttcttctccttcttgtcctcagacttcttggacttcttggactccttcacaggggcatcggcaacaggggcggcgacctcggacttcttggacttcttggactcggacttggccattttaggaataagggattgagaaagggaaaagggggggacggacgaagaaaattaaggaggatggatggaggtggggtggaataagcgtgggttgatagaacgagtggaaactttccatatgactgcccaaatttggtcggagttggaaatgatcacgtgatatcatacaaccctaaccaggtcgtctctatatctggattccatccgagatcatgagcagcaacaacgatatcaagaagacgatacaacatgttctccaacctgaatctgttcaggtcaactttctgtccgatggcagccagatgtgaatcagcgttctgtccgttcgcacatcaagcccatcaggccgagtcgatcgacgtacgagctcttttggagcttccttcgaaccctggtacatctagtttggttgactcttccggttctcgttcaaaacggccgttgtcagacgttcctcagcctgctggacgacctctgagcacgaagaaacagagaacagatacattagacagtcagactgctccgccagtctctttggccaagaaattatcctctcagagctcctctagtgttcagcctgtcgcctcgaagccaaccgaatcaccggccaagttcgaatcgttgtcaaacacattcagacgtccactggatcaaaaacctcttgatggtgtcggtaattccaaatcaagccgcgaatcctcccagcttgttccgtgtcccactttaagtctacgcccgaaccagacaaccgttcccctaagagatagacagaatgcgctcaaggcgctttacgcggagttcacaaagctttaccgcccaatcctcaagttggacggtagcttgccagccaggcatgcgcttgctcaggaacaggatgcttacaagaaaggccgaacgagctacaagaatgtaggacataccgaaaatctcacaacccgtctaaggtactgatctgatcgttctttcttcgacggactctaggctctgtccaatatgttaattagtattcgaaagcggcctcctcccgacttccttatgcattcatctatcggaactcaggccgagagcttgcgtgcatcagcgtccttggctcaacgtgaagcctctaagatcacttacgcctcgattgctcctttcctccttcctcttgagaactttggcctatgggattatgctgtcgatgtacccagctttgagggcggcacttcaccacatcaggaaggaactaatcagatatgtgagcgatgcgccaaagaattcttagttcctcttaatggtgaagcaggtatagagaaaggacaggacaaatgctggtaccactgggggcgaaaaagatggggcaaagatcaaggttcgtgtgagatttactttgatgtgatttctcactaaaagaaaccactctactcgtaaaagtctgatgatactctatgatactctatgatactctatgggcggacgtatttgcccatcctttctcaggcatacgcacccagctagccacttgctgtcagcttccttttaattctcaaggatgcaccactgcgacctctcatgtttttgcagacaaatcaatcgacggattgcattctcaactagctttcgttcggtccgaagatattcaggccgcagaagagtcaaaagcggggcgaaatagatcagaagtctcggagggttggggagaactgatgcccgggcagttgagattgttaggcatggattgcgagatgctggtgagtatatgcgattcttcttttcattattaaatgcctgtaggccagtcgattgatcgttccaacgatttttggactctttgtccttgtcaacctatccaccagtatacgacagcaggtacgcactcttttcttgatcaaacactacctttctctcgaactcacccgcttcacttgccctcacttctcaggatttacagtgggcagaatcactcttgtagacgaagatggaaagatggtctttgatgaattcgtcaggatcgatcctgctcacgcattgtatgtcttctgcaattggtttgcccctcatcgtctctcagagtcgttcctaatgatattcgcttctgtcctctttatcaccgacgatatattcgtctcttaccccttgatgataatatgtacatagagattataatactcggtgagcacctgtttattctcattgctccgttttcctgtcgctcataggtgcggatcgacgaatcgtaggttctcaggactacatccacaccaaattgaagcggcgtccatgaacttgatagacgctaggcaagcgctcatggcgttcatcggtcctgctactatcatcgttgggcatgggtaagtgatgaatctctccagggtcatcgccatggctcgtctagcgctctcctatatccctgtgttttgatgggagaatagtcgcctagtgtatgctgtcgatttgatgacattgtcttttcctttgacgtaatcagcctagagaatgacctgaaagcactccgattgattcaccatcgagtgatagatacagccgtcgtacgtggttctttctcatgatctttcttctgtctttgtccgactcttttcctgatcacgcgatctggaaatttgattgtagcttttcgcccatcctcaaggtcctcctttccgattctcgttgaagactctcgcactatctcatctgaaacaaaccattcaagactcggccgatcaaggtcattcgtccgaggaggatgcaagagcatgcatagagttgatcaagtggagggtcgctcaagagagggaagttttagcgcgagcagcggaactagcgttaagtcttggtattgattgaatttgaatataagaatgagatatgtaagcttatcagagtgataccataagagctcgtagatggatcgtctgagaacagttctctgaatcattctcctcaaatttaatccgaccggattgaaacaaagaacgaggcttgatcgtaagataaattcgccgacgaacacatgaatcgatacagacgactagaaagggaaagagaccaaagaccgaaagaagtatatctaagaagaggaaaaggaaagtaatacaggaggcgaacgccagcgccggagttatataagatgagtaaggatggtgaatgggaaaactgaaagagacaaggaaagaaacagacaaaacaagagtagaactcagaccagaggaagaggaagaccaaagacaaaagagaagaagcattcacgaaagagagaaaaaaccctggtttataaagataagtttgatatagaaggaagctgagtgtataagagcaaaccaagtaaggaaaatagagaagaagaacaaggagaagaaaaaggcagagtctacaccgttgaatcgagtgcgcacacctcgctctgaacaaaaactgggcgagacagaagaaatttataggagaagagatcgcagactaactccagcaagtacaaaggaaaaaaaagaaggtttaaatgattagaagcagagacaacgcaggtttcagactcccaggatcaaagagctacagcttccttttctgatatctggtcggccatcaccgtcggcatcgtctcgtccaacgccggctttgttgacctagcgaacacaactcggaagtcgactctctccatctctctgatttcgaccgattcgagatcaccatgctgacaggaagtgctgtcctccccgtcttcgtcctcaagatcggtcgagtagagcgataggttcgagtcgatggacccagccgaaggaagtgaaggggtaaaagatgagttcttggattttgacgacggctgattgacggatggttcgacggtgatctggacgtcctggttaaatcgtactgaagattgcaagggcacacggtcgtctatttgtttgagtccggttcggtctgaatagcttctctcctgacggagatagaacggtttccgatgatctcgtacgagcataggcgaaggtaacctacctcttggctcgaggtccagcttgtcgccagcctcgatcccgaaacccagtccggattggccggttagcatgggagcagaaaacgaggtggatggcgtgttgcggtccgaccttggagggggaagcgggaagtgatcaaacgcggtcggagagctggcaagaatggaagccaaagaggcgactgaagtggattctgacaggttcgggctagctttcggtgtctgcagattgtcgactgaaagactggcgagcaatcggtcgagctgatcatctacctcgtcaatatcctcttcaggaatgacattgacctggagctctggatgctcccaaagcggactctcgtactcatcacttgtgaagccagaagaggttgaaaaacaagaggtcgaagagacaagctctggaagggctacttcggctgggacagagacgggtatcggtggtattgatcgcgatggtcgcacaggcggcgaagcaggtgaggtcgttaccttcgggggctctaatataagggcaacagtaggcgaagccacaggtgaaggacaagttgatgatgatgatgatgaaggggaggactcctcagtcatagacggggctgatgccacagggggtagggttgtagagggtttcaactcagagaaggagaatgaggagtcgaaagagaacgagctggcaaaattgaaaccaagatcgtctgccgataaatcaagtaacaatggagatcgtttggtcttgatttgatcaaccgttatcgacgatgatggtaatgatgaggatggggatggcgagataggaggtgtggctgctctgtggaaagaaacgtcgctggcgttcgtgggggtcttgcactcgtccgaaatgtttccctcttcttcttcctcagcttgcttctctttactctgctcatccgtcacaagttcagaatccagctcttccgtactattcggattgctacccaagtcgggtgttgccggtacaacgataaatgttgggagtgcggttagtcccaaggattcaattggttctgtcggtaatatccgacaccaatcgtccatctgctcatgaagggtctgtggcgaagcttgaggggaggtaaacactggcctgataaccgaggagggtttccgtctggtggaagtcattttggaagaagtggccgaactctggtcggaagtagaatgcaggacgcggtgttgtgctgacgagggtcgacgggaggggaaggaagatgatgcggatgatcgccgagactgaggatgtgtgtctggagatatcaagcactcccgcgagggtaatgactcaggcaagttggacatactgttttgaagggaaatgagcgtcgcaagaaggcatgtttcagtcaagacttggtacgatgggtattgcaaagaaggcgagaagatattatatttacctattggatcgttttcgttcgtgccccctattgcggttcctcacgacattcgggctcccagtattcatggggttttctccccaacccttgccgaacgccatggctggagattctacgctccctcctgtccttctggtcgagacaaagcgcctctcgctttctttcatgctggatccctctgatacgaggtccaactgtgaggatgaggccgaacgaaggtcccgcatagaagaaaagccatcgggaaagggcggcatgggtccctcggcttgagtccaatggtaggacttgtcaaagaacgcacctgaacgtcgggaggggagagtatcttctgaagacgatgctctgagatcaaagggatacgtttgcacagagttcggcttccgctgaatccgatggtgagaggaagtagtactcaaaggggaaggtagagagtccgaggtctgatgaggcgactggtgctggtgctgatcccgttgtttttgttgacgcgacgagtccaacgcgcttttagactgggctaccgtcgacgattggctcgagacattcgctcccgatacgcttcgtttcttccagaacttgaaaccagacgatgaaggagttgattggtgaccacttgaggtaagctccttaacggaggaagagaagaaagaagacgaagcagaggtagaggtggacgatccaaagcctggggtcgaaggagatgaggcggaggagatggtggtatacgtacgagccgaagtgggggtaaacgactgtttgagaggcgagtttgaagaaggacgcggctgatgctggttggcttgtaggtccagaggtggaggcgcgtttcttcttttaggagaggacgaggagggattgacagaggagaaggtggtagtagaagaagaagaagcagcggagggagagttggaagatagcatgccagacgctagagaaggaagaataaaagaaacaaaggatgaacgaaagaaagaggctactctctggacgatggaccaaaacgagaaagggaagcgctgaggtaggagatataaagatgtggaaagagggtgaacgaatggaaataagaaaagagaagacgacaagaaagaaaggaggaaaggtaaagagaagtaaaagaaatgatagaagcgtgctgctgcggacgaacgtgagaggagtaaataaacaagcggtccgcttgttcttggttacgtgtgtttgtgtggttatatggccgcgggccattccgcagccaagtcaggttacggttacgtatgacaggtaattggccgctatacacgcaatgtcaccagcagcgatgatcctactttagaagatgacacatgcaaatcggattgtattgttctcattctgcagtcaatcgagctgtatctgttgtgtgaggcgaacagggacggactcgagttgactataacaagtctcttcctccaagttgtatattgtcaatatatataagctcctcagcgactctctgaacgctgcctgccatcgccgttaccttctctcctcttcttccggcttgcccttctgtctgggctcaaactctggctttctctgtccattcgtcctcctcttcctgagcgccttctagcctgggtagcctccttggggtcgctgtccgatccttgtgccttggagcttgtcccatgcagcagcttctttttacatctcttacagcaaacaactttgaccaaagcggtctttgcctcttccttttcaacataagagaaaggaagctcgaactatttgatcgatagttggaattgaaagccacagagtaggacggcggtgaagagggaaaagaaagaaaaaggaagagtcagcagttaaagaggaggaatatctgcgtatgtgcatgtgcaacggggtcacaaaaatgatagacaagaactcataccgcttctaaaggtggacaaggcggtgcatcagatgacagaggaggaagatgataggcacatctcaatgagccacaagtcgaagatccgatagaaccaatcacttcctcaggcgttcgccatcggagtgcaacctgcagtaccagtgaaggatcaggacagaaaatgtagagggcaaggtctggttagactaagtctcttctcgagaattcgatggcattttctaacaacgaatgttaacgatatatatgtcggcagattaaacatacctgaccggacttgtaatgcttaagatcaacgagagcgtactccttaaacagtgattcttcgtatcgcttggcaatcaatcgtccatacgctgttagggactcagaaggggtttccacggtggatccggtctcgtcttcacgaataaatctgaacttgattgagaaaaaaaggagaaacaaggatagcaaaatacggtcaaaaacgtcactaaaagcccagacataacactctatctaacgtggctattgaatggatgctcaactggtgttcttgcttcaataaatcccaatcagtcttgtttctcgaccgcctctcgtcctcagagtttctcgttctagatccatccgggtcgtagatcgcgacttggttcttatgtcgagtataggccgactggccagccaagttgttccgagctgaagacggtagaggctgccgagcagattttggccgaccttctttcttagagagactcgaacaagacatagctaaaatgattgggaacgtctagtgtcttaaacagagtcgtagtcggtcgagagagggaaagaaaattaaatacaaacagcaagccagaaggtaatcgcaagtgaaagttgtgtagccgaagtcggctgactatccgtggcttatgagcaagcgataagtgcatttttagggttattatcacatcatcaatttcaactgcgtgcagtcgttcttttatatttcaatcagatatagcgttctatgtataggatacccgaatatctagttggactcttctgccttcaaccattctcttggctctctcaacacctccattaggcgaccctcttctgtaccctgttctcctaactctgagcagtattcccaacgagccgttagtgggatggtcatcagaatgctttctattcgcgcgcccggcgtcatcagtctaggaacggagaatgtcaaacagagcagttgatcagtaacaatacagccgaggaccaaagaaagcaccaaatagacgcaaagaatcgttgtcactaacccaaacttagttcctcgatcgatgaccaagttaaactgtttacacacgagatagaacatcgagggagagacgaaacgattgaacaacaggttagcaaacaagataacaaagtcagctcacataagacagaacgtacctcggcatatctgcctctccgaatctgttgccagcgccattgttcaggcgtataaggtaatttccaccgtttctcaaggataggaacgtaagcgggcacaaaggaatctccaacagatttaacaaagtcaaagatctcttccttggttggctgaactccgtttgactaaaagacgtggaaaacagaaaggcaaacaagattaaggaaagaaaaaaagaaatcgtgaagaactggctgaaaaatcaagcatatctcaccttggcctttgccgatttctcatctaaatcgtcgaaaaagattcccccgactcctctcgcttctcctctatgcggaaggaaaaaatactcgtcgcaccaagttttgtagctcgggtagatatccttgccgtgtccttcgcaagcgttcttcacgacgccgtgaaaatgttcggcatcttcttcatacaagtagctcggagtcagatccaaccctccgccaaaccaagaggccagtggttttgatggatccttcgggtcgtaggtctcaaagtatcggacgttcatatgggccgtaggtgccttgggattcttcgcatgaagtacaagggatagcccgcatacagagtacggaagtgagactccaggtccgacagaggacaaggcagaatggttggcgcgcatctgttgtacagcattcggagggagcatcccatggacaacagacacattgacacctcccttttcgatcacatttccgtcagaaatcacgcaggtgattccttctccgccgtcattttgtcgaagccaatggtcatgaatgaacttggcaggagctgacgaggccaagcgtaagagatagcacttcagatggttaagaaatacacaaaagaaacagacaggtcattgtgaagaacatacgagaagatgaagacaagagagaacgcggctgtgttcgcttctcgaggtcttctatggcggaagtgattcgcaactggagagatttgatgtaggcctccatatcgtgatacataggtgactagttgaataatcaagagtaacagcagatagtcagataggcttttccaacagatcttcatcctaaaggtttgctcacaactgtaacctccgcatccttcgatagctcaagcgttttcagggagaaaccgaaaccggatgcttgcaagaaagactgtttgaaatcctcaacactctcctaaagtgtcattatacataatgcaacgatttaccgcacacgtcagactaggggaggtatcgtcaaacaaaaaatgagagggctcacagccaaagtatcccccaagaataatctacctccaactagaagactaacgcctccaatcaaggaaatagccctcatattgctgtttccgccgttggtatttttcggaggagaaggagtagcgagattaggacgtgtggacaacatcttctcacagccactcggtttgattggccgaaagcctacgtgaccatacagaacactgattaagtccagacatactacgatacgcgcaagtgaagcaaacttgtcgcttaccactgactactcgaagtgagtggcccattcgacaggaataattgagcttggacatatcctcggagtaaacaagttgaactggggtttcttcttatctctatgacacgcttaagatgtcagagagagacctgaccaggttcgatcgcaatatcagcaggtatatatgcattcctagatgtactgggaagttaggtggttgtgtccgttttccaaaggcgagcgctcctcaagagacgcgaatcttctaacgcgttctcctaaattcctcagtcttcatcctacactttccagtttctgccgaaaaatccacattaaatagaaaacattctcacatacatcttatcgacaagagcaacccaccgtcggcgggactcctccttgatacatactgcaaagtttgataagaggaagctattccgacatgcactcaactatttggacaaactctccgtcaacagaagaattaaagtgattgagtttgatcactacgatccatctatcgttttagttgaacagatacattgagatgttctataggtatatttaaccgttttctaccaaagatctgttccaacaacatcccctccgaactcagcaagatagattcgggtctcagacaagatggccaacttctggtctccgacaaatgccagattggcagacccctcgccgaggaagatcttgccaaggagaactccgttggagttgaaaacctgtttgcacggacatatcagaaagaaattcgatctgttcggttatcaactcaagtaacaaaaggaatcactcacatgaactccatctcctgctccagtgtacacgtttccattcttatcgaccttgattccgtcgggtacgccgctatgggaaatgattcaaccattgaacaatcagctttaaacataggtgctcttttaaataataccgaactgaataagaagatacacacgagtctaggtaagcaaagagttttcggtttccgaaagaaatctgtccatcattctcttcaatatcgtacgtataactttatgtacacgttatcatatcagccttggttcacctcagcaaatcacagatagagaatcactcacatagtggcagggaggtaagtgttgacggtcccattctgtgccccagtgtcgctcctgttgacaaaggcgggtcaaatcagatttagaaaaccatccaagcagatttcagaatgagcctaacttacagatagaccttgctttcatcagggctcaatgcaattccattgacgtgtccaaagtgctcggccacagctcgaacgaggccagtctcggggttgaaggaatacacttgctcaggaagctgtaagaaatagtgtaatgatcaaacggagcatttgatttaacgaaatttgtcagatgttttcgatgcaatatggatcaaacgaaagaggattgaacatactccagggtatggcttgaaaccctgcaagtagccatagagagtatcggtgaagagaatagatcccgacttgttgtgaacgacaactatgagagaacggaagagaagaaaaagtgtacaaattgttattgtttgatcgtccaagagaatatagttataccccaaaaacagaaaggttcgaaagactgaccatcgttcagagagttgaaccttctaccaaagaagttatcaactaggacagtggagttgtacggggcctcagggttgaccagagtcaaagaagctgggatttcgcctcgaccctcagcggcaagcaagagctggcctttgtaaggagttccacctaagacaaatatgatcacttagctcaagcatgagacaacatttctcccaaatatgtagacttaccattcgtcatttcaacagcaggcgatgcaacaacttcttcaggaatcaaattaagggtctcatttccactcgtcaaattcgacaaagcgatcttgaagattctgttgttcttatagaggccagagtctcccttggctttgattcaacgatcgatcgatcaatgaaaaagaaagagtgtttgtaagtgcgaaaactgcggaagagaaaacaacatggtttgctgagacatacgatttcctgcgttcgagcagaagaagctgaacaattgtcaagaagcggttgtccagtcagcatgtcatcagattcatgaaaaggatgaatgtgcaaacccacagctcattggtgtccggcttccagatagcagcttcgtgcgcaaagtagtaaccgctgaagttctcagaaactgtcaagtatcaacaccagggaatcaagttaagccgttgagtttgtcgcgtctgtcttttgtacatgatgttcaaggaagcaacacatactgattcgtaattgaggagagcctcctagaagtttcaggaagtccgcatgatacgcctggaaaccggccgtaaggttaccattaggagtccagatatctgtaagagacctcgaggagttccctcctatgatagcgaaggatagcgggtcaaagtactttggagcccgacgggacgcatactcagtatcaatatcatgtcttcgtcaaaccattcttcctgacgaattgtatagacacacctgaacattctctggaagattagcgacatcaactcttgccgattgtcttcgcacaggaagagatgaggcctgagccaaagcgaggagagaagaaagcgcgagagtatagcgcatagtattgatgaacaaaagtcggaggtgatggaagaacaactatgtccaactcagatggacgcctcttcttcatatagtgtacgattgacgggccatgcctaaccatgcccacttggtcaccagccttggcgacggccggacccaatatggtcagacgaacgggcatatatagtggggaagtaaggattcgaaggtatggggaacatgtttcagtctagcgtccagatggtaaaagagcgaaagcaactgaggatttgtcgtcatcgtcgggcaacaatctatagaccaaccaggctggaagcgatggatgaactgggcctccgctttggttaagatccgactgtcggacagtcgggaaaagaaggacactccggtaaccgccaagaaagtccggccgtccgggccggtctgggacgagaacataacctggttgggtgcccaatcagaacttgtaatcgagtaactaaaagtaaatatatagaatcttcgaacgtccatccagtatatgaatcgagagtgtgaaagtgtcaagctagccgattcttttcacatggggcttgtttctcatctcctgaaattcctttcctcagaaattccttgccgctgcatatgatattgaagccgctgatcgtcaacaaacagctcagataggttcggggttcgttctcttgtcatatttgttgttgatatcaagatagataatcctcatctaaaccaaggagccaccaatggcatgattgatcaacatggaagtctttcctttataaacttggccgcgctgaaaaccggacctcttacggatctcaaaggtaccctattcctttcccaactagacctcgaggaacgagcccatcatcccttaaccatggtgcaactgcccacaagtcttcggcgtcgaaagaaacatatgaaccacgattaggcaatgtatcgattttattccatttcgaggcttcatcagagtgagtcgatgaatgtcgagacggtaaagctgcaactactctgttttcatgttatttaaaaggcccaataaaagtctcattagttcatcagtaattggacagagtatcctttggccgagaagacggcaacgagagcaagagctgtggaagcatggcgacgaaattcagaacaattaaagagcacatcagagactattacgcacatcgtcggcccaacccatcgagcagtttcctccacttctggccattcctctcttaaaatttcattgtcctcttccagttcgttctctccattgagatctaaatcattgatagtcaggagctttcttggaggaatcctccgcgtatcctctccgccgggtgtgtggtttggatagaatcggtgactatctctaggctgcggatgcttcatgattggatacggaagccgtacaggatcagagctcctctgggtgtaagcatcttgtttgggagcagtagatgtcaagctagagcgcggagatgcttcagaagagaggcgcgcagatacagatggagatgacggctggaaagatacagacacaggcacaggtggatcgacagtcgagagagaaggtgaggcagacatgaaagaggatgaacgtatgcggacgatagaatctgagttctcagctctttcgctagttgcgtgaaacaaagaatgtctgagcccaaagaaatttccgatagagccggctagaccaggacgggtccaattagaaccagaagcatgagaaggagatgctgcggtggcggaggaccttcctccactcaacgtccggctcaaggggataccccgtcttcgcccacgacggctatcgtcttcgggatgatccactcggggcgcaagattggataacgatgacgatgggcccgcccttgaaacttccccgacgagaggttctattcttgattctgcaatccgcctcaaaccttgaccgataaactcatctgaaggggattctgaatgtagatcacccaccagcctgggtccgccctcagaataacttcgtcctcttccaagttgcccatcggacctaacaggtgcccgagtattccatgaaggaggattcagcggaaacgctttgaaatcttgccaggatcgatcccacccagatgacacgactggatagcacagtggaggatgcaagagggcatgggcattcgcagagggttgataagacgaaggtttaccaagagtacccaacacaaagatggaaatgtccgtcaaacggacgagaggacggatagtcgctggatagcccgtgagatcgttctgagaggaaaagggatgagcgctgatgaacgaatacatagacggagatctttgatcgcgacaccatgtgatgaatgtcgcagacatacctgagctgtgagctcccgaataatggtttctgggttgaaggtgtcactgtacagcttattagttgtgacagtgccttttcgatctaacgtgatccaagaggtaaaaggttcgtccttgttgcaaggtctttgagatcgatgatgaatctttctaagtgttctactcatcgtagattgctgttagtgatctacctggctgaaaagaaaaagagatcaacggacatacctcatgtatagacttctccagctttgccctgcagtcttgtccctagcccagctgggtagaaacctacgaaggaagacttcctgccagtccatctccttcaatcctggagggatgacgagttcatccaacacccaccccgcctgagctctcactaagatctctacccaaactgaacgagggacaaacgagtacacgccgagtgtcctcaagctcgaaggataaggtataccggcgataagggtgcgaagaactataggtgtgaatgggttaaggatcgacgcgatctgacgaatgagcggatgagtttgagagatcgagagaacatccaaaagagacagataggtaagaatctgagagatgatctctggaggcaaagcgaggagcagggactttgtcgatggttgtggcatatctaggagggtgatggtgctgagagaggtgatgtttagatacgaattccgtgaacgatcggtgatgagtgccggccgaatgtaatgagaaagcgagctttgcaatctcggctactgagatgaacgatggagattgaaagtagttaaaattgcctgcagatatgttccatattccatgaagaggtgttttctgtcatgtcttgccaatccttgtgcatccgtacaatcttttgcccctttgattctggaagttgtcgatacccttcacaagcgacaacaggtcgtccatggaaatcaataaaatacaaatggaatcacttctgctatttgatgacgtcactaccgctgctcaatccggctttgggtatatgatcggcatctcataccacgcacacacaagacataagaatgaagttatggtacgagatacatataaaaaaaaggatctatcatttccatgataacaacttcatcttgaagaatacgatcatccgtttcattggccaaaagagagtgaccgtagggtgaattgaacacccgtcgtccgcgactttgcgtttcgcttgaagaaccacaagcggaagtactaaccactatactatacgatctatgagtgtcggttcaagaaagacagtttgatatctgatgaggttttaattatttttgaaattcatcggtcttaacataagtttagctatgatatatcgtttctactttaggcaacaccctcggttcttcttcatcacagggtccctagattcttatccccaagacttgtgagatatctagttggttctcttctgtttccttggtttctcaatccattttaatgaaaggacctgggaggtgtgtatatggctctgggcaaacagcgaggacttgattgggatcgaaaagttcattttcgtccctttgtttcggtagatctcttatgctaatttccaacactggttatctagacaactggaatttacagtcttacgtttagacacttacatccaactggcagttcaagatatgggttcgaatgccattgacagacttttctccgccatgttgcgaggttccaatcgagactcaacgatcttttgaccagagtttcacatacggtgttgtcatacaagatctaacgtctgattgtttgccttgtgtctcttcagaatgattttggtatctggaacagctctttatgtgtccaaaagtttggcccggctgatgatcctgaccatctgccatcttttagttttctcatgtatccgggtttggtgagttatcgataaactcatcttgattgtcaaactgctggagaaagccaaggatctctacgccgctcctctcagtcatcacgccctttggatttgactaaatctgaatgaggtttttctcaacaccgtttgcaacttctccttcgttcttctttcctcaagttgcttggggttccgtctcttgcgatccgcctgatccgtttgtgcaagcttttccacataatgattagatgttttttgcttctgtccattctcctgttttagaaaatcagatgatgatttaggcttatacgtcggttgtcagtaactctatgacgctaatcgtcctgtacaagttcccctccttgaacagtcaggtttcttttcagctgctcccacatctgaccaatccggtcccctattgtcttgactcataattttcttttatcgaacacgtcttcttacaacgaaatttcttggggtttgacactcaatctctcttccggactattttcaacaatcgttctattactctctagaagtcgacgattctcgatcttcgctttcaaccgtttctgaagtagggattggtactttctcctttaacggaaaatgatctgcagctcaaccgttgcctcaagacagtcagtggctgtcctcacattctctatgatgaaaggacccggcttacttactaagcgattctgaagtattcctaaaatttgcgtgtggtttgctgctgaatattccaatgactaacgaaacgctgatctagcaccatcaagcatcaatgctccaggttacattttgtgccatctttctcgcagtttgatccgttctcttagatttgatgaccaaactagagttgacgtgtcctggaagaacaagagcaaatatccaggccttcggaagtgatactgtctcttctctcttcaacaagttctcaaattcctcatccttttctatctttcaattatagtatcttgatttcaaaggacttgatccatcttcatatgactaagctatctattatatcaaagagaatcttgctagctttctatgagccatccctctctgatcagttaccctcccgtctattactcacaccagaccatttaaatacagtctcacggacaagtcattgcattaattctagatacacagtgagatcgccaatcacagtgaccttcacagaaggcgatgttgcagtcgaatccctccatgatcctggcaatgtatatcttgtggtttgtccttttgttcttcggttgtcaagtctagcagagtccatgccaagcttgcccgtactcatgtgttgttcgtcatcagccttggcctaccatagcctacttgtagagagaccggagccactgtcttccgatcctgatgtctgaaatgacaacaaccgaatcgtcgatgtaagtaaaacatgggggatctttcagaaagtatacgtcatcagaggcatcgagtggcccgactccgaacgtggttggcggtcactgagcatcggcctgatcgcacatagatctgtgtcgaggatcgagccgagctggctgacacatgcattccatgcctcacggcccttgtggtggtcagtctcatctatccttgtcgccttcttgtgttccaagccagactgacgcgggcacgtgagtcacttttcttcggttacgatgctgatggatgatgtatccgattactgatcaagtgctttccgtgtgcaggttgtgtccgactacgatcatgcagcgatgcttcgagactgttgttcggacgatcttggtcagctcgctgagtgttgggctaagctgccggtctttcaacagagtgaacacgtttggatgtgatcgtcaagagtagagtcttcatctggatcaagacggcgtactatatgtgctctcgagttggctatgatctcgatggaggatgctgtgggtgaggtgacagaaagagctgggacaaactaagctaccgacgtgtgttttggaaaaggtgaggtaggcgaacaagtataggctcttcgcatccctttgcatcgtcatcgggatgaagaggggctctgtgtgtgggctgtcgactacggtttggtgggcgcaaacgtggatgcaacgtctgtagactaggatgctgttgagaccttggtagtgatgtttctgtcggctaggaaatgttcattccatctgagcgttcagaacgatgcgagtggaagccaccattgtatacacaagcctacaagacggaaagagacatatccagctgcggcggaacaggtaggctaccgacgagcagtcaaaagatggaaagatggcagcgatgtcggacgaaccttggtgactaacgtgagagaaatgaaggctcagacaaggtgaagaatagaacatcgacgaagacgacacaatgaaaagaaagtgaagagcagacagaacgaagccagagtcggaacatggaacgtatgtgcgaagataagagacgaaacgtggaagccaagatagaaaaagagaaggagcatgtgtcctgacgggcaccaagaaagacagccacgaccaactgaaccttccattgtatactgactaaggtctgaccatagtgaaattctcgacaactaaacagtcttggtcagagctaaaagaaaagggaaggtagaagtaaggagagacggaaaaatgcgagactgatgaagaacatggacttcagatatcgtcggctgatatcgtaaaaatccgaaatttgagaaacagtcaagacgcatgatattcacctgatcccgtcatactcgaggaaacctatgttaagttcccgtacgttcttttgtccactttcagctcacaacagccagtctggcgatatacaaactgtgtggtgaaaaaatttggcaaaagaaaaatcgaccgctgtagggtttgaacctacgccttcagagaagagtagctatctaaaattgaattcaaggctaccgcgttagaccactccgccaaacggcctcatacatattgaaccacacatgaattccaatatgtaaaatcggattccgtgttgggttttgttggagtttcagcagtcttgacataatttcatctgtaattggttatctcttcttgagacatcaccttccgacctccgtttgcgcggagtcccaaggctctctttccgaagagctataaattttctagcgggtttcttcctgttttttttttcttttctggtttctcaatccattttactgaaacacctgggtggtgtgtatatggtttgggaaaccagtgaggacttgattgggaacaagtgccagaacgaaaagtccattttcactcttttatttcagtaatcatctttaggtgatgagtgttggaatgattcgttcgaattcagtatgttaggtttatttcctacaatccttctgtttcatcttcgactgattctgtctcagtcaacatcttggcagatatcttcttccatcctggctgtttctcttagtgtcgtcttatcttctttcttcttatccaagcacgttgggttctcacttatatctgtgctcgacacttttgtttctcttctttttctttttcttttgcttttctcttctcttctttttcctttcctcagtattcacagaagactgtttgtgtgctgagttagaatacaattattctttcttgcagaacaaactgtgaatctctttagagattcatcccttgatgatccttcccacgctgatttttcctacgctgagtcttcccatgctgattctccacatattgatccacctcgcttctttatttccgactgctccgtgagaagcgctgaaagacgagtcattctctcggccaccttgctcatcggcaagacaccaatttctgtacgggtgttgctggattctggctcacagctcaacttaatcgacaccaagcttataaacaagttcgctgacgagtttgcttgcaaagtccgttccattcctgttcctcgtcaggcggtcacagttgacgggacgccgttgacgaccggtccgattgactccatcgtgactggcgagcttgggctcgggaagtacactgagtcggtgtccttacatc

SEQ ID NO: 480 - DNA, 653 bp, Xanthophyllomyces dendrorhous
aagtatcttcgtcctatctaccagtacacctatgcctatgactttggcatcttcttaaatcctcgagagcctgagctttccacatacatcctcatctgaaaatgttaaaaccaaccaagtcgcaacaatcggttgccgggcccttccgccctcacaggaactagagaatcagattcaattattcaaacaagtcaactgtctcggaggaacaatcgagaagatcaagatacattccagccttcgatttccccaccaagtgctcccttttattaaggtcatgcaaagctgatctcgaaagatgtcccatccgtctgtgaacgacatcgatctcgatctccggcttgcagggcaccaccgaagcagccaatgccggcggccgagccgtcacatcgagcgaccacaggctttgcaagtgtggtgaagcggtgagaaagatgccgttcttgtctctgaacacgatccgatccatgtcgccgctgaaagtgatgcctttgatccggcaaagctgactgagagacaagagagacaagcatgtcggacgacatccccagcacatggaacacatcggtcagtgtgagcccgcactgttcgtcacctgtcgctggcttgctgagcaagctgatctggcctcgaccgacgactttcatcggctg

SEQ ID NO: 481 - DNA, 368 bp, Xanthophyllomyces dendrorhous
ccctgtgtgtctttcggtgcatttgcgatgatgcttcttctgagctgtttgccttttgcagttctgggaagggcccgaagaagagtaaagctccacgactggtcatttgtattgcattcacatatcactctaagatttcttatatcattcactacgtccacaaactgatccagctgtgcacgaaggtcatgagtataatcaatctctatcgagtccaagcgctcatacaatagaaactcgcccgagaccccttccagtcgatgaacagacctcagaacgtccaggcactcggccgatgtccggcatggcttcagccgcttagcctccgcgatgtcgatcttggtgtggatccagcccatggctgtgtc

SEQ ID NO: 482 - DNA, 6187 bp, Xanthophyllomyces dendrorhous
accagtgacgatcgtccagagcttcatgtctcgaagagcaaaccggagtcggctctcccagacaccgtagtcgttggcaggatggttcggagggtgaaggttctcgaagttggcaaacgacgcctcggacagcttggtgtatagcagcacactcgacggctctgcatcagtgggctcggctgacttgacatcggaagacatatctgtagcagtagggttagtcagactcctaatctaaaggcgtatacggtttcgtatcgctgtagaatagaatagaaaatgattccaaacacagcgccaacaaagcgttggtagatgctgaataaggagaaacagaatacctgaaaaaaaaagaacaagaaagcggaggaagaagaaaataaggccggctggcagagtgcactggcagaggctgaagtacatagataatgagcaaaaactgatgcatcatactcaagtattctcaacacactctgctagcggcctacgtttttgcttcccccgccttctgtttcgtttttttttcttcaggtttttatgtttgtccttattcagcatctaccaacgctttgttggcgctgagtttggaatggttcatctcatggtatccgacagaacttacaggcctgtattggatgtcattttttctctcgcaagctcgaaacctcatgaaagtcttcataattcttcaacgaccatcccaacccttcatattatgtgatattgtatcacccttctgcatccaagagcatgagcgcgctgtgttcactacctactcagcccctttgcctgcgctcatggcactgctgactgcgtgctatcaacatctaatatgtctattttctccctttctccctttctccctctcttccttccgatctttgttgtcctcaatgtgtatccttttctttttctttttcttttctttttctatatgacatctattctaggtggttatgagctgtctctgactcgcttttttgagctttcagcttcgttcaatacagtagttcctcacgtgatcatcatccccgttgagattatcacccagcaatactgcgttttgtcctagtagctgagagcttgtactggtggacgctactcatcgctcaatctcccctcctgcgcctatatacttcaaactctaccagcttaatcagaatattgttcatcgtgtctgttattgtaccaacattttcgaggctgttcgtatcctttgtagaagctgaagctttacatctcttcaacggatatacgcaacctatctgcattatcatccgttgtctgtctcgataagcaaaacttttatttcccaagatcgacttgttgcatgtttcttcaatgtttgagcactgttgcttgttcattaaaaaatcaccatacatgcaatgttaagaacattttgcatcatgtcctaacagcttttattctaaaatttgatgatacttcaacgctttcacgtaatcctcattcattttgcttccttcgacattcattgttcaaaagaacatacggttaccagtattcgttatcaagaatggatccaacaggaaacggacagagtacaaaagcatctgtatttacaagagtttttaagcatcatcaactggataactgtaaattccagcaatacacgtcaaaaagatataatgctgtaagattaacctcagaatgcactagtgctgctgctgaacggacaatgttttgtctttctcaatgatcgataccacccgctctgttgtccaaagttgaaagcaaacataatattcgtcaccataaataatggggaataaaccttgtaacgaccattaatcagaactcaagttgagcagcacatcgaagagcatgatttttgacacaaaaaggccattgatgagtatagtggtcaatcagcttatctcgatatgtactataaactgaaagacttacaaagaagaatagattgatggcaaaatcagctttaaacaacgctcacaaatgcgtactcagcttgaagacgagttgaaatgcagaattccaaatactctgagtcgatcttctcggatgatatctgattgcccagaagacaaagtcttgatatctacagatcagactctattcttcggagttcatctccctgcaagcgtgatccataaatactgccattttgagaaaaagcatgccttatgatgaaagtgatatgaattgatattctaattgaaacacgtatgaactacttcgaaccgactgctatgtaggaattcattttgtggtatctgaagctattctatggtcattgttgtatcgagcatgttcatattactcggtggactttgatatggaaactcgatgccactttctcatttctcgagcagtccgaaatatatctaaacatcatgagaattaaatgtctcgaaagaagagaatgaatagttgtaattgatgcacagctagagcttgttcgccaacattgagctacatacgttactgaaatctcacgacgtaagagatggatatcagtttaggtgtcgctttcatgcaaaatataaaaaaacaaataactttgagattaatgcgtatgttcagataatagaaacaaggttttaagtcaaaaacccatcattttagtatgatggcattgatctctatttgagcggaaccactgctgaaagatgcattgaaattcatttggtatatacttatcgaaatcatatgtcgcatttattatgtatttgattagtaaaaagttttccgttcacaaaacacgagtgatatatgataacctcaaattttgaacgaaagaccagtatatcatgatttcattttttgcttccattcgtcacgtgagataagtcaacgtgaagtcatttccaatacacgaatcaatgcacttactttttggcagctctgatcatcgatttgtcgtttatgacttgaataataatgacagaattaacgatgactacagagaaaaatttgacgaactttgactttgttaaccagactgtgtgagacagcgattttgggactttgctgtactgaagaagttgctctccatttcattacacgttttttcatgtcgtttcatgaacaaatgagtatgttggtgccgctatgaggttttgctttatattgaagagtgaccagtctccattgaaaggtcacgaaagcggacaaaatagttacaacacatattgaagtctttcaaccagttcgactatgatacaaacatttgctgatcaagttatttcacaatctaaactcaaaaactacaaatgatagtgagcatatcattttaaaaaacgtattttgatgtggagtatgagacatttgtgatgtgttcatatattgattgaaagttttgttctggcctaaatcaccatcacagaccgtcaagtatttatcaataatcatcatatcattgagttaatttacttgatcgattgatgaatgtatcaccctgcctcaacagtttgtactattgagtgttgtatcatatgacgggcaataaattaaatatttatacattgtgtggttcagcatcacaatgttagccgataaacgtgttggtggaatcgcataacttgtagcagaaaactaatgtatagtgaaacatcaattatatagttgtagatcacatatctagacctgacagaaaagagtcaatttggaaaaagactgtttagtgtacggtgcttcctttacctcgtacataacatatgagagcaagaatgtgccaattcacaagatttttagagatctgcaatgtacattaatacgtttgattttgtacactgatatgtgagttactgatatttgtattcttgaaaaaatactttctttgctgtgaaaactgctgatgctagttacctgctaaatttgtgcacggacgaccttactaagtagtgcatatgtgatctttcaaaacagttttgaaaactcgtaaagatagacgttattttcgactctggaatctgctcatctttgaggtttgtatgcatatcatataatagaatgtcgattcaatgtctagcgttatcaggcgatttgttgcagatatacaattatatatgctacttatatgctataacatgttttcaaggcttatgctccattttttagcgtcaggatgatgtttaatcttcaacaaattcagaattgaaatgaagctttttggacaatacagcattgtttgtcatggcaaattgagtctccttacaccacctttatttacagatatactgtcgcggccttgtatctgatcaaatcaatgagttcattatcatgtcatcatatgtcaagtcgaagtcaaaggaaacgacatcggtagaagttttcacaaagcatcactcaacaagctggattactggtcatcaagcaacagtgtaaaattacaagattatcatgagtgatctcgcagcgttattgttcgattcttaagaagttctggtcaacatatatatttgactggataatgttgaatcctgataacgattgatgaatgtttctcgagctgtccatatgttagtttgatcaacacttgagtgtttccgtttggaatcgaaacgttcgaagcataaaaatgattattcagaaagcttcagataggcgcttgatgaatcgaaaaacgcttacaataggtacaattctagatatctattaggtagaaaacgaaattgactatctcaaaactatgcatcatgattgcagtccaacgagatatatgaagatgcatggccttattcacagaatacatcatatggattcaaagtgactgattttaacagatcgaggcgttatcatcagccacagcgcataataatcctgctctaaaaatgaacggtattgtatcccagacaaacaaatcatttacctgcacaacaacgaacaaagtatgacatcacgatttgttatgacttttgtgcgatgctatagcatttgaatcagaagtcatgaatttcatcattcgtttacgagctccattagttttttttatcagtaacattgtatagatatcttttacaagccattttgagtcagaatcatcatacttctgcaaacgaaaagtgagtatccaacttccccttttttctggacaatttttattttctcaccagggtttgtcatgatatttgcaaaattcgacgaatctcggaaacaaatgagttcttcatcatcctctctgtgcaaccgaaaaaacatgttgatgtgcgaggatacgaaaaatcaatgagaaggaagtcaagtcagtacgatggctctactatgataacagattttgtttgtttgataatcgtaattcacattcacattcaacacctgaatttacaaatggtgtcacagtctcttgactggttggttattcatcagtactgatttactacttggtagacttaactgcatttctcatataatcaaaactggcaaactcacagatcgagaatgacaacaacaattcatgacataatgaaccgtatttaacgcttatataattggccatgattgtttcagagtctttgaattgacctacatagactacgggcaataagtataacgttctaccaaggttatcggcatataatcatttttccaggcttcaatatgagatgccgcgttttgttgtatgacgaaaatgagcattcattttaaacaactatttctattccaataggcctattaacatggagaaatgggacaacagcatccgttttgggcgttcaaagacgcagagtaagatgaatgaagtgaaacgctatcactgatcacaagaggaagtgaagattaccgattccaaaccaaaattgaaaacgatcgtgttaacaaagatgtatatatgaactttccagtgcatgatttcatgacaataatgctgagttggtacatttctgtcaatgttgttatttcaatctgtgacagtgatcggaaaaggcaggatccggctgctcagcaagccagctaccggcggtaaagaacagacgatcacactcaccgatgtgctccatgcgcccgacatgtcttccaacatccttgtctccctcggccagatctgccaggtcgaaggcgtgtcgttctccggtgatcgcagcatcttcaccatcacacgaggccgagacatcatcctgactgcttcggcctatgcgcgcaacctgtgggcgctcgatgtggacgtgcttgttccgaacatggctgcctcggtgactgtttcgcc

SEQ ID NO: 483 - DNA, 660 bp, Xanthophyllomyces dendrorhous
aggatgggtcacccttctagatcagctatgtatgacattttgtcttattcccaagcactcagcaagaacataagcaagcgagacattgacacatactttgcaagaggaatgtgcacaccctgtgtcgagtgtcgacagcacaagactccgtttccgacgtcacagaccatcatcgatcgaccccttcagctcatccataccgatatccagggaccgatgccagtcgagtctgccggcggagcacgatacatgctcaccatgatcgacgaatacacagactaccactgggcctggccgatcaaggcgaaaagtgagactgcaagcatactgaaggcgtggatcgtctaggtcgaacgagaaactaataacatcagggagcactttcggatattctaatggtgaagtcacacagacaacaatgtacttccagtttccgactgcctcaatggtgtttttctcgttgagatagaaaggtttcctcaatagatagacccgatggcgagttctgattgcctgatcttgatctgaattttctgatcctaattcgctcaaacaattgtacacacacacagtgagcaagttcattgagagaaccagaaaggagaagaaagaaaagaaaataaactagctactgtatatacgatatcaccaagatggaaa

SEQ ID NO: 484 - DNA, 621 bp, Xanthophyllomyces dendrorhous
agatccgatcgcaagttttccgtgttccgggcggaaactcgagtatttttgtaccggaacagatcgtctggtgcttcttcggagtgcgggcgtttctgctgctcgggcgagttgttttcggtatgtaccaggaccgtgcgttgggactgggatcagactttgttctcgaggcgaaggtgctgctattctgacggagatatcttctgctgtggtttctacaggcttttgtgatgcgttttctgcagtcgttcctggcgccttttcggatacggcgattgatgcattttctgacaccaaaccctgagtgattgccaaagtagtctctggagaaacacatgaagaaacagctgaagaaatagctgaagagacagctgaagtaagatctgaaacaccttctaaagcggttcctgaaaaaccttctgctctgactcctgacaaggtatctgcagcagtatctggattgatatctacagaatcacctagggtgatgcctgaaatagtctctggagaaacatctagtacactttcttcagctgattctaaagtagtctgtaacccaggcagtgaagtagtttctggagtagtttctgaaacgcatccaaagacatttactttcccggt

SEQ ID NO: 485 - DNA, 320 bp, Xanthophyllomyces dendrorhous
aagtagaacggaaataaaacgagagagaagtgagataaagatgatgtagaaaaatagaaataatgtagagatgaaataacatgttgaaggagaaagcaaagagatagagaagtgaaccaactcgcatcactttacggttgacgtctagactgctctatccaataaaggatgcccacatccaacaaaagaagttctatctcgcctgcgggatcataaactgtacgtcaagctcgaaaagtgcgagtttgatacagatctaataagattaagagttctgtcgagagtaaatacagaacgaatgactcagtataccagactgt

SEQ ID NO: 486 - DNA, 28183 bp, Xanthophyllomyces dendrorhous
gtgacggactaggcagtgagttgggcagtgagccgggcagtgtggccaggccggccacatgagacgtgacctggatgcggtgtcgttacacaacgctgtgtaattccaacacttcggacagagtttggtccggaacgagagagtgagaattcttgcagccgcggagttcgaccaagagcagatgccgtctccttgaccggaagtttagtcaagcgagaggagaagggaggagagcctcaagctggaagcttggaagatatcaggggcgcaggcaaggaggctgagtggggacagtactcagtgcgcttgagctctcaagagggaagagatcatgcaatattgcagagggatatgaagaggttattgaagggaactatgaggatttaacgaggttccaagcttgggggagaaaaggggagatagctaacgactacatggtatatatgtcattcgagatgttagaccaaggaaacacaagcaagagcgaagagataccaaggaggagctgagagataccaaggaagagtcaagatataaccaagagagagttgagatgtaccaagagcgagttaagcagtaccaagatactgttgcaaaaatcggtctacattgcgcaaggtcaccctgcacggatcaaacccggatcagatcatgacagatcatgacattggctcagtataactatgcaggaaggacattagacactcgagtcagaccaaatcccaaacaaggaaagaagaaaggggaaaagaacacaacaggggaaagatattggcatgaagaaatagagagagaggaaaggaagaataatgaccacagtagagatattcataacgtattcagaaactatcctaatcaaactggtcgatcttgtgctagttaacttgagccggatctggaccctgattgagagcgaaggtaatgagtatgatcaatcacaattgaatatatttgctcgcatgtcaaggacttgctaggaaaggggcggtgaaatgaaatcggatataatcaacaacgtcgtattgcttcactgaacgtgattctcttaacacatcaattcactcaaactcactgtattctagccgagacacactaacacaaagtaaaggtatatctattaagagaactagggatgtgaagagaagacaggagagaattcctgagtcattgcagacgaggagtagagatttgaacgatatcatgatttaagcgcccatcacaaccgatattcagactgtgacgtcctatacccgacatgatgcacatacgctcaagagtgtgtagagccggtgtatcttgctgctctatgtaatatttagtcagcaacatttagtacagagttgtgatgagaatgactatctcaagcatggtcttgttctcattaagactatgaaagatgtcttcatatacgaaatgttgatcaatcgacactcaagaacgacaacagtgagccagatgttcaacctcactctgaccatggctgttgacatctaaacaacaacgcggtccttgttgaccaagatgaattagaagaaacattcgcgatttgtaatcgacttataggcaacatcggttcgaaaggctacggaacgatccgatgggaattgaaatcttgactttatcaaactacaaactatcaacatcaaatttctacgaagccgaatgccgactatgtctccttcgcccacagtattgagaactgacgtcccttcttctccgatttcggccgacctgccatgttccaagcctaaaggacaaagcccttcttcaagaaaacttctgcgtgcacttaccttcactcagctctcatctggcgttgtcttctcatcattccttcttattcacttaatcccgccggctttggtggctatcacgggtgatgatgggattggcagtggcttcttggttcgtattggcaccttctcctggctcgaggttctttattagattcacgtggtcaacctcgttggcattcgtcttgctatagctctttgcgagatcaaatactcaattattgattggttgatgtacaacagacgctcggccgagtatactaccagggtggaccagaaccactcatcatctacacatcactcaccgcccacgttgtgtcctccatcattcttcgagcattttaccccaaaacgcttccttctccacggtctccccattccgtatccggatttgcattagtacctctgatcataactcatctgcttacccatcggctcattccgtcgtccacatctaacaaactcattaatgctctctctccggccgagctcgacttgtcttttgtgactcatacactcacccggtatccaatatcttcttcgctggcttatattggtctcacgttctttggagtgtggcactccgtaggagggttgatcatcaccggtcgaaaagcgggtctcatcaagattcgcgagggtggaacgaagtactggcgaaagattacatctatgagcacatggggagttttgggcttggtagggctaggatgttggaggcttagaggcagctgggtctctataggaatggggaaaagaatcgacgaagtttatcgggttgcttatggattgataggattatgacatcattcatattggcatgtataatagcagagtttttgtagccggcgtttgatacaaagaggctgatagataaggaatggcacaagagagcatcgagagactggaacagtatgcaagatgatcttgaatatatgctaagacaagcacatgcacatgcacgaagaacattgaaccgtttatacgcacatcactcgcaacgagagtagattaagattgcatatgagacgtaccttgactcaatacaaggcaaagaggaaacataagaaggcaggaaggtcgacgacagctgtcctcagagcgtggatcctgagccattgacctgtgagacctcttgtgtccttcggattaccgtataccaatagtttgatgatgggagcgacctatcagaggaaagagaatacggaccaggcgtgtgaaaggaaggagacattttgagtatcaaccacagcagcttgcgtttgtaaagacggcctatcactggaggactttgatggacagtcaaaaagaaactcactgaagggacgaatgcgaaatgactgagagctaaaccagcacctgccaaataaaaagtacgcgatcgaaggccagtggatctactagccgcccaagcacctgttccaacccccattaaacctaacgtaccaaccgtaacggttcccgagacccaccagccttcaaaatagctctggatagcctttcctggaatgtctttctccctgtgaggttgtacgagtggccgcaaggaaaggaactctgacaatgagaaggtaagctgagaggttgccgccagaagaggaatcaaaggtagaaaagccggtgagctcggagctgttacaaagggagcaatcgaagtttgagagatgatttgagagactgctgggttctggtctatagcactcttgatgtatgtcacaccctgggtgataagctggtctaaaggggaagatgatgatgacattctcaggcgtgtagtaggacagatgagatggttcaattagcgacgtcaacagatcaaggtgaaaccttaagcagctacaaatcagtcaccctagacaaagcctcagattgtttttaattttccagcatccgatttttgggcttttgttcaaaacgattccaacctcttttctcttctcgcttttctctctttcgtttcttttctttctcttgtttctctctttcttcttccttcttccttctgtccgtgtgttccttcagtggttgtttcgaactttatctcaagtaaaagacgtcggatggagagtctttgtgcccttgcacggcactcttcttctcttctccctctacaaagctatctttccttacttcgcttccaaaggctggatttgcggctctttctcctatcaatgagatcgacccttcctgaaccagccaagattacccttcagaccctctcccatcttctcgccctcgtttctaagctcatacttaggaccgagggtttgtttcttgactcttctccttgcgggattcgaggcgagcggatccgagagacagaccacttccgcttgaggagcagttctccgtgccttcacgaatgctgctcccaatctgaatagcctttctttttctcttgtgtcaagtcgagacccagtcttgcttctgtctctttgtgtcctgaatgaaaacgatagatggatgtgcaggatgcacaacaagctgtccatccgctttcaagaagcaaagtgaacagtgaaagcagtaggcaagatacttgaacggttatccgcctgcccacattactatgcgcgttaatcagtgaaaaacatagcagcctgtcgtcgttagcacatgtatcttcctagtcctagtagaatcatgatgaggcattgggtcgatctacgaagcaagttgagctgaccatgcttcaaaattaattgtagtgtatggacggctcctctgtatccttattgattaagctcctatgcaaagaagtttcatctgtagatcaccgtctgaaccaccaaaggaccacaaatatccacacaactagcacgagaaacatcatgaaccagcaccattttccactctggttgcgtgccatcgaagtcatacgacgcatcgttcctttgagatagtaggacgtttgtgcaaagtgatcattctgtcatttagaagaatggacagaaggcgggatgagtatttcaagatgaaacccataagtagaggataatgctgttcaatcgtacggaccattgtctgaaggtccatgttcccatccttgacttcattccctatgctcaccgtgatctaaagtagtaagccgagcgcaaaatccagacccggttgagcaaaagcacgtgtcatgatagtcagctggagagaacccttcgatgaaaactccgatgctcaaaagctcgaatttttatataagaaggcagctgtagagatatagatgagaagtcaaaagcaaagaaaatcacaacatacgtctttgagcattttcacctttccaaacaggccatccaatctctcgtcgttctgtccttctaaatcctctggactctttctccgtttttcataactaggtaggaatccaccgccacctgtgatattcgatgagctcagcccgaggctcccagacgatgctttcttaccccatcggtcctcatctgacgaaggtggcaagggagatgaccgactggaggagggtacggacgagtaaggtgtggcatacgagttgcttgcctgcggatataacggggacggatttgtttgtggatacagtggttgacgtttggtgatctggcttcgggatgttggactatggacgagtccatataattgtgggaaaaagaatatacgttagtagagtagccggggcaaggtgaatggtttctgaacaagaaaccaaaaaaaggaaagtgaagatccttaccgactcatggttcaagatatcacacctcttttctcggtttgtaatcgaaacagacttgttctcacttatgcctcaatgatatgaatgtttagaaggtcttaagtggaggcgagatgtggtccgatggttgaaaatgaaagatgggaagttacttgttcgttctgtatacaaaacagtactgtcaggccaatcggctcgctggcatggaaatgatcctctcggcagagaccggcgaggatactcaatgcaagtgtcttattctcatcaatatctcctgactgtatattgagccaattcttctctcctgcgttttcacttgcggttggaaaagagccagcatgtgtggacagaccttttctttcatcggtcataggagcggaggtgctgcagagaaaagcatcgtgtaatgcgggtggagatagagaagacacaaacagacaaaaaaagaaaacaggaaagaaggagcgagagctaccaagaaacagaatggaactaaggaaacctaaagagggacgccggaggcaactcggagaacgtaatgaagatggaaatatagatagaaaggatcgaggattgatgtcaaaataaaaaagcagtggacgaaaatacgccctcgagtgggaaatgagcgatgtaaaacgactcatctcgcgttgagacaaaaatgtagaatgaagcgaaacaaaacaaagggcgagcgtgtatatatgcacgcagcggatgatctctctatctaacagcagttggcctttttggaaccagaatcgtccgaggtaggagcaattgtgatgttctcaccccctgcaggtcggacaatatcgttagatgattccaaagccttggatgagacgatgtggtagatttctgaatataggaatataaagccaaaagggcaaatacttagcagtctgatcagtgacttccaagatgagatacgaaaggataaaacaaacccgtcaaaatattctggaaagcagcctcgacattgttggcgtccagagcggaggtctcgataaaagataagttgttttcggctaaaattgagtagaaacgttacaagacggaacagaagatacgtttcagatcaatctagttctttctggcactctgattcgtataccggaacagcagcatagaagacataccagcaaatgccttagcctcatccgtgggaactgccctcaagtgcttgagatcactcttgtttccaaccaacatgatcacgatgttagaatccgcgtgatcccggagctccttcaaccagcgtgtcacattcacgtaagtggggtgcttggcgatatcatacaccaacagagcaccgacggctcctcgataatacctgtcaaccatatagacggattggtcaagtcagcttgacaagtcacatcgatagaaagccactgaattgaataggaaacgcacgccgaagtgatggctcggtatcgctcctgtccggctgttaggaagacaagagacacagagtgagttagatgtcgactaatgtgattcgattcctgcgatagatcgtcaagcttgatcgagaatctgcctcaacaacgtgatatgagagatcatccttctatcaagaactctaattttgtcgttggaagagattgtctatgttctgattatacatggttccaccaacagaatagcaaaggatgcagggcagagaggaaaagagagaaggaaccaaccagtatcccagatctgagccttgacagttttgtcgtccactttgatcgtccttgtagcaaactcgactccgatcgtcgatttggtgtcaaggttgaactcgttcaaagtgaaacgcgaaagcactgattgagaaagaaagtgttcgatatgctccttcagcggctatcgtgcagtagagatagagaggaacaaaagagaggaaacattgtcgacaaaaagtccacgtacaattactacagccgacagggacatgaggacaatcagtaagacaaacgacatgtgtcagcatgaccaaacccgatggaagaggtcatttgggttgtttgaattcatcggaagaccctccaagagatgtggttgttatcgtagacagtctacgacagatacagatcacacgaggttgataactcacgattttccgacgccagaatctccgataaggacgactttgaacaaatagtcgtagtttgatgattcagccatctatataaatcagatgatattgtagaatggcgaaagatcagtggtcaggatgatgaacgcttgtagggacatgaaactaaacgaaacactagatagcaggtatgacactgatgtggaagaataccggagcttcagtcaaatcaattcgaaaaagaagaagcagacatacgatttgttataataaaagaactttttatctgatgaggagtgtaggatgagtagtctgtaattcgtctgatggagcagcagttggttgttgatgttgatgggggatctttcccggaaactcacgggacagtttaacaaagaaatcactcgctaaggcgtaacaggctgtgccattcaatctctgatcagtttaactctatctactttccaatacgtttactcagatctgtagatacccatctcgttagaaaatattttattaaaatcatcaaagtcatcaagccggacgtaatgttacaatacagacgtagtttcaaatgaaagttaaggaataacaggtataaaagaagaataaacggcgaacggatgaagtttgtatactactagccaagaaaatgtctaagaaaaacgtatttaaggagatgagttaagaaggggtgtagcctctgtaggcgcttcattggattctctcccggaattagaagacctcgtgagcgctggactatcatcttctgggatggcagtgccggttgtgaaagataacgtgttatgtgactgagaagaaggctgctgggtgatatcgaatttgcatgttgggcactagttacaccatacacagatttcagtccagagattctctatatgtcatgagaggtatgtggagagaaagtagcctcacaagttttttccaacccttcagccagctatcgatctcatctctgtgaaaactgagaacgtcgcaggaggtgagacttggcccggtcggtattagaaagcatgctcaggatcaggtgttgatcgactcacatgtggccacaaggaagaatccgaacaacctctccttttttaaagttttcaagacagatcgtgcactgtgtcatcgaagtggcagtcaatgatcaatactgtcgatagttacgagagaaactacatacctcttcgacgccaaaatattcttgggggcgagcaaactgacggctcccgctttgtgccggtggttgtaatgatgatgacgaggatgcatttggatttgaatgatccagtggaacgttagtcgtttcgctatttatggctactcctgagaccggccgtccagtctgaagcttttcccaaccgtcctcggtccacaccctggtctctaaagagtcgacgacttccggtcgagctcgatcttttcttctcttacggatgacgccgagttgatggcatcccagagtggtgatcgtcagtaacgagggaagcaaaaggatcaagagaagaagatccatcaaaggccgctcccagtcttcatcctgggatagcatgatttcaacctcggtggaagactcttctgacggcggttgttcggtcttggccctaagttcgtcgagaagagatagataggtcgatcgagagataaagactgcagggatgtacaagtcagaagtatcctcaggagaatacatcgtgagcaagcttgttcgttccctacccaccgagtctggctcggatggatatgctggagcatcaccaacaagaacaacatccgcgcccagtgattgagcgaggcgaaccttggcggcaaacgagcatgagcctcgcatggttagagcaatctttggcagctccgagtgtgaagtgacgttggtcacacgatgggatggagaacgcgagagatgacgggcagagcaagcgagtatagttgtgtttttgggagcagaagagaagtctgttattgggaggagaagtcctgcgagagggttggtgatctcatgagcaggaaggtttggtggagaagatcctagacgctgggtgaaggaggcgaaccggacgggaaacgctgtacccaaagggagtatcttggggttctaatatataaggaggatcagaaacactgtactttcttctttgccagtgtattgatacttcaaggaaagccatagataggaaaatacgaccaggatgaaagtcgaacgaaccagaagttgtacccgacctcctccccatccccacccactcaaccagccgatccatccgacggaccccgatgttgtaaatccaatggatgaagcttcgtctggtgaagaaatagacttggtatccaacaagagtggagacgcaatagatactaaaaagaatgctagatggcagagccaaacgagagagacctttgaggaaagcatgagtggttgaggtggaagggatgaatgcgatccagcagttgttagaaccgctggatgacgtgagggacgtgcacaaaaataattatattaggtgatccgctcgactcattacatctttttgtagtcctatggaatgtatttttgtaatgaacgtctcggccgagtcatcggcagtgtttccagacaactatgatccgaccgagtaaagatgttgttgatatcttcagataccctagggatttttttttgatgaataaggagatctcgctcggcaacgatacggtgggttgatctttatcacgcatcaccagagactattgactgagagggtatcgtgcatagaactgcttcacatcagaggggttaagtgatgcttcgtatgacacaatctgctcttcctgccaatctttgagaccttactaaatagtcactgttttctccaatgcttcctttcttcaagttcattctttggcgacttctctgcacccttcgcgcgctctctctttctgtctctctctctaatgtatatatcttcggtctcttcaatggcgccggttgtgtccttgaagaactaggcctaaccaatggatgcgatcgttagggttgaagaaggtgactaaccggaaacggagtttgaatgtgccaaattaacaaaccggcttaactgattttttggttcttgaaaccttctctcctctcgttcgttccgtccattgagaacttttgaccctcttcttttcaagcaatcatggctgctacagttccagccagcttgaacccttcgcttaccgagcctcttgataaggttcggctcttgtcaaactccaagctttctcatcaatccaaaccggccaatcttctcaaggcgctcgagtcttcccttcctggtcctatttccccgacggcctactatgctgccttggtgtccacattacagcagacgattgccaaggagatcaaacagggtgagatctctgtgtccgagggtgaccttgtccctgccatcctgtacctccttgctgtagtagtcgactttgttccggtcgccgttgttcagagtcaatctgaaatgggcctgctcggaccgttgttccaaggagttatcatgtctggtggtgctgccggaggcgaggatgctgatgatgagttcaagcaaaccaagactatcatctctctcttccctccttgtggaccttctgctccctcacttcggtccctcattcacctcacccgacacgtcctcctgaccgctcccaccccagcactctctactcaaccctaccagaccgctttgtcctccctcctctctttgaccttggatccgagaccaagagtcagaaaggtctcccaggaggctatccgagatgttcttgctgcacctcacccacccgcggtcagacatccctatgctgagagggtaagcaaaggtcttatcaaggtgcttagcgagaaggttttcggagaggactcggagcagagaagaatctgggcgatcggtttcgttagaatggttgcctcttcgtggcctagcgaggtgagcatttatctatattccatctgacgaaaaaagacatctatcatctccatactgaccctggcatctgttcatttcttttcgccctcaagctaatttcgcctttacttgccgtcctcttgcccctcccgtccgccaacccccatttgcaatctcaaactctttcccttctctcacatcttctttcccaatctactacgtcaaactctttagaacccctcaaggtccctgttctgctcgccactatccttgcctctcctcccaaagacaaggaggtcctgccatcctggctcgaagtcgtcgagaatggaatgatctcgtgggctcgagaggattctgctgcctgttctgtcgaacttggcaaagtttggtccatggtctggggttaccttgaggacaaggactccagggagaagggagccaagattgctcaagccgcagagaagtgcttgattggtttgagcaggtactgtatcgatgaggacaccatgcgatccgctttggagttcaagccgtctgctgaggatctcgctggctcgactaaagccggcaagaagggcaagaaacagcagatccatcctcaggatcagaagacgcccggttctgaatcgcctctactcgttcagatcatcagcacgcttcaatctgctctgcacacccttagaacgcttcccttcttgccatcaacattacaaatcatcgcgtcattaatttcccgaatgagacttcggttgccgacatctaccccgtcaatcaattcttcaacggatccccgggatcctactgttgccgagaagcttttgctcggtttggtagccgaggtcgccgatctcagaactcagaagggatttgagttcagggagcgagctgacgaggtgcttggaatggcggtcgaggtgatgggaccagctgtgcttctgaatgctttgcccttgaacgtcgaaggcaaccgagatccttctcagcctggtcgagctttcttgcttcccatccttcgaaccaggacgaccaacacgtcgttgtcgtacttcaccactgtgtttgtcccgctttcggagagactcttcaacgctaagtcggctgtggagaagacgaggccgatagaggcaaaggtttatgaggctttggtcgagcaggtttggggatgtttgaagggattctgtgatttgccggtcgatctacccaaggttcgctttctctatctacatttataccataaacttatttcttgtctggttctcaccagttctaatcacatacttgcttccattgcttcgttttcgtctaaaaggctttcaccaatgactttgctgctttgattactcaagtgctgtacacccagccttcgctccgaccgtctctgctccgatcccttcagacccttgtggagacttcactgtctctttctaagtcctccgctccatccgccgagcttttgacctctttcggacttgatcagtctcatggaaaagccaatttgcttttccttcaagggatgagcaagaaccttctcgccgttctcttcaatgtgttctctcaagttggtcgggaacagcgaggaatggtcggagaggttatcgcttcttacttatctgtctctactgccgaggacatctcggccacatatgagaaggttgtccttcatctaggacaggctttggctgtcccttccgccaagcctgcccctggctcgactacttcaccaacgtcacacactatgcttgatctcctgatcttactcattccgttcctacccgccatctccgctcaagcgctctttgctcacgcgtccggggctgatgcgaaactcatcggaagtgacgacgtggccgtgcagaagaagagctaccgagtgttggctaggttggttgagcagggaggcaaggtcaagttgagcccgaccgaactggaacagtttgtagagagactcagcgacggaaaggaagttgtcttggctggtgctcgaagagtgagttgactcgtatggtttaggagtacgtattatgatcgtgactttgctgattgttttttctcataatctaccacgttcaggaccggatcattcttctgtccactctcattcccacgttccctgccgatcaacttcatctcatcccgtctcttttgcccgaggctgtgctcggtactaaggaggtcaacgaaaagactcgagacgctgctttcgacttggttgtcctcatgggtaacaagatgtcggagggtggagtcatcaaaagaaaccagcttgagggagcagacgatgaagcaatggccgatggtacgtctttatcttcttcctaatcataagcttgcccatctgggattcatactaaccggacgttgttcttctgagtcactctagcatctgctaccatccctgaatacttgacaatggtggctgctggtctagttggaactactcctcacatgatcagcgcttccatcaccgcgctctcccgattaattttcgagttcagaggtgtgttttgccaaacaatctttacccaacgctccttcgctgtgaagtcttccttgagctcacctggctttcacctttttctcttcaattacaagacgacgtgcctggagagatgaaatccgagcttatcagcacgcttgtcgttttcctctcctccaccaaccgagagatcgtcaagtctgctctcgggtttgtcaaggtcatcgtggtgatccttcccggttctgacattcagccccacctcgacaccttggttcctggactgctcttgtggtctcacgatcacaagaaccatttcaagggcaaagtgagacacatctttgagcgattgattcgaaaagtctcatacgaaagtgtgaaggcagctgctgaggaagctgcgctcaattcggaggaagcacctagcaagggaaactcagatggggtcaagttcttggagaacatccgtaagaggaaggagcgaagtaagaggaaaaaatcagccgctagagaggctgctgatgagaatggagatagggatatggaggacgatgacgatgatgtgagttatccttcactttcgctgtggtcagtatcaacagtttgccctcaaactcggatggctgacgttctcgcttgtttggtcttctgtggttctaccaggctccgtctaagtctcgagtctcgactggaaatgccttcgacgatgctttgtatggatccgagtctgagttggatgactctgaagacgacgaaggaactggcgctcaaaagggcgaccaggctggtcagcgagctgccaagggcaagggtaaggggcgagcgaaagacaccagagatgctacgttcatccgagatgatggagacgaacctatggacttgcttgaccgaggtatcgctggtcgactaaccagtgagtcttctcgagcttggtttacgtcacaaatgtaaggcaaatactcattgacttgattcttgtctttcttccgctgtagagcatgaccccgctgccaactctcgacgccgtaagcctgggcaggaggcatccaaattcaagaccgatgctgataccgggaagatgatgatcaacgacgactctgacaatgagagcaagcccgccaaggtgggaggtgccggagaaatggatatcgaaggtatggcctatcaggagcagctgactgccaccgagggtcagactagaggtgcccgaggtcaggtcgtgttcaacaaagacactaagcggggtcgagctagggaggccgatggagaggctatggttagtgttcatatattgtctagcttgttaccgcagcaacagctcacacaaactgaatcctgaatgtctgcgtgatgttaattagctggtcgatgcctcggaaggaggtcgaaagaaggccaaaaaggagaaacagaccaaagttcccgtcggaatggattacaaggccaaggttcgttcgagcgttgtctagctttctacatctctttcgtctctaatctctccttctctttattctgacgtctgctcgatgaataatctacctcgacccgatacagcgagccggtggagatattaaacgagctggagcgcctgatccgttcgcctacgtccccctcagccaggcccgagggtctggttcccgacagcacggcaaaggacaaaaggtcaacatcactggcaagaagaagggctctgctgcctaagcaggctgttgtcatctttgacttgtagtttttatctttcttccctcatatgtcttttggtcaacccctgttgtttctttctcttttcttttcgtttctctcttttcgtttgtctcgtctttttccggcaaattaatcctctgctgtttcacctgctccgcccttcatcttcccaacatgtttgttctcgacatttctctctaactccctatctatctccttatctccctccggtcactagatgcatgtgtctattaaattgacgtttctcaagcatgatgatatgcaagagcaccaaataagagctcgagaaagaacagggttgctggctgcaagatcacgcgagaggattagtcatcctattcggccgggcgagcaaagaatcactcactctataatctgtccggtctaaatcatccctttgacttccatcccatcccgtttccttcctcttacatcccagtttcacactctttctctttggtccaactgtctgcttgccttgtcaagcgtatacgtatctaaactctcatcaaaggcgtctgttagtaccgaaaccatcatgggaaacactccgtcccatcctcggtcggctccatcggcttctaaccagaatccttcgtcgtcgtcggcctcgtcgacaaataatcatcacatttccgcctcgtctgtcgtgtcttccattacatcccgtaccatccataagaatcgagatcgttcaacatcctctccgcctgtgctgactcctcagcagattattgaaaccgaagccctgatcgatggaggccataccgtgcctatgggactctatcagcttgctcctcaggatttctctcagcccgtggtcaagcagcttattcttgaccggaagcttggtccgttttacactggcctggatgactacgaagaggacgctgagccagaagaagtcctcaagtctcttagagaggccagggcggctgtggagactaagcgaatgcaactcaaggcaggtgatgatgaggccgctgcggcagtccaggcagtgatcccgaaggaaggctcaccgagtgaaagagagttgagggagctcgaatggtaccagggtgcaagtgaatgtcctttgtgagttatagaccgttccccacgcacacacgcactgcatgactgcatcactttttctcaacgcaaaccaactaaagcttcttcctctcttttttctgactcacttgaactgttttgtctaccctcgatcgccaacacagatgcttcctggtaaggtttcgcaaatcacgttctcacttctctggatgctcttcttacccgctttgaaacgcttgtcatgaatcattcgtgcccacagttttacccttccaacatcaacacttctcgttgctgtgatcagcctatctgcaccgaatgctttgtccagattaaacgggcggaagccacattgacccacttggtttgttcttgtcttctcttttcatcttctgaagctatcttgtgcatgaattgtagtctgctagaaactcaagtcgctactccgacaatccgtatgacaggaatccgaacctgcttgttgtcctttctgtatggaacccaattttggaatcatctataaccgaccaagggtcagtctctccatcttcattattgtctcattttgcctgttgtgcatcagcacgaacacgatcttccgctcacttcatcatcaatctgtcccgcggttcttgatcttgtatatcacaatcagcctcgtatcaccacttcacatcaccaaagctcactttcaactatctccgcaatatctactggagctggggattcttcattctcgatggatgacggcgctcctagtcctaggcgagaagatcggatgagaaggaagagtataggtcatactaattccggcgttgtcacgacaggtttgttctatcatcttgacctctctgttttcgactcctcttcttctccttcttctccttcttctccttcttctccttcttctccttcttctccttcttcttcattcagatgattgcgcacttgtgatacacagccgactgactgacttacttcatgatccacccttcatagatgaaatccgaccggattgggaagcaaagttggatgctgtcaaagctgttgctgctaggcgtgccaatcgtcggattgtgatgcgtcaggtatgttcttctcacaatctgaattactcaacttttatttgacgttatacccatctgctaatatcgaactgtttcatcatctgaaggtgggtgatcgattgattccggtaggagtaacatcatctcgaaccccaatagcgcccctacagcttggagaaggagaccagccgcaatctacaaatggaagaagaggctcaagaaggatgactggtgagatggcgatggtcggtcccgatattgaagaggtacgtataatcatccgcaaccttgagcacaccatgtaattcgactgttcttgaatgctgattccactcttttttttttcggatacaccggatctactcagatcatgatgatggaggccatgcgtttatctctacttgagcatgaacagcatcaagctcgtcaagccactgaggaacagaacaagaacaaatcttccgctatcactcctcaaaccccggtctctcgagaggatcctcaatcaagctcgagaggtgcatcttcctcaatcaccaatgcattaccgccaccgttgatcccaacgataaattcacagcaagagagacgaagagacggagatgaggaatcgcttttgtagaggaaatataccgagcgattcgttgtggaacgaggacttgaagagaacaatcgcatatggagaaatagacgttctcttcacttggcatctctgtaagtaccttcatccttgggcttgtcttctatcttgatactatctccgcctaacgtctagctgttcagccgggctgtctgtattatcaatatctgactgttttgtaatcttttaactgtcctcttctgctctgctgcttcagatcgtttcatactgtttgcccgcccagtctaatgctttcttcacagctcatcctgccaatcatctcgttgtacatcgatccatctctgtattcggccggtctctttttctcccctggtacatcactactcttctctgtttctgatacgtttctctcaaatcccctcttgctatctcgtctactgtccttctttcacgtctccgttatctcttcttctctagtgttccatttccatctgtagctcgtatgtccctctatacttcaccactctcttattttcttatctacccttcaagcctaagcgctatatgcctctacgactttactttcttttaacggttgccctccttcctccagccggtttgtctctctatgacctgtgctgatggaagcctttattgacatactacccaaatcttgtcactcttcatttgctcttttccttcccctccctttctgtcagtcgagatagctccgatggcgtgttttcttccaacttcttcattctgtcgtttctttccgtcattcctttgttctccattgcctatctgtcgggtgcttcatctcattcggcgcctttttctcttcgcctcttcttcattctctttgttttctatatatctctttctctcgttctatagatgtggcgacgttgacttcacaacacatgtattcatgagcctcttccctcttccatttcgttcttcctactttctcttttctttctcttcatttcatagaaggaccacgtggctaccataacagaaccaggtttgtaagaaaaagaaacggatatgatggtttgcgctatgaacgaagaaatttgatcgaacgacagcgatagacggagcgacaagaacgagagaacggatcttggaagtcctgcgatgcttcgagtgcttcgtatggagaccaggctgagggcggaaaggaagaggcgacggagagatatacgatgtgacgtgttgcatctgcaagcgggtttgttcttgattaaagttacattatgatggaaatgcgtatagcacttagatgtccgtttggaaatatgatgattttgagctggtctagtcaagagacacaagtcatagggttctggaaacagaagtttgagaccgttagggaacgaccaacgattctgttgatggtgtatagatagtgacggcaacgactgaccttctggttttcgatatgttacaatgcatatttacaataacttattctgctgagacatcgcttaatctctaaggactatgaggaaagtcgacggtaaatgcgggtctgagctcgagcacctcaagaactggaagggaggacaaaggagtagaccatggtagaatagatatcactcactcttcacgagagcgaaggactgttctagacgacggaaagaaaactcttcatgtcacctttggttttgacgtcctgatgatcatcatccctccgatctttccttttactttattctcctgaaattgtctcgccttcaacatcttcaatccttcttccaaaagcttgtacatgtcggctgaatatgtcctttccgctttggataacccgaatacgggtcttgcttcttcttccaaaggagaaaacaacgacggcctcctcgacgttgcagcagatgaaagaacggctgtcgagactgagaacgatctatgttttgaacggtcggtcgggatgaaacttgtggccgaatgtggaggaagcatgaaatctctcggttgacgaggtaagatcaatgtgaagtctgcgagaggatcttcttcggaaggatcgtcacctgcttcacttgccgttggggtaggtaacggtggtctgatatggtcaccttcgatcgagtttgaagaaagcgttgacatccttgatgtgaggtagtcttccggttgatttttcgagtagaccgacgtccagccgtcgccgatatactgcttctggtatggttccagatgcatgggttccgaaacgggtggaggtgacggtaagcaagaggaggatgacatggacgggatagtatctcgggtgatttgcggatgaggtatgggactatctggtagagctgttgtcgaccggtgaggttggttcttcctctcaacactgatactgacaacgatgatgatggctagacgacagagatagaaggacaaaaggccatcagaattaggagatggatgggaatgacaacaattagtttttggggtttggtctgcgcttaattatgacgtttttctttctttccttcttgatagaaaaagaaggaaacgaaagaaaacccgttgctacatctctttctatctattgagtttgatatcctgatcttgtcatctatacatcgttcgattgacttgccgctctcgcttttctatacacaaatccgagtctacacgattctggctcgcccgacaagttttagaactggagaaaacacattggatctctttcttttcttttctaaacacaaaattccacgaattatctaaccaaagactaaaagaaatacaaatcccatctagagccactcgattgtgcccgggggtttgctggtgatatcgtaggttattcggttgataccagtcacctcgttcgtgattcgggacgagatctttcggaggacggcaggagggaagtggaaccaatcggcagtcatgaagtcatcagtagcgaccgctcggagggcgatgacctgatcgtaagtcctcttatcaccggcaacaccaacagccttgacgggcaagagagcggcgaaagcctgcgagatctgatcgtacaagccggcggctcggatctcttcgatgtaaattgcgtcagccttctggagaagagcgacctggtcccgagtgacaggtccaagaattcgaatagcaagccccggtccagggaacgggtgtcgtccaaccaagtgctcggggatcttgaggagtcgtccaagggctcggacttcgtctggaaaagaaggggagtttccatagggacggccacgatcagccattgagctcacgaaaacagaagcagagaggaggaagagataaccaacccttgaaaagctctcggaggggctcgatcaacttcaacttcatgtcggccaagagaccaccaacgttgtggtgagtcttgatagtggccgagggacccttgaaactcagactctcaatgacatcagggaagagcgttccctgaagaagccactcaatctttcccttttcaccggcgtaaccggactcctcgaacgaggcctcaagctcggctgccttcttctcgaacacctcgatgaaggtgtttccaatgatctttcgctttcgctccggatcctcgacaccctccaatcgagacaagaataggtcggacgcgtcaaccactgtaaggttgacaccgaggtccttgttaagcatctcgtggacctgcttggcctcacctcctcgaagcactccgttgtcaaccatgatagcgtggaatcttgtgaaccgaaagtcggaaaaaggaagagaatagaatcgaaagcagactcgaatcgactcagtagatatacacacggatcgtcacatggacatgttgcaagacctaccgatctccgatggcctcgtgcatgagcttggcggcgacggaagagtcaactccaccagaaacagctccgatgacctgtcccttctctccacagatggctcggattcgctggatctccttctcaatgaaggtgtcctattgaaacgagaatgaaggtgaattttggtcaggtcagaagaacagatttgaaagaacagagtgagaagatgattcagacagaccatgttccagttggttcgggcctggcagacgccgacaacgaagttcttgatgacctccttacccataggcgagtgggtgacctcggcgtggaactgaattccatagatgggcttggactcgtgggcgatggcagcaaagggtgcggtaggggtcttggcgatagtcacaaagttgggagggcaggcggtgacctggtctccgtgggacatccaaacctgtttgtttgtttgtttgtttgtttgcgcagaagatacaaaagttcagagctggactttagtggtgttgtctaaagaaagtcgatagagtttatagtgaaagagaacgaacaggcatggactgggcaagtccctcgaagagagcatcagcggaagcgtgtccggtcttgacgacctcaatatcggcaacaccgtactctcgcttgttgtgggcggcgacggcctcctcaccaccgaaggtgtatgcgatttcctagaggttcacgtacaataagacgaccaaaccatcaatatgaattgacgtgcatgtgaatatatgagaatcaaatgggacgcacgtgaagaccgtagcagatacccatgacggggactccgaaggtgaacacctcgggatcaactcgaggagcatcggcctcgtaggcggagtaaggggatccagaaaggatgatacctggtatcgactataagtaagctctctgactcaatagaaaatatggaagagaagagaagagcgagcaacttacccttgggcttccagccgagctcagagatcttctgggtgcacggcaaaagctcacagtagatgttgaactctcggcatcgtcgagcaatcaggtgcgagtactgagagagagaattatgatgaaatagtcgatagccatgttgataacgaggaaggagagagataagtttgtatgaagaaaacgaaatcagtctcaagctgatgtttgctcaaccaaaatgtccaaaagagagtctagacacaaacctgcgatccaaaatcaaggatgaggatggtatcgtaggcggtgtgaatagctgtgatggaacagagatcatagaacgagagttttgggcttgagtcagtcttcgtacgatgggacgaaaggtgagtcaggctgagacttgagggtaacaatcagccctggcagtgtcggctgccctgaatgcgtgttcaccggattgccccggaaaacgtctaaatccagactctttcgagaaaataaagcagaacaacatactgagatcagacccaaggttgtccattgtgaaggagagagacagatgtacaagggaagggagctggaggatggggaaaagggtgtgggtgggatggttgtcggacgacggaaacgacggcaaaagaggcccaaaaaaattgtaaaattaaaaccaaaatcagacagataacgatgtttggttacatgtttagcctggtccggccgtaaccacactccgaccagagcgctatacgtccgcttccagagagcacacacaacaacgcatacacacatacattgagggtataaaattcatatcatagcagcatcttgttctctgaccatctctcagtgcgaggggagagggataacttccattttcgagccagaaagagaaagaaaagtcgttgggttacgagtgaattaagcggacgtctgttggttcttcttcaccctgactgcaatcacggtgatactgaatagatcaaacatgagagaaacacaaacactcgatgcatccgtcaatatcggagagcacagaaagataacaggagaggagaacccactcatccgtcttgcctcctctgaagttcaagccttccttggccgcagcgagtgtgaagggcgagaccttctcggtcgaacccatacagacctgaccatatgtcttcaagccatctgccaacttttgagcgacactcaattttttagatgcggtcactccaaacttgggcgatggcggaggagtctctatctgtgcttgcgctaagagaaggagaacctcggagttgtggacgttatcgcctagtccgtccgtctatgtcgggcccgtccggatccggagaagatcaaatagaaataaaccaagagcgtcggtataaccggtcttttttctttttctaatcttctcttccatcttgatgactccctatctgtctatctttcccctttcttccaatacctgaaacaaggagaaggagggaaagaacgtacaaacaaaatcacaacatctccatcttccaactgaacttcaaacaagtccgcgtccctaggaagatcagtgatgtttgtctcgtatcctcttcgatggggaacctttgctaactgcctcgggcagctaacagcgtgagaaatgaaggaacacaaaaccagatgcatgctaagcaaggaaagaaagaattgccatgcaaggcccgaatgagaagagaagcctcacttgaagtaatgctgttgtgctccaggcacatcaagaaactcattgttttttcggataacgaggtatcccgaatcacccaagctgagtcaagcaggagaggaggacaaaaagaaacaaagagcgaacggagaaagacatgaagcaatcatcagactggtgcgctaaaagatgtcaagaactctcttctgggaaaggacgtactttgcagatgttaacttgccgtccgacccatcgagctgcaatacacaagccgtagctgaacctttttgaatgaaaggcagaacccgcaatgtccaactctgttaacagctgcccagcacgcaaagatgagatcttgattatatgcaagacaacgataggcggacaaacccgctttgacctcggcatcaaccttaacgccatcataagccttctgaagaatatctttcggctgagccgatacatcaccctgagcggccttccaggcgtgatacatcagcgcttgagagaacacggatggatcgactccactctcggcccaaccacctactccgtctgctactgctaacgtcgtcaactgaatcgttcaatcgagccgatcaggacgcaagaaatcagtcccaacaaatccaatttacagatttccatcatgaaagaattacccgaaaatgatcagtctcaagacctatctctggtgcgaaaagcgggaatcactcttgaagataaaagaaagaatgaaacaaattaactggaaactaacctgatcggccggtctttcatgtatcatgaagaaatcctcacccgcatcctttttatcttttttgactctgacctcgccaaccttgcctgacgatgtctctccattgaactcagaactaccttccgtccagttgatcatccgctctctccattcacccttctcgccgcctgatgagatacctctgggtatttgctcgcctcgtcttctcggttttccagcgaacgaaaggccgatctcgaatgtgaagtttggcgagtctttcagagtccgtgcgggattgggtgaggttgaggagggtggaggagaggaaaagtaccggaagagaatagggagggaggtcagagttgatgatctggggaccgagaacgggaaaactaaaggtggtcgaaacattcttctctttctctttcgcttttccgagtcttgtctttatttgttccactggtatcccctcagatggtgaggtcgaaggttggatagtgatgtttgatcaaacgcgaaaggccgcatgaatttctgtacaggtcaactccgatagaaatgatgaaatctatttctatgatcaaccctaacattctttcgaggtattagaatcaacctataatgttcttttctcttcctcgctattcttcaagtgcaggcgaaacatgaggactgagcttgaaaagagaaatggccgttctataatttacggcaagttgtcaagaagcttcagctaccttttttttgttgagagaaagagaataataaagaggagagagaaaacgacaggcaggaaagagaggaaatgaaccaagggagaagaggaggcggggagggaaaggagatgaagggtatctgagcaaaaaggaaaccgactgcatctgtccctctttatgggttgatcttttagtgtgcgcgtcccctctaggaagaaggagacgggtaaaggaagtagggacgaagggagggaacaaaaagagtgagggagacaaaagggtcaagaaatgcagaagagcaaaaagagaaggaacaaaaaacgaaagaatcgtgactcgtgaaattaggatggggaaggaggagagagtaaagagctacatgcgaaagaaagacacagaaaacccccttggggctctcttgtcaatttagagatactgggccaactgggaagatctaatctttccgtcgagaccttcgacggtggtcaaatgcctgacgagagcgatgagctgttctctagtctctgtggtgatctcactctcgtgctcgctcgagagaacgtacacaaatacatgaagcaaccggtcgatgtggctcatcaggatgggaaggaccttggggtccgaagatgaaacctggaagagctggaagatgcactggaagacgattcggttctcgataaagtcattcttgaggggcaaagcctcaaacatgatcggaaggacctgatccagaggaacaacgtgcatatccttgcagatgattctggccaccgcaccagcagcgttatctctaccctgtccatgagcggagctttcaccctcggcctgggcgaacaacggtcggaggacggtcaacaatctgacggcatcgtcaaactgaagctgggcatccatgttctcaacaagaattccagcggcgaacgcagcgttcgatcggacctcggcctccacatcagacaaaccctgatagatgagctcgaatagagcaggcacgtaaggagtcacgctacccttcaggccagtgatgatctctcccaaagatccgacggccatcgatcgatcggatgacgatcgcttggcgttctgttcaattggttttcaacgatcgtattttatcagatactcattagcacggaacgaactgtgctttaagagaggatcgcaaaaccaaagactaacgtaaaacttcttgatgagaggaaggaactgtccaaagggctgagcgaaatcagctccaaggacactggcgagggcgccgacaatgtcactggcgttagagatcaacgcagactcgtactccgagctttccccttcgatagcatcttcctcatcctcatcaggatcctgctggcaaagggatttctcctgaaggatctcagaagcatacaaagcgatcttctcgacgtctgaaatgatagttggcaatcggttggtaagtaaagaaaaatgtacatttgtgcagagacgctttacgtacgtccttcaacaagtgcgggtccgcatttgttcatcgcctccgaaagctcattagcgcacatgataacgaccgtcctaaacaatcaccgacaatgaacaagaagcaaaggaaacaaagatgaaaaaaattccagtcagaaactcatgcaaaacgaataaggggatcgatagagaacgaaaaggtttttgattttgcatggaggttgccgatggtcaatttagacagaggagggaataagggggtttcagatacgcaaaaggtaatcaagttcatttctttggcttttcctaggagcctcgtagtgagctgagttgatatgatcatcatttggaataaggggggagggg

SEQ ID NO: 487 - DNA, 15117 bp, Xanthophyllomyces dendrorhous
gaggaagagagaaggagacagaacaacaagacttgacacgatcgagagaaaaactcacttgtcatcttcggcatcccacatgttgaagatagcgggaaggacaacatcaacgagctgcttgacgttggagtgaagcggcacggtctatatccccaaacaagacatccatccaagtcaattacgtgctcaagatgcataaaaaagaattgatgaaattactactcacgacgttcaatccgggggtccaaggggcaggctcggagagatcgtagaaggtgttgatgaacttgaacaagctggacaaggcagattttcggataccctcgtagtagtgatccaaaagcttgacaagcacagtgacggatcgttcaacgtagggcaagaaagcttgaccggtggcggcaaagacatcaccaatcgcatcagcagcgacctccttctcgatcgcgattccagagttgacaccgccaaagagcttctcgagctcgtctgcgtcgtcctcaatgtcaaggaactcggaatcgtcttcgtcatcgatagtgcccttagagtgaccgccatctgaggtgaaagcctcaatagcggcggcgacattgtccgaaatgtttccagtctcgttgaggtactcatcggtctcgctctgatcgcacgagctcaagagggactcgagcacgttgggcaagtagggcacaaactcttcttcgaacaccttggccatggtggcaaagaaaatgaaggagcattccctcaacctggggttatcgaggatgagaccctcgaaagccaacttgatgcatggctggaagtaaggtcggaagacatctttaccgacggcctcagcgatcgtaccgagagtatcggtggcaatacctcggagatcagtctcctcgccatcgttcttgagcgtcaagaaaggctgcatcctggtgatggtggcctcgaagtaagggatgaaacccgacttggatgcatgagcggctgagccgatcgctcctgtgactgtagttcggacgggaagaggcgcattttcgagaaggacgatcagtcgctccatgagcaaaggaaggtagtttgagatgtcgtctccgaggatctcgagatacgagtcgagagcagcgcaagcagacttctgggtagcagggtccgagatgtggttgaaaaggatggggacgatggcctcgtgcttgagtgcacattcttccggcaaccactcgcacaagcatccgagggcaatgcaggcggccttcttgaccttgggatcctggtcagcaagaccggcctcgataattggccagagctgggcaacgtggggtcgaatgaattcagagcaaccctcgacagtgacaccgagcgccatgagcgcagcctttcgggcggaagggtcggcggaagccatgtcagtctgaatgtgtctagagagagaggggaagatctgggtaggaggaagcgtctgagagagaacatccaaagttcggaaggcgagctaggagagaagacatacaaaacaaaaacaagtttaatggacagtcgtagtatatggggttcgataaaataaagatacatactcttgaaggagaatcctcatcggcatcctccgattcatcttctcgaccgatagggagcaacctggcgagaatatcgtcacccaagtttgcctgctggaccttcttggacttgtacttgatcgtccacaggagggcgttcaaagcgaggactctgatgtcatcatcgtacgactgggtctgaccaccagtaaggaagaagttgacaaggtcgggcacgttcttggagatcaatggagtttcctacagagggagaagtacgataagcgacaagagagtcagggtcagtacgagagcttttcggtaagagacagagacagaaaagctgagaaagacgaacaaggatgagaagagtctcgaaaacgtcgaacccagttcggcaggcatcctcattgccggattccatggcctggtggagaacgttgaccatagcaggaatcatagattggaaggcggcaatatcggccttgtcttcagtatcgatgtactcggcaacctttcccaaggccctatgggacagagtaaagagagaatgtacaggttagtgatgtcatgatcgcttccgacagagaatggtctcaaacgctgtgcatctcacttcaaggtagttatcctgacttcctcgctctcggcgtcacccaggctggttcggaagatagcgaacatggtggtcaattcgttttgaagacagtcagccacagtgtcgaggagagcgtagagcatgtatagaccaatctctcgatgtccggcaagcggagcggcggagagctggtagaggaaaggtaggagctcaggccactgaggaggggagagctcaagctcgtaagaggcgatggcggagatgaccctggaggccgagtgtcggacaagagtgctatagaagacaaaatcaggagttagctatagagagcaacaggatgtgagatgaagtcttagacgcacgtctcctccttaacaacggtctcgagggagttgtgcttgatctgtgttcggatgttttgaggaacttctttccacatctttccgtccttggcgaccactcgtttacgaagctcgacagctgccagttgccggatctgatggatagggagatgtaaccgaatgaaagagaagcaggaagggaagggggagggaaaagaagataaaaacaaccatcagaaattctttcaagagctcgtctgttcaaaggcaataaacctacgttcgacataggcgaggttgccatgatctcgtagagagcgggtatacattcggcgctcttatagaattgagtgttgagcgtttgggttgcctgtggatgggtgtatgcgtgtatgtttagaatatggaataaggaaaaaagaaagaaaagagaacgaatgtatatggtaaatggcaggcaggcgttgcaaaaaggaacgtttcatattcggcccggactactgacctgctggatgacgttggtatccggggcagaggtctgctccaacagggcgtgcaggttctgaacgaaagactggaagaaaaggcagtgacgacggtgataacagacatcgacgagacttgtttagcgaggaaagatcaagattgcggtgagttcttggtacacagttgaataaggacgaacggtcatttctaaatcgagaccagaggcagagaggagagaaaaacagagattgaaagtgtgaaggccgaaaggaaaaacggaacgagagacggtccgggtggtggcgtactgatgggagtaagcctaccgatgtgggtatgtaggagggttggaggtcaagagagaaagaacacaagtggcaacgtccaaaggcgagagaagggatcctcaactttcgaccgagtgaggagaaaaaaaagtaaaaaatgttgacaggttttttttcctctaggaacggggctgtaaccaagaagaagctgtgttgggccaaaaggatgcacgtgctgggtaagtgtgagataaaactgtcagggatgtgaccggagtgttacaccatggtaaccttctcctgcttctgtcgcttgtcctgctttcgtcgctcctcctgcttcgttattccttatgctttctcattgcatcatggtcttgcagcgcaagcgcttctagcaccctctgtgattcatcctcatatgcacaatcgttgaagtctgaggaggatataaaagacgggactcctttgccaaccatagtatagtctcccaagcctggatcctttgtcactcctctgttccctagtactcttgttcccagtgttatatcaatctggttcttccgatttctccgccttgcgccctcgtcacgactactagagccagagggcctgaacttccttcttgtcagccacatctcctagttggttacaaccatcgtaacctctccattacccctttgaaaccgaaccctgacaacagccgccacataagcacgtgagacaagagcatgtatgttccatctttcctgaaagacccgagagaaacgaggcaggaagcagctgatcgtcaacaagaccaatggatgacatgccggtgtcagtcaggctgtgctcttggtgaccggtgatgacgaccccgagggtgagaatgagagagatctgggtgtatgtgagtgagtatgcgcatatgtgcgctcggtgccttgggcctgtcgtctggtcttcccagggcactcttcaaccctgttctctgttcagtgtgtcaaggcacacacgcgcttactcactgacctactcacatacccagttgatcatctgatatcgttcctcttctctcatctctgtctttccggtatctttctcccgctcttattggactgaactctctctttgttgatctcatgctgtctttgctcacactgatctcacaccaaccttgatcgctaacctcactcatctacacacattctctctcttaccatctcatttatattcccgcttcctctctctctatcatactcttactcatacactcactcacactctgtccatcacgatggtatcgaccgtattctcttctaagcattttctcacaccatgttcacgctcagttcggtccatcagatccatgtccagaaaggtgggctgagcttctctcgccgtctcatggttcttgtctcgtccagattgttttcctcaggcctgactctctctccccacaatgccgcagatccttgtcaagaagatggaagaggctattccaattaaacgggaaaaggttgctgctctggtcagtttaatctctttgtgccttgtcccaatcgatatgctagtctcccatcgctaaccaatcggttacatccatccggatatctccgacggacttatcaccaaacttttacaacttcagaaaaagaaccatggctcactcgaactagagaccatcaagctcgatcatattctcaacggtggtagaggactcaccacattgctctgggaaggatcttccctcgatcctaacgaaggaatgtgagacaatcttacactttcctttctcttgctcatcttacctttcagaagttcacttcatttgaccttcaatcgttttcgtgttcatctctcttcgtatcctttctcttccgttacttgctcttcatccacttctcagccgattccgttctcgaacgctccccgagattctcaagacgctaccaaacccaagggcagagtcaatgttttggtatctgcttactggtgaagtgcccacaaaggacgaagccgttgggttctccaaagatctcgcgaagatctctggacttggcagagaggttgaaaacgtgatggataggtgaatctcgctctctttatttcgagcttactaccttgattaacgtgggtacttacaaacatgcttctttctccatttctccctatttcttctctctctcttccttttattttaactcctcctatcagtttacctcgggcgacccatccgatgacccaactgcagattggagtggccctcctcgccaaccagtctgctttctctcctctttacgcttcggaaaccccactcgcaaagtaggcactctctcttttctcttgattctcttcacaattaaaactcaacgcttacctctccacctcgttcccaactaggtcagagtattggcgatcaacattggacgactcacttgcgcttgtagcgaagctacccagtctggcagcaagaatctatcgaaatacatactttcctaatagagagctcgctcactctggcaaacaggccggtgatctaatccgtttgtacaatttccttctcaaggcactcatgtagtacccatgtccacagtaccgacgcctccagttcgatgtaaacagacagctacgcttcgaccatgaagtacatgatcagttcagacaaggacgcgccttgtcgatctgtaaccttcgaagaatatctcggcttgtatatgtgcgtcccctcttcaaagtccttacatcgtttctgcctcttcatggcccatctcagaagctcacgtgccttctaaacttcagcgcactccattcagaccacgaaggaggaaatgttagcggtcagtccctctatctcgcatcatttttcatcacttggtccgttcatcctcctttctctattgaaatcttctccgcatcaaaatagcacatgcgacgcaactcgttgggtctgctctggtcaacccctttacggcctattcgttagtctcctctctctcgactcgaattcatcacatagttcgaaacttttagggctgacgctgtagacaaacttgtcacctctagtgccggcgtggcaggtctatccggacccctgcacggacttgccaaccaaaacgtcctcaagtttattctccagatgcaagccaagctatctgcaaaccctacagaacaggatgagagtgacgagcaggccccgcccaaacaaatcaccgatgaagatgttaagacttatctatgggactacctcaagtctggtcgggttatccctgggtttgtgtcttctctgaaggacttctctatatacatggtttggctggttcctgtctaatctccacatgggactctttcttcttctttcatacagatatggccacgccgttctccggtcaactgacccccgattcaccgcgcttcaagactttacccagcggcacgccaaagaatttgagaacagcgaggttgtcaggctcgtcaaagtcctggcagaaatcactcctggagtgctcaaggagcacggaaagacgaaaaatccgaacccgaatgttgatgccacgtctggttgtttactccatcattacggtctcacccagatagactactacacgggtaggtcgttcctttctcacgtctccttctccctcttggccccatctgttcttgtgacagtaaaactaacatctttcatcgccttttcattgtactttctgtccatccttcccacagtcattttcggaatttccagaggtttgtgaaacttgttattcatcgctgtcacttttgatcattaagaagaactaatttcgaattcacgtcttgttcaaatctacctcagcaattggaacgtccgcccaacgtatgtctatgttctcttcttcctttataaaaaaaattgttctttcattcattcaattttgaccctgatattcttcacttcttcatctgtgtcttgcgtccggacagttgtttgggacagagcgcttggcctaccaatcgagcgacctaaatcaatcacactcgatggactcgaaagactcgctagagccaagctcgaaggcggggctgacgggcagtgaggaatacaggaaatctcatattctgatctttggtcttgatctgtacccagtcattcaggcagatggcatgcaagtccaaaagatgatttcccctttttctttctctatctgtcttccgtccccctcatcatacactatcctttctcagtctctcttccacaccccatcactttctcattttgctcctgcccctttgtattctctcgcatgtgtcttttttgtatttcattgcaagtctattcatgagttttctttgttaacgagtattgggttgtgcacactgttgtgaggcagtcacgtgacaacgcatcttcatgtggctgtgtcttcggcgttgagcgagccgggatgccgacgtgattcgcaagcgagttgtggcgaaagatggtctgtacaagaaacctcaaaagcaacgacaaagtctatcccattttctcttctctcttcatacacaactaccatcggataaagataaacctctactctttcaagcttctttctctggacagcacatattagctcgtccaaggatggcgctcgtaccgaaaggacgtcttcggactcctttgtctcttccgagaccaccaccattaccagtcccacccagatcaaatagatcgttttcctcagcccaattccgactcagagctcgattgaacattccttttaccgctagaccagcagctcagtcgacctcgggaggctcatcctctaagagccgctcgagtccactgtctgcgcttcagaacttggctaaatcattgtttggtaaggcacccaaaaggtttttcaactcgagcgccacttcgttcaataagaaagctttcggccacaaatggttgccatcggatatggcatcccgaatcagactcgccaacgcaagtccaacatttcatcccgtcgtttccggtctacgagctgggacgttcagaggtccaatgggtccgggagtcaagtatggcttcaaagtaggcggaggggtcgcacaggttgggttaggtagtgctaggggttacgcgacagcggcgagacctctgtttgagaatctattgggcaatgtgcctcgtgagtttttctctctctttaatcttgatagggcttagcgcgtttccgttgtttccatcgaactgatgtgtaccgtttttgtttctgggatcctttcgtaagtcgtcctccgagcgttgggcaattctctagaggatgaagccgagaaacttgcaaagaagagggctcatccaaggtccacccattttttcaagaagacggcttcctcttcttcttctggaacctcgtccctacttggccgaacttttaagatcgatctcgcacataagaaggctgttcagaagtccttcccagccggttctgttgctgttgaactcgaggaggaggtggtggtggagacagacggagaagagcttacggctagcctggaggaagagtttgatgcattctttggtccttccattatgcacatcttacctgctcctcgatcacccggaaagaagacaacactgtctatcccttttaatattgatgaatctatcgtcccggatcatcagacttcgctgtcccgtcttgccgctttccatcgagagtcttaccgtgcgcatgcagctcggattgatggtttgttgactgcacttgccgacaggggtgtcttcctagacgatcacgtccgggaggaaacgatcgttgatgagccaggaggagatatcactgggctgaaggtcgtctggctcgatagagacttggatgaagttcggtcgatcttgcgtcgagtaggagttgatgtggaaggaaccaatggtgaaaactcctggtggttcctcttgggttcggagagagattgtcggatgaacgatttggttgattcgagtttcgtctacccgactctgtccttcgctgcctcctctgtactcgtctcccaggcgaccgggcaacacatgtcgacggctgagaggtccgaacgagcgctaggatactcgaacgtctcatccggtatcagtttctccagcggtttcctcagtcaggtcgaggagagtgacatcgagtcggacgaggagactgacgatgagtggagtggaagtgagagcggatatggttcctttgtttctttctgagtcgctcttctttctcttttcttctttcttctctttgcttctgcccatttctcgtcttcttgccttttcgccttgtattttctgtgcttccgggatgttcctttccctgttggccttttcctctttcttctctctggttcacattctgtctcgatttctctacatctctgcgctactgctctcggcctgctctcatatatgattttacgactccatatggcaaagagagacgcatagcattatatgggatatttgtattttgattaaaacctacagcgcatcactctcatgtgattctcacatccccagtacttgtacctagcctgtcatacaacagagaacactagtactttcgatccatgacagtctgatggacgttgtcctcgcagtccttcagatccttgcttcccagcacgaccgacgaaagcgggggcggcgatgccagtaccttatttaagtagacagcgagcacagtaagtgaagacgagtcgctcgtccatggccaagcgactggtccttcttgatcaagggatgattccttgacgtgtcggtcgacggcctagttgagccctcgttcatatcccaaacagacagaacatacattgtcagcatgagcaatagacgacagcgcgagagtttgtagcatacactcacctcatcgatctctgtctttaagtgaagtactcctagctcaggtttgtcaggagatctctgtctgcctgttgcgcaagagtgagaaccggaagagagatgtagatgatacgggagacggtgagaacggcacatctgtttacgtatgaagctgggccggcggatctagagatggagagtgtttacttacacaaggtctattcaatatcggctcgacaatatcaaacgtcagggcgacttgatgcgtatgacaacgagcagagaggcatgaggaccacatccaagagccaaaacaacgtggtcggttgagatcctggtctaaaccgtgtagcgaccaagcagtacgaagactatagtcgatcgagagaaaacgtgaagatggatcgactcacacagactattgaccacatccttcatcatactctgagcctggacatcacttctgtcaacagcgcgttcaatttcttgctgcagcgcatcattcagtcctccttccgtgctcatgagcgggtcaaaaatcagctgcttccacttagtgtgtattatctgagatttagatgtgtcgatagaaccaatcatcagcgcctccacatttcggacaaaatcagaagatcaagaagagaatgtgtgacataatggcccatctggtatagaacaaatatacgtacttgattcaaatccaaaccattcaaatccgaagggagtcgggtcggaccgcaacatctatcaagaaatctgaacaatctcaagatgtagctcgtaatcttaatgaatgcagttcgttgttccaagtacgtccgaatcatatccgtccctgcgcacgtggagaagacctacatgtaaacaatgatgtcgcagaagagtagaacaacgtatgcgcgcataagggtgagtgccgagaacagcgtaagaccaaggtggaatctattaaattaaatacagtaacctaccggcttaacaattgtttccagatgattatcaaagaacttctgaaggtcttggtgcagctttatgtacattggtattggtcgcccatcgacaactagatgaagagagacaaaggagagtgaatatgcctacccggattgatgtagtgcggggatgttactgacaaagtaccgctgtcgagatagtgcacatgttgtgaatagcagtgtagctgtttatataatccttagtgttgatgggtctatagagagaagatacagtgagcgtggcagatgtgatagtgtgagtctcggacttgatgacgtcgtgggtactctcgcttacaaagttgagccgacttagaatatcaggagtctatagaggcaactgaccgttcatgcagaacatcgtccaaagtacgttccacataattccactgatccaaataaggcgctttgggactgtttgtacaccgatagaccgaagcaagttagatatcagtagaacggctgttgaacacctgtatctattttacgatcttcatccaagaccagcggtcttcatcaagctggatgagtagaggctttgcctaaagacgtagagtatgtagtgactcacgatggtgcagaatcgcgcgaagatttatcagtctcagaagacatcgcgaatgaaggtgtgttcgacatgagatgagatgagatgagatgagatgtggcagcgagaacacgatgaagatgagattggaagtttggggaatgcttgtgttctgacagtaagcgcctgccaagaagtattgaggcacgtggttttatgtcacgtggtcgcattaagcacagccacactactctttctatccctcaccacctccatcatcatcacccatcacccatcacccatcacgctcacccaccatcgccgtgacctcagctaccgcttacgatggaaacatctctgccaacagatagcacagtaaagtctgtgatagtagttctgggaagcataccgataggtttggctgttatacttctagtttggctagccaaggtttggattgtgcctgttccgacgagaccgacaaggaatgtcgtcttgcttgttttaggtgaccttgggttcgttctggtcttcctttccttctactttaatctctgatatacgtagctgacgctgaaagttcccattttgttttcgtatccgatcgaggtaggaggagtccaagaatgatgtatcatgccaaatcttttgcggaccatgggtttcagactactcttgttgggttttcaggtctgtctggtctcagtcatcaattgtacttatcacttccgacgagtttacattgatggtgatttattgaaatattcagagaaaggatcgaatatccttccctcactcctctcgttaccgaattttcaatcaattgtcctacccaatcctccaaagattctcactaaagcgccccggtcagctttcctggtagtcggtcctctaaaagtgctgtttcagttggtatcaatattggaagtcctgctttggaaactggaagatcctccagaattcatattcgttcaagtcagtctcgttgtctctggagcgcgtcgctttgctgattgagtgagttaatggtaactgatcgtcgatgacctctcatttcactcttgcgtgatgtatactatcatccgaaattcaaaagaacccaccgtcaatcccaacattagcaatcgctcagctagtttgtctcgtgagagggtccaagttgatcattgactggcataacttaggttactctattcttgcgctcaaattgggaccagatcataccctggtaaaaattgcaaaaatgtacgtctatcatactgttagtacggtgattatgatctagctgattaaatcgttcattcttgaactgttacgcgcgttaatggaaacggacgggtgaacggtaggttcgaacggatttttggaaagaacgcgtatgctcatcttttcgtaacaaaagccatgagggactgggcttgtaaagagtggaacctccagttcgttccagttcttcttctttcttcgtctatttatctcattataaattttagcaatgtttgtgttccttgttttaattataacgaaaattcaaaaaagaggaaaaaaagcagtacttcatgatcgaccaccggaacatttccattcttgtgatcccgctgagactcacgatgtaagtatgctctcgttgccgagtttttctcgatttaacgaatccaaagaagcacttttaacatctactcgagacttccccaaatagcttttcactcgtctgtttcctacgtttccatcgaacttgaaatcgttcctacctagtacatctctcccccggtcgacccctttgacagaccttcaatcgccatcgacgctctcaagaacatcagcttcctcttttgcttctgtcgaccctattcccgtgtttagaggggacagaccagctgtattgatttcatcaacttcttggacgccagatgaggatttctcaattttgctcgaagcgttgagcttatatgagcagactgctagagaggagggaaagggagaacgcaggttaccgaaagtggtcatggttatcagtggaaaaggacctgggagggcacagtttgaaaaagaagtcgcagaaagaaaggagagcgaaggatgggaattcgtcagagtctggtgttgttgggttcacgtagaggattatccaaagctgttaggtgtgttccacttttttccttctcttctttcaccatcgtacttttttccttctgtagaatactgatatagtgaacattttgagtcttcaggctcagcagatctaggaatttctcttcattcgagttcttcagcgcttgatcttccgatgaagattgtagacatgtttggctgtggtctccccgtgtgctcattgaattttgcctggtacgtcattagttttgcagcgctaattaagtttagtacttaatcatgttttttctcttcccctttaatcttcttctccttggggatgtggttagcctgagtgagctcgtgagagatggacagaacggatatgttttctcaacagcctccgagttggcttctcgtctatctgttagtcttttctctcgcttgtgctttcagtctatctattatctctatcttggcaaaacgagatacgtgagcgttgacggttgtcgaatgtcgagacgtgatttgatcatataggaactacttcgagattttccgagttcagcacagtcgactggcaggctctcagaattcagacaagttattcaaggggatcagcgcagattaggatcgtggtcttcaaactgggatcgcgtcgttcgagtaaatctttcgctttctcctctttcctgatctgttgtagactgttttggtttaattcgactatttgttttattgattcttgcgtgtgttgtttcctttggttgaaccgatcgtagccgctggtcattaaaggtactgctggaggtgtggaagtccttagtgaggcttgagcttaaacctgggcccaatatcgtctgtcttatgaggcaagaacttttttttaaagcaagatgaagcaatttgtacacaatcaatgtagtcatggctcttagcattcagtcgttccagtctatgttcttttttcgctatctttcctcagctcgctcgttttgatgaatgacagagtgatggtcttaacggatatccattcgttcaagctcctccctggccaactccatcagtctccaactgtcttcttcatcgtctacctcttcctcccttccattctcgtctatacctccaacctcgacttcgtcatcatcattcgtttcgtcggaggtgaagttcatcgatcgtccaccacgtgcgatttctgcgctcagatcggttctcatacctgaactgacgagagacgaggggactaaggaatctgaacctcctagtctcctacgaagcgcttctctggcttttattgaagcaggggatttgatgacatcgttaccactgacggcgatggtggtgttgtggtgcaatgaagaaggtcgagacgatgttggaacggaaggagaagaaggaggggacagtgtgggag

SEQ ID NO: 488 - DNA, 23382 bp, Xanthophyllomyces dendrorhous
gtgtgggaggaagaggaggggtgagaggggttgggtgttcgtaaatcgttagtgagggtatcttgtcgacgagaactctcggaggcgcaacgagtgtcggttgaggtatcgaagatgaagatgatggtgatgttgtccgttctgaaggccgggtctttgagacttcggctggttgagagggttcttcctggttcttcgattcttgatctaaagcttgatctctttcccttttcagtctttcttcgacctcttctaacagctcgatacccacggggtcatcgcccaattcgtccatacccctaccggcgctctcacctctgagcaacccacttcggatgacccactctgatttcttttcacatgtctctgagcaaaatccttccaaatcgtttcctgtctggacgatgatacgccttcccgcaggccctccagagatgatctttgatcgtgggacgacataagacctgtaagacttcttggacttgttgggacataatgggtaagcgcattggtcggatagatgccgttcatgaaggatggatcggtatgtttctaaatgaacatattgacactggatagcaaagtcgtcagaaatagtaagagagaacaaataacgctccagaagtgaggacgagctcatccaaagaggaagaaactaaaaagaaatgaggatgatagaagggcatacggcttgtttgaaggatgaccgatcaaccggttcatcctcgattagacgttctgtccagctgagagctattctttgtagttctgctttaccttccaggctctacacatgaatgatcaagatccatcgagcacagagaagctagcatatgtcagagtttatcgaaacatgaaacaaggttgatcgtccaggaggatgggatggttggattgacctgcctgagagattctttgtcggaccggactggtgggccatgatcatcggatgtagcaacaataaacgcgtccggttgtttgagtgtcctagtgggagtcggtctagatcttgatgaacgagatgacgaagacgaagctggaggaacacaagacggagtgatcggttgggtcgtcatcgttgggagggagaacgaaggaaggatgatggaatgaatttcggtttgttcgctttccaccatcaccgacgacatcaccaacaccgatagcagcatcgttcctcctctctcgggggtctgcatagagccgatatcatcagcagagtgtacaacactgacgaagctaatctctcaagatgaccagccgattgaaacgaaagctcaatgatctcgagccgacgtcgaacttgaacgaatcattctgcatggtccgtcctttcctttcctttctttcagaaatgatgatctttgatcacattgaatcaacttcttatatcaatgtttaagggtctttctatctctcttatctatgcttaacactttctcttctttgtttcttctggtatctgggatcgatagattggaacaccgctgcctgctttagcagacactaagaaggataagggagagttcgtacccgtgtggaaacaagaggtcggtgacggtagcttcctcttcttgttcttatcataaatcgttcatccttgactctgctcataccttgaagcatcgtgacctcgcccactgacatctctgaataaatctgcctacaggttcgagatgaacaaggtcgccgtcgtctccacggagccttcaccggtggcttctctgccggttactttaatactgtgggctcaaaagaaggctggacaccttcgacattcacatcgtcaagaaatcagagggcgcaacccactcaacgggcagaagactttatggatgaggaggacctggcggagctaagggaaggtcaaaagatagaaactaaatctgggtttggacttgatgaggtcgtctcatctgctgcagggtcgaagaaagagggagagtatgtatccatttgtctcttgcccgtccaacatgttcaaaaaatcagaacgatctaatgacttgtcttcgttccttttggtgcccactctatagtctttcctctttctttacgtctttgatccaaccttcctcttcgaatattggtgataccatccttaccaagctaggatggcgtccgggccaagggatagggcctcgaatcactgcccgggctcttcgtctagcagagcgcaaagagaatccgaatgctgtagttgatgatccagaagagggtgacgaagtaggtgaggactcggaggcaaaaaaacacctattcgcgcctagagatacaaagctgttgcttttcgatcaaaaagaaggatcggaaggacttggctggatcaaaggagacgggttgaaaaagacggatcatatggatcagaaagataactgtgagtcgcttttgatgtgcgcttaattccttcactcgtgcgatagtctctcatatgcgtgtcgccatctcatctggtctgcgttcagcccgctttgcttacgaggatgaagatgatgatgaagatctcatgcgattgggatctacatctactgtatgtttagcaacccttttttcttctatcttgctctattagactctcatctatagtagcgcttgactgattttcccttcgaacatgaaccaattaaattgaatgacgttacagcgctcgtcatatacatcctctcatccatcctttccaaccgccagctcatctaccgtctctacctggcacgatggtcgccctgccatccggggatttattgtcgcctcccagcccatcttggaggacaaatggttcgatccgcctgccatgcctgcaggctggacaccaaaaccaagtcgagtctggaatcgaggcagaaaatgggatgttacagtagtgggagcgactttacctgaggataaaggaaaaggaagggaagctatcagcggagaggatgcttggaagagaagacaggcgatgaccgctaatgatgtgagtgtatatcccttctttcatcttccctctacacgtgacatcatcatgtgaactcataaacttgttgttttctcagagaggtgtcgctctcggagagtctacagctcaaccctcagcaccttcctctaccgagccagttgtaccgaatgctgcgaaatctgtgtttgagtatctctctgccaaagaccgagagcgtctcgcctctctttcttcagcctctgcttcttcgttgaaaccaaacgcctccgaagctacatctgtagctcgaccatctgttcccattcttcctgctcttgatacacctaccgttgatgcagtaacggccaactctgcacttcacggctatatgccctttgtggacgatcctggaaaacaagctcgctatcgagcgtatctgtcttctcaatccactcaatcggatccaacaggcgtcctacaaccacagccaggtcaatctgcctcggctcattaccgagaactgtctgatttccagaaagcagcacagatgtttagaccgatgtcgttttcgatggccaacagatttacctcttcttcccaaccaatcatcgaaggaccttcggctaaagcaggtctatttgtcatgacacccgaagcgaaagcttcacttgcccaggcgaaagctgaacgagaagccgaagaagaagctgatcggtcgaaagtcaagattccggaaaacgagacacctgttcagcaagcagccaggatgggcatgtacggcccacttacaagaacgaccgcagagtttttcccggttaagctggtctgtaaacggtttggagtggcagatccaagacctgaaggaccaaaagattcgtcagatgcgggcgcgtttgttgagcctgggtcgaacggagcaggatcgagctcgggggctggggcgactccggtcgacccgaatgcatggcagacgcgattcacacatgtggtcgatgcagccgcagtaggctcagctgaagagaagaatgcaaaaccaaaggaagaggagcctagtgtgaatctagagattgagacccaggctagaccgtcgatggatatcttcaaggtatgcctttctctcttcctttcttcgttttacttgttcgttgtttgctctgcatggattgcccctaaaactgactccttctctctccgtcatatttaacaggcggttttcgcatctgacgccgaagactccgactctgattctgattctgaccttgcgcctcctccccctccatcacgccctactgcacccacgcactctgatcctacacaaccttccttccaaacgcaaacgcaatctgcccctgtccgatcgactcttccagctttaaccgattcaacagggttcaaacctacgttcacgtctaaacttgatcgtcagaccacctccactgcatcgacaaactctgatcctgttcgatcggggaaatctggaaagaacggaactgggaacgggaaaagcaaatcaaagtcgaaacggaaagcggttctctcattcatggatggtgaagaagaggaagacgaaacgggagaggagaacaaggaagaacgggagagagaaaggaaagcgaggagagaagaaaggaagagaaaacgggcggaggaggatagattagcagcagccgtcgatccagcggcgggagatgaagaagaagaggtttgggtagaaaagcctagtgaggcagtcagacttggagggggagcttcgggaactgttgggaagagacagaaagctttggatttcatgtagttctcgtcgttctttcctttctgttcttatcgacaacttctcttactctgcctgtcttctaggtgctgagaataggtgcaagtgctgctggccgagagagagaaggtctgattaacctcagtagtccagtaaattgtaaaagtgcagttgtttagatcatgatctgatacctcaaaggtggacgatatcagctatcacccgtacgacaaaattatcctttgcttcgagctcggcattctaagcccaatctttgtcacgtcatcagatgaagctcttatcaaaccccatcttgagagttcatatttaagtctcagaggctcacgaacaaccgtcaaacgtcgctctcttgttgtggtttgcgcaatctgcagctcctttccatgttgtcttcaactgtgactaaccctcctcttgattggccgtttgttgacccaattccttatgttcttctcaaattgatgactcaacccaagtcggtcttattgtgaacacaagaagtgaagggttgatgaatgaggagtgaaacgtgaagtgaaaaattgaaaaatgtataaccccagtctctccatctcaatccatgctacacactacacatctcctacccaaccatcaactgatctttaagaaggcgaaccaatgatgatcctgccaaatacctctgagatcgtttgaaaggaggacgtatatttagagctcctcagggtcgtaccaaccgaggtgcttgttggtctttcggctatataccaccatcagtatcatcagagggccgagaaagcgacgcgagagaagtaaatggatgatgaaagctttgtcagagatagatctcaaatcggtctccacatgaagacaaacaaatgacaaagagaggaaggacgtacagctggtactctataaagacgcggtatcaaatatgattccagattgagtgcgaaccgaaatgatcaacgatcagtaagacattcacctatcaaacccatctctacatgtcctcgatgtcctacacatcatacagtgaaaacagaaggatgacatacgagaaacgatgaaggggagagcaaaccagaatctatgttatctcagttcggaaaaatggagaaagaccagtcaatatcaacccgaaaagtaactcctgtctatgcagccgtggagcaacagaaagaacggttagtaacagaagaagacaaaacatacccgcaagttccgaggagaaggaactggaaagtcttgggcttcctggaagcgaaagtggaccaaggagtagcctgtttaggttcgaattaagaagaggcgaggattaattacgagctttgactgagaaaacacgtcaattctctctatcaccctctctcagcaaggaggaaaaaagaggatcggatcggaaagacaaggatgacgatccacagatgaaccagagaacgagcacagagtaggagctcatgtactgatatatctgtaatcttttgtcgcttccgaacttcagaagaggagaaaggaaagaaaaaaacgtacagtgctatttcaagataggccgcagaatagtccgatcaagtcaagaagcaaaggaaaaagggcattttgttagcaatccttctccatgatgatcagtgcttagttcgttctcctcttgtatgatccatggagccaaaaagatatgcgaagaagacataggagtgaaaggagaaaagtacgaatcacaatcgaagaaaaaaaaaaagagaagaaacaagagaaagagagaaaattaacgtacgtagcaacgttctcaaagtgaagggatcgaagtccaatctgggagacagaggggacaggggcccttcgggcagcagttcggaggagagcagacattgcaaggatgatcaagatcgatggtacaaggatagatagaaggtagaagtaaacgtttaggagagagtttgagagaaggaggaggaagactggttacggtgatccgagcagatggttacgtgatgcttaggtaatcattcgagggcagtcaccgttgttcacacccgtctcagtataagatgtttctgtttagacatgctttgtgcgcattcattatatatcgtagtatccagttctagttcctccagctcacaaggacttcatcggtcctgaaccgctgagtggtggtcgtctgctcgagtggcgtggtctggcccattcggtactgaagtaatccggcctgagcaatcatgattccattgtcgatacagaacctgcgtttccacaaggcaagaaggtcagaccgagattcagtaaatgagaaaagagacgctgaagagagaaaaataagaagaagcgtaccgttcgtccgtagcatagagtttgccgccacgttcggaagccattatacccatcatctcttgcaatcgtttgttgcctacacacacaaagaagagaagaagagaaaccgcgtgagtatcacaaaggcaagtacattccttccttcaatcaaaggatagagatactgacatccaacaccaccaacaatgagcacctctccaccttttcctcctacatgagccaaagcccgctcggtgatctcgaccaacatcccgaacacgcattcctgcaaactgaagcatagatcccctactgtgatctctccctcgtcaatcgactggccagtatacgaaggagcttggttgagcgccttgagggtcgacatgtttggttttgtcgtcggggtgaatgacgaatctgacgtgagcggaacaaagtttggaagaagtgtgtaggcttcgacggcagtcaaaattccggacagtgtaagatccattcctttggtcgagtacggcaacggcacgagtcggtttcctctgcggcgagcggtgtatagatggataagagtacaaagatcaacacttattcatcacaatggttgaacggtatgattgcagcttacttcttggcctccttttcgatattgaaccctgggtttggatcattagataaaccgacagttcttgcaaatcggtccaggcagtttcctacagcgatatcgagcgtctcgccgaagattcgatagcgttgttgagagtacgcgatcacctgggtatttccacccgacacataaagaacaattgggttcggagacgaggtgatgaaccgagcgatttcaatatctggtttcacatgtagaaagagggaaataagtgactaaagagagacatggcagagtaacaagagtggacaaacgggcgacacagtggttgacacctataagcggaatgttatgcataagcgataacgttcttgccaccaaagagaacacctgtaatgggcctcccattcctgggcctacagatgagtcaaagaggcatgtgagttcggaagctctgtcttgcacacttggacgaaagttgattgaccttttgtataagcaatcacatcgacgtccttccatccgactccagcgccgaccatggcgtccctaacaacactgacagcccattgtctatgatgtttggcggtgtcagtcggaaggaacccttctcctggtggtgtgatataggtgtgtctaacattggaaagtactgtggtttgaccagaaggatgatggaggataagaccggcgcctagtttgttggctgagccttccaatcccagacagatcaacggtttggctaaagagaagaactatgttagattggatcataccatcgaaatcagcagcatcatcacaccatatactcactgagaggaggaagaggattctttcttgatcgtttctttgttgtagcaaccatggttgacggtgggatgagtgagctaggacgaggatcagaaggtgagaaagtgaggatgaaatgaaacgcttacgtaaggaaaagatatcgtcagcgtccctccgagaaaaagaacaggagctctatcgccaacactcactcgtctttgagacatacacacttacttcgtttatcctcccttcttctttctagaaggatatcgacgatgctgttcgaacgaagtagaggcctcttcaggctgtgagtttgacctgttcttagtgttgagtttttttgtcgagaaacccgttcattaaccgtatcgcctctcccacgtcattatttctcaatcgttactcgtcaacccctacaggctcagagacatgatccttccttctcccaaaaggaagtctatcatcatcattcctggtcctgcagatccagaaatggtgaacgtccatcgagttggatcgggcaaagagatagagtcgattagtgttcatgacgttcgtgccctcgcctactcctgttcctctactgactgcctgctctcttcacatgcgccgcttctttccaaaaggctgatcataatcaattcgttctgctctccttcatccttcaattcgtctcataagtggatcagagattcttgtccctctcttagaggaattttcaaaccctcttggtggctctggagtttgtacccgtttagctccttttgttagctgacgctcatggactaatagttgaattcactgttcatttgaactttctcccttctcaaaggtggcgatcttcaaacaatttacaacgtcctaggaaacttcacacttattgatccagtgacttactcccggactcttcttgaaactgttgataatggtacactcggtctcgactttgtcgtcaactcgttcacgccagctgaagacacccccgtactcatcatcgcccacggactcaccggaggatcgtacgaaagttatgtgaggaatgtcatggctcatgctacgaaagataaggtacttggtggtctgggtctcagaggtgtagtcgtcaacgtaagaactttgctctcattcttgaacatgtgtggctggtagctgactttgacgtttgggaaagctagttcaggggatgcgctgatgttcctgtcacatccgctcagctctattcggccggatataccgatggtctgtagtgttctcttgattgggattcatcttcgccattccttccttcttctgatcatgtcctgccgatatctcaaacagacttccgaacggccgtattgcacatctctcagaaatatcccaacgcacctctattgggctgtggattctctcttggagctggtgtactcgctcgattcgttgccgaggagggcgcgcattgtatcttgaaatctgccaccgtcgtcagcgcaccttgggagtgagctcttccttctactctctgcccgcacaaagacctcaattaagccgtttgttatttattatcgtttctccttatttagctgccctgggatgtctgccagactcgacgccacattcttctcccgacaggtctactctcgatcgatgggtaccaacattctcaatatctttaacaaaattattaaatctcccgcttcggcagagattttcgctcatccagaatctaggattgcccgtcatatcgcttttatcaaaaagatgtggagaccaacattgagagagacagatgaggtggtcgtcagtaccgtaggaggtagcccggaatgtttccctttccctaatgccgaggcatattatcaggttcgttttctttgtattaaatcgctcagctggatgtgacgctgacaagaatccgttgctgcttccgaagtgggcgagtcctcaaaataaacttcatcagattgctatgtgcgtctcttcttcgcttctcctccatcatgtgtatctctgtcttctttttctctcggtactgattcttacgctaccaaacagtccgacattgtgtatcagcgcattcgatgatcctatcattccgggtgatatgcttccgatcgaaaaattttcaaaatcctcgcatgctgttctagccgttatcggcggtggtggtcatctaggatggttcgagaacggattccctctattctctccgccagatagatggctgcacaaaccgatctctgaattccttcttgcctcttctgaacttgtctcctcttcctcctcctcttcttcgtcatcatcctccgacgacgagagggagctgaaatacatctcagagggaaagtacgtcgggttcaagattaaggagcaggatgaaggaggaggaccatttaagtgggtcgccaagaagagggtctttgtagatgtttagcttgactttcttccttccctccttcctccctccttgttcgtgatgggttgttgaattggaatgaatagaaataggtgtttccgtgatagatgctgttctgtatctgtttgtttttttttccttttttaagatgactacagttacaccaatcattcactccgttgaccagcgaataagggggagagacaggaactcattcagattggcattccttgtcacatcaacatcaacatcaacatcaacatgacctttacattgattctctgcaaagctgccaaagaaggagacggcgtccagatccgcgatggccgctccaagcaagataccattaaatctcgtcacagcatggcaaattacatcccgagcgtcccccatacatgctctcccattccagtttgatttccgatgcagaagagcagatgggaagactttgagaaagacgaaacgaaacagatgcatcagcaaaaggcaagaaaaaaagacgagagtaagcgtgtgtgcggaggtcaaccaagcgataagcgagtgggtgaacgaggagcgagagtaaaggaaaagagcaaggcagaagggaaagagaagggcagaacaactaagctgatgtctgttttattagagaataatctaccgagagaaaatcgatgggtacaagatctaagggatttgaaagattataaacgcgccaggaacgataagcagagtgaattggtacagaaggcaacagtcaatcaaatcggttagaccgggatgttgggtttgagaacgtcgttgtttggatgtcggaacgaatgttctcggactaagtcatgattgtaatccatatgaaagagaggaaagaggttagtggacgagtatgagaaacctgtgaaatagatagacagatagaaacatgactcacgtgaatctatagtatcaacgttgcaaaaggcaagcagcagagacagacaagcaagagaaaggtagactcagtatcttgactcagaagtgagcaatcagacgaaaatagatgactcttgtcttcgagcttgctatacgagatttgtagagggaagaggagaaagaaatcaaaactgactataatgtgctccaagaccatacatcctgaaagttacaaaccataccaagccaatcaagagggtcaatccattatttttttcctcaataaggtaagcaagaagagggaaaacaaacttggtatggaagctgattttgactgatcgggttgctctcgcctcggaaacagtgatcgttccacttccctctggtccaggcgcatgagcgacgatagttggaggaccttgttgaatcacatggatagggatgttgtaatgcctcgagagcgccaagatctgtccagtccaagtagtcacacacaaataagaaaggattaaggaaacggaatgagtgtttgaaaaagaaagaaacgagaaagaggcaaaaaacaaacctcaggctcgcctccccaatctccgctctctctaactcggtcggtgtactcctttagtccagccgcgtccaacattccgtcgtctagtgcgcctgcagtatcctctcctccggcagcagcaaggaaaggaataaagtcgtctgggtgggaagcgatatagtctgctgcggcgtgtctggtagtctggtacaagttctgaagatgacatacacctcaaaggaagtcattacttcctctgactctgcaagcgagatacgtagaaggacaggaagagagacgaactgctttgggtgatattaatccaaggatggccaactgatccgcaatcgcgctgtacatacactattatccgattgaagattgatccagacgattagagttctaatcagtggttccaaaacataatggtaattgtggggcgtacatgtccatctggggagatctgaattcacatgagtacgtagcataagtacccgttgtcctcaaagatcctcgcgtcgcgcgcccaatcaccacgaaagaaggagaaggaaaagaggggcacccacttcatgacactccaactttagctccgcacacgtctttgtgagtgagtccttctcgagtagcttctctctagtgatcctagcatcctcctcctcgttcggagggggcagcgaagcttcgaacgcggcttgctttcgtgcctgtcggttgttgataaaaagccggagcatcaccgcgccaaacccagaacagaccccaaaaaggacagatgctggtgagttctctcgtgaagcaaaagcaaattccgacgcaatcaagaaagatagctcaaaaatatacaagagagcgaaggaaggagaagaaagaagaagaaagaaagaaagaaagaaagaaagaataacgaacttctcgttctttgaaccgatctctgcttgatcccttcttctgtccgccaaggttcgcatgcgcctggtccaacagagcctcctgttggtcaaccaccatctgtctatcctccatctttttcaattcctcttcctccgcctgagcctgagcttgagctttagcatcctcttgagcttgttcggcagctaacttccgtagatcttcttcttcttgctcacgttcgattcgttcttgttcggcaatctcggcaggatcaagttggtatatcggggctgatgtctttggtgatccggagggggagaagcaatcctggactttctttttgaacgacttcttacccatcgttgatatgtgctcagtaatgagtaaggatagccaggtgaaaggttatgaagatggatgatgaatggatgatgatgatgatgatgatgaggatgatgaggatgatgaggatgacaaaacccctctataaaaaaaaataaacagatgccgccgagtggttacggacggatggtaactggcaagcggcatcagtacaacctttaagaaacatatacatgattcaatcaaacctcaatgaaaggagaagaggatggatggatggagagagtgtagagggctaaaggatcagaaactataagtatagagaaggaaggatacgcagacgcagacggaggaagttgataataaagacaaaaaagagtgagattatcaacggaccgacactttatatagacaaaagaacacaaccgtcgaggcaagacaaacgccagacgtggagaatagacacgtacaaaaagaagtgaacgaaaacaaacagaaaagaatggaagggtacaactctggagaagaatagcgcggaagttcttgttctcgcgtttacaatagacagaagggagagagaaatttatgagatgacacagataagagaaagactgtacaatgagcaacaagcggaaaactaagagacatccaactaggacgacagattgttcagagaataacacaaaaaagcaaaagagagaaaaggaagggaaaaaatgattgaatgatcaagcatgaggaggagaaactgtcgggtcgccaatgatggcgactagaaccgagatgtctaaaaaaacaagtatatccactgtctgtcagttcatatttcttccagagaggaaaagaaaaagagcacacgaaccatcttccttcccaccccagaacttcaatccacatacactggcctttacgccgaacggcgaatttatgtctcttcctctccaggttccatttccgattcccgccccatctacaccgacatccaaacctggacttggtatctcgaatcgctcgttacctagtcctcctgtacctccttcgccgacgaacgaagaagtctcttgcttcggaccgtagggcgtgcctcttgaagccgacatcgctttcgctctcgaacagagagcttcagagattcgctgaggagagatcggaggtcgttgattaggctggtgaggaagagaagagggagaaggtgaggaaggtgtagaaggtgatgagctaggtgatccggtgttatcgctagcaccgttaccggtccccgtcgtcgaagaggatgccggcgaagaaggtgttgacgaatgggcagacgtcgatgttgaagacaaagacgaggaagaaggcgtgctactcgatgatacagacggaggagagaacgaagcaatctcttccaaaatttcctcatcatactttgtaaaagaagggacgatataaagtcaaattacatctcttcactggcatttctcagagccattcgctcttcgaacttacgagattatcaaccaagccatccgtacagagcaacacaacatcgtccttggcaaccttgacggtatagctctttgcatctttgatgggagtctcttttgagttggttcctagttggaatgggtagttgaactgatacaatccccatgaaacattcaatcaagggtcagtcagtgcatcaaaagagagtggacatgagaagaagacgaagaaggaatcgaagcgtacagcatgctgcatctcttctgtcctgaacaccatccgaccctctctgataacccaaagcgaacagtcgccgacgttggctaccctgagttcttcacctttgagaacggcgaggagagcggtgctggagcctacgaagccttctcgagcggcttgttcaagtgtacgttcgtacccggcttgcatgattcctaccgggtcgggtgccgactgagagagaatcgtctgaagcgtcgacgaaggtggaagcaaggaagcgatatgggacatcagcaatgctgagaagcggcctgtaagaagatagaggaccgaggcacacgacatcgttagtagcctgcaagagggagggaacggagaaaaggagatggcatcaacgaaaggaggaaggaagacagaacaacactgacctggattggcccctttgattcctttgcggctccaaccacctactccatctgcaatccccaacgcctgaacaccaccgacgaccggaccggccgaggttttaacaaaatacgcgtcctcgcccaccctgacgctttcactctcgccctcgctgttccatccggcggaggaggacgagccggtgtaggaatggccgtgtggatggctgccgtctggaaggccaggtccgatggagaaaggagtgcttgctttatgaatatcccgagtgagtccaccggtggtggttttggggattccaaacgctcctgcatcaaagaccaagcgtcgcctcctgaggccagccgagacgtctgaggaagagccgagacctatggaccctggattctcaactagggaccagatctcgagcgcgcttggtgagtaagcgggtgaggcgttcgccggatatgtcgatgtaggatcgaacgaggaaagaagggacgaaggcgagcccgaagagggcggtgatgatcgaggatgtttatttccggcgtgcgagggggacgaggcggatgtgctgtttgaagaagggggcgaggtcaccgggttgccggtagaagaaaaggttgaaaactcgaagaacgagagcgaaggaggactgttcgaagacgggccgggaagagaagaaggaagtggagaagaagaaggcggaggggacggagcagtcgagggatgacaatgggttagggatggttggggacctgcctgtccggcagcatgattaacggttgcgtttgattgatagaccacctggagtccacctctggaacttggtgaggatgacaaggtcgatgttggtacagcgtttgcagatgaagaggatgaagtagaagaagacgaaggagaagaagacgaggaagaagaattcgtgagagacaacgagctaagagaaggaggattggaagatgctgatgacgatggcgaggaagacgctaactgagtcgacaggggccgtctaggggatgtccttgttgacctggctgcatgtctctggagctgaacgagcgaacgggaagatacgttgatgagtttttttgatgaaggattctgtgcgagcgacatcggtggtgaatgcttgaggtccttccgtcgtcgtcgtcgtcgtcgtcgatgatgatggtggtggttgaaggttgagggttgagggctcacgatgatcgaccgttgtccgaaacgatggaaagtagacagagagcaaagtggccgaaaacgggagatttattttctttatagtttcttttcggatgtctctcttgtattctgatgggtatatgcaccctttttctgtatccctgtagatgatattcatcgtgtgtacacatcagcatgttctctttgacatgctgtctgagctgttcaacgggagccaagcactggtggatgggaacatcttccagctgacgatgtgtctccagctgacaagggtctcagtgatgggactacaaaagttctatagtcgcctattaggccgggtttctaatcaatcgaccgtcagcattcattaggatacatctgtagtgtttgattagaaaacttttctaatacaactaggcacactcacatctctttcttccttcgttccctttccgctcacatctcttactctgccatccactaacccgatctttcttatcgctttcttacagccatgtcgttcgttctgaatctattttttccaggcagtttatcatatgtgtgtggctaacgttccgctgtgtcgttctttctatacaggctttgtcctccttacgcacctttcctcggtttcggtggtgtggctagtgcggtaagtctctttcctcggagcgactctttcctacatgttttctgagcttgctccaatgaaaactatcgtctactgaaaactcacggtcttctggtgaacacacttccttactgtctaccagatggtacttagcagtacgtctccgtcgggtttctttgtctggtctggctttatctccaccgatgatcttgtgtatctgatgtgtttcctcgttgtatacgcaacactcggtctttcctccttcttattcttcagccgttggagctgcctacggaacatccaagagtggaattggaatcgctggtctgggaacgtttcgaccggacctcatcatgaagagtcttattccaggtttgtccttatgttaaaaggagcctgtctcaatctctgccctcttcaaccttttcctgatcactcttgagccctctctctcatttcgctctcccttcagtcgtcatgtccgggatcatcgccgtttatggcttggtggtgtccgtattgatcgcaggaactcttgctccaaacaccgggtattctctctttgcaggctttgtccatctcgcggctggtctggcgtgtggaatgacggggctcgcggctggatacgcgatcggaatcgtaggagatgccgtgcgtaatggtgtccttttctttctttctcttttttcggagagaaagagcacgaagctgagctttgatcgttttgatcttagtgtgtccgaacatatgtctatgagtccaaagtattcgtcaccatggtcctcatcctcattttcgcgtacgtttccctctcgtttctgtccaccccgctctctctgtgatattctaggacagagttctgatctggccagatatgtcgttcctttctgcgttggggcccgttctttgtctctctcttgcatcctacagcgaggttataggtctttacggtttgatcgtctcgcttctgctcaacaccgctgtgggagagttcaaggtgaggagtcggtcttcataaagagaatattgtcttgtgtgcggaatcaatcatcgtgctgatgaattcacctgtcttgtctttctgttgaaccggtccggtctgtcttatcggtggattgtgaacagtgctcttactaggatctatatatataatctgttctttgattctttctttctctcggttgttcatcccatcgtcaattcacaaggaaaggaagagagaatgtgattgtatatcggtctttagacaaggaaagccgtgaaagggatgacgcagagcgacggtatcagaagagacaagaatcagagagacagaggattacatctgttccatggtatccattcaggagaaagagaaagaaaaaaaggcagacgacaaggtggagaatctattgtcttttttatttatttattcatttagtcattcattcctctgttcattctggagactcctcaggttgtgttcttcttccgacgttttgaggcttgtttgtctgacgaattgcatgccgatgtcgatgtcggtgtcgatttcgttaatgatgatgatgatgtctttggtgccgatgacttctttgatgatgttgttgttgatgatgaagatgatactgatgctggggtggatgcggaagagtcgacggccgttgctttagccacaggtgcagatggagaatcgtcgtatcctgaatggtttgaagaagagaaaactacccgatcatgtactgtctgtcgggaaaggagagggaagaagactgaaaatggagactgacctgcgaaagcgtcgactctcggtcgttttgatttctttcctcccttcttatcgtccccgccgacaacctctatctcgacctccttctccacctctttctcggccttaacctcgtcgtcatcgtcgtcgtcgtcaccatctttttctcgaagcgcggcctcttggtgtttcaatatgttgaaccgggtttgcatcccgatttccataggctcctgtccggcagaagaggacgaagctcgctgcgcctgtgtctgggactgaagagccgatttgatgaatctcgaagctgcctgtctatcaagctcgaatctacctgtttgacactcggattcaaggatcgtcgcaagtcagccgaatgaatcctttcaaaaccgacacgataccacacacgacgcgacaatcaaagaagaacgaacgtttctccgggttctccgcgttcttcaccttggcgaaatacgacttgatccgctcgagttccgggatgaccgggtgagactccgggtcgatcccctttgtacgaaggtagactgggttagggaggcgagtggaaaagaggagataattctcgtcaggtctgagtttcatcttgagggccttctaagtgttcgtcgaaggtaaagcaaagaaaaagagacaaactccaaattaaatcgagaaggacataaacaatgttgaccagaagcttggccttatccatctctgtcgacatctgcgcgagcgtctccttgagcggtctcgccaacaacggattcataaactcggagtcgaacgcggatagggaagaagcgagctcgtcgatcgtggtcgacaaagcctctgtctcatcttcagactcagactcgtattcggaagaggacggcatgttgggcgggtaaatgcagatgtggatatgctctaaacaacaggggagtcggaagagagaacgcagggtgactattgatgttgagaggatcctacttgaagagagaaccaaagagccacaggtaaatctttatgttgacgactctggttaatcacccctccgacctgttagggttaatccacggccgaaatcgtccccttccaacacagcccaggcaacctttgttcttgtaggatagcgagtgatctctctgcgctaggctttgcatatggtttacgtctgagcgctactctgtttgcagattcttggagtgatcagagatccttgggtagatggtgggcaagaggacggactgtacacccaccaacatgggtttcacctctccggaacaggaaaggaatgcgcagcacacgtcgttcgcttacggtcaaagtattggtccatggtcgcaacagaagaaagaggagacgagagacaaaaggaagagacataaagaaggagctggagctcgcgaggatcagagcgttcacccgtgcttcctctttctctcgagagacaaacacgggcttggatgatgtaaagagagaaggagtgaatgagataaactctgctttaacaatctaaaactatgacagatgtaactccagcgcaatctccgttgcacaaacaacctcagcggacgctatcgacagcaagaacacgagaaacaaccttcaacacggcgagcccaaggatgctgatgaggcaaagaaagcaggtgaggaaggaagagtgccactgctaggctagcttacctaagtatcttaaggtgatataaatgaaatatcaacctgaccgacccttgcgaagcatcaacgcccaacgggggggagaaaaaatctgtcgattttctcacgctggattttctagtttttcgctttttgttccccaagcagtcaagatgttcgtcgtgtttctgttacttttgtcctgtttgcctgtctttctctttccttgttcttcgtctctccaggctccgtcagcggatctattcgaaaccggtgcttttcacgaagaaaaaggaaggaagagagtgggttagaaggaaagagagaagaaaggatgagaaacacacgacataatcccacgattcccacggacgccacgctcatgtggtttagttgagttgcacgccaggtcggaaacggagggacaagagaagagctagagcgagaaaactggaggaaagtttgtctgcagcggtcaaggatggagacagtgaaccgtgacgaggctcaaagggactactcgtaaaaaagcaccgattcgatagatccactcgacagcccttccttccagcatcttttctggcacccattcttcacacacatccctccagagaaagacggcagactagcagagaacaagcctgctgacaaaaaaaaacaaatctgttgttcgttatggtatctttcgtgtcggaatgcgattttttgtcttgttttcaggtctttcgtcgctcccgaggcccacgtccagttccagcacattcttcgtctcctcaacaccaacgttgatggtcgacgaaagatcatgtacgccttgaccgagatcaagggagttggtcgacgatacgccaacatcgtctgcaagaaggccgatgttgacctcaagaagcggttcgttttagatcgtctgatttagggggtagatcctggggatatgtgtgcgtgtgttggagagaacgatgtttgctgacggaatccgcttctatcctttcttttctccgatttcacaatctttcactccgattctcaattctctgccttccatccacccaatccgtcaccctttgccactttcccctattttgttgataatcccgattgactcctaatctagagccggagagctcaactctgatgagctcgagcgaattgtcaccatcatgcagaaccctgctcagttcaagatccccgcttggttcgttaaccgacagcgagatgtcaccgatggaaaggacatgcacgttgtttccaacggtatcgaccagaagatgcgagaggatctcgagcgactcaagaagatccgatcccaccgaggtctccgagtacgttcaggcttgttgctatgtagtgttgctaccgatgggtccctttcttctctttcctaacgattctcattccttttctccttttccgccgatcttatagcacttgtggcagctccgagtcaagggtcagcacaccaagaccaccggtcgacgtggaaagaccgttgccgccaagaagaagtaaattgggaaagatctcccccaaaaaaccttctaccttgctctttttccctccccccgtcgagagtggcactctatcgatgcatgtcacaccattttcctttcctttctttgttatctttttctgcaaagtacacgatagagattcaggaagtttggggctcgaggcgacaatggatgacacagacagagtaaagaaaaaaagagagagaaaaaaagacaagggcagaggagaacgagagaggtgtttctgactgactgactgactgacctacctgggtgagcgactgttgtctgttgccatgactgatatctctttcgaaagacggctatccgatccttccgagctaactaagatgacccggcacgaagctttccgatcgaccgaccggactggcttactgatcgtgtcgttcactcaaggcttctgggtcggctacccatggatgactcatggacaatgtgttgtctcaagccagctagatattctttgttctttctttccttcgatgagtccctccggtgaaaggtaagagaagaagataacggatggaggagacatgatcatctatatgtcatcgtcgatagtaatcagcggatctctttgagggatgatggtcgtgatgacgatacgaccataggtattaaaagagcagcagcaacaacaacgacaacaacaacgacaacaacgacaacaacgacactatacagaacaagattgagtgtacagtcaaggcagtccttctctcgttcaagaacgagcacgtgaggaaagatacacaaaaggactggtattcgtttgcttcctacgaacggccgagaggatctcagaaggaaagaagaaaaaagtaatgggtttctatgtgtacgatcgtacacaacgtcttccatggaagaccggccgtgtgcagatgtatccgatataggtcagtcggaaggggaaagacgaagaagaaaaaaaaagtaaaaaaaagaaagaaaaaaaagagaatgacaatgagtgtttcttctttttctttaaatgacggaatcgcccttctgtatcaacctccggacggtactggtccacacacacacacacacacacac

SEQ ID NO: 489 - DNA, 3430 bp, Xanthophyllomyces dendrorhous
cacacacacacacacacacacacacattctggtcgtgatatgttcttggcttgtacaaacgatacatgaacgaaatcccagcgaaggagaaaaggaacgagaaaaaaaacttttcgttgggtttgcggagagacctagatcgagtcccaacccctgttctcaagtcttccgtccttctctttcttgtctcgtctggccctcttgttgattatcacgaatgaattttttttcttacatttttatatgaataagaggagggttattgaaacatggaagggtaaagaaaagaagcaaacgagagacagagaaagaggaaaaaagaaaaaagaaattgaaggattaacatgttccgatagggaaataaggaaaagaaataaaataaaaaagtgaacgaatgcagtgagagagataaaaggtagagggtgaaagcaaaaaggaaaagtggcaagagagcaagaaaagaaaggaggaataagaaagacgaaggaagactataaacaagaggagaagggatcaggtagagagagagcacgaagcgaggatcctgtttacttcgagtgcggcaaccgcatcccctccgctagtgtacaacacagttgacttcttgaacctacaatgacgatcaatgcgaacgaaaaacaaaaggaggtaagcctccgagtcaaatgagccggcgagagaaagagaagcatgcacgaacccgttgaaggtgctggccgcacagcacgtgtaagcacccatctctccccatcctaaccaatcgccgacctccaacgacctgggcaggacgaccatgtttcggacacaatcgatcgaatcacaggtaggtccccagacggaggccatctctgttccgcccggtactctttggtaacccatctggaccgtcagatcttcctcgagagagatgttcggagggaacgatcgagggaacgggcaggtgacagttcccgcacgaagcgtaagagggaacggatgaactatctggtgatcaaacatgatgcagttgaacgagccgtaaacaccatcgttgatgtagtctatttgaaagaacgtcgcatgaagaggaggaggtgagcacattgtttccaaagagaaagcccagtaaaggcaagaacgtttcaagcataaaaggatatcggacatacacatgaccttcggggtctgctcgtcatcgcctacgtcgccaagatgcttgctgccttccaacgaaccgtcgagagagaagatcgagctggtcatcatgtctcctgcctcgtctccttcggaagtgggcgtagtggcgcctgccccttcggcagcggcagcaccaccaccgccactgaggctgttcatcaacgcatcctcctcgagcacaccggcgtaggtggtccgggccgatcgtctggccaccacgttcgtcgccaagacaaaagcggtggagacaaggaacctaccgggctcaccgatgatcctcaccccggactctaccgggaagaacctatccagagcccggttaagaacactggctgccgtttcaaagtattccttttcgaatccaccgccaatgtcgagtagaccgaatcggtatccgaactggacacctaggtcaaacactcttcgagctcgttcacaggcgtcctcaaacatctgagggtccttgcaaccggaaccgacatggaaagaaacaccgatgacgtctagaccgagacgagaggcaagctcgagcaaaccctcgcaggtctccactggcgctccgaacttgaggcccaatctgcagagagacttggagtcgtcggtcaacaaccggagcaccagctttgcggtagggtagagcttcgagatcttgagaagctcatccgcattatcgaacgtcatcatgtcaaccccgaacgatcgggcggcacggatgaacgacgtcggcttgcatgggttcgcaaagatgatcttactgggcgaagccgggaccggaagggaaagtacgctcatgatctccgcctgggacgcacaatcgaagccggtgccacagagagaaagcaagtgaaggacggcaggatctgggttgcatttgacggctatatatgtgcgtgtaattttttattttttattttgggagagaggagaaagaaagaggttggaaaaacatttcgactttatagaatagaaaggaggaaaggaacataccatagaaaggctcgaccctcgtcaggcatctccgccagctcatcaaggctttatagacttcaccgagatcgctgacgaagaatgcatcctcgtcttccattgcgttggtgagctcggtgatcctagcctgcatgactttttcggtcgatccttggtgaacgaaagggatgtccaccctaggcagagcctttacttgggggttgggagagcaagcgaacgagggaggggtcggcaagtacgacggagttggcatgtcacattggtctgaaagattggacacggtctcgaacggaggcaagactagagcagaagcggccatgtttgtgagtgtatgtttggtatggacgtcgttgaatgaggtggtagctggggagttgatcatccgttggagagatgtgagaattggatggaaacgatcggttgaagaaaaagtctgcctgtggatgacgagaagggggcctggattggctttttgaatgtgtggtttacgagtgagaacgttcgagcttgtggagtttcgttggttttcttgttgtaaagttgacctcagcaggcgttgctagggggacgccccggctacgcgtagttgtcttcgatcggtttggggaggcctcttctcaccggaagaagcaaagaaggggggatgaacggtgggtttctggagggaaacgaggggccacggaaacagaaacctaagaaaggaggaaggaggagagggagagggaggaagacacagggaggagttgactggagcagtgaaggattgagaagaaaggatagacaagcgagcaaggttcagttccgaacggatcgagagcaaggttcggattagccagaaaggagtggagagagagagagaaagagaaagagaaaggagtgggaaaagagtgatacttacgaggtgtacgactaaactagacgctgatcacaaaaggtagtttcaaggtgttgtttcagtcctgttagggtggttcgcctctgacttgggaccacctgaggatgagggagagaacgaggcaaggagaacgatggggaaggcgagaaggcgatgacgatgacgatggtcccaacggaaagtgaggaaaaaaacaaggaaccgtcacgggccgagcaagagagagaagaaagaacaagaaaaagaacgatggaaacgatcagccttcggcctttcaatttatctggatgcaatcttgggttcttccacatctctactcatcaatggcaatagaagaaaggagagacgtcgaaagaggcgaggagacagaga

SEQ ID NO: 490 - DNA, 783 bp, Xanthophyllomyces dendrorhous
aagaagaaaaaaaaagaaaaagaaaaagagaaaaaaaaaccttcaaaaggaggaggacaaaaaagaccttcacactcactctaaacaaaggagacggggatcttctagtcttgcttggtctgatgaaatggtaatgggtgagctagccctgtggagctgactctaacgacttgtaagaccgtgtgtatggtatgcctggatcggacgtgggagctgatggatgagattcaaaaggcgccgttgaaaaaaggaggaacagaattttggcccacgcgctttccagacttttcggtaaccctaactttaagagagtcatccgcccggtgaacgttctatttgatattagtgtgaccaacgtacagaatgagatgcaaacacttggcggataggccagtcatcgtatacagcatacagcatacagcatacatcatgctgaccaggctttagccaagatgtgtatatgatatagaaagagagaggacgggagaaagaaagatggaatggtaaagacgtccggtctctctaattatactgagcatactgagctgtactcgagaacttgctaccctgtctgataaccttttcaaccgcatccaggaagtctcgctccgtggccacctttcttctcgctcggatcgcgtacattccggcctcggtcgcgaccgaacgaagctcggcacctgtcgcgttcgggcataatcgagcgaccaggtcaaatcggatatctcgctcggtcgacatgctgtgtgtgtgtgtgtgtgtgtgtgtgtgtgtgtgtgtgtg

SEQ ID NO: 491 - DNA, 41717 bp, Xanthophyllomyces dendrorhous
tgtgtgtgtgtgtgtgtgtgtgtgtatttgatatcaatcagatcagtacttttaccaaccaaccctaggctacgtcaaagaagaaaaaaataagcacttacgatcgagcgtggatctttagaatgtgagctcggccttcgttatctggcaacgagaactctacccgtcggtccaaccgaccaggtcggagtaatgcagggtctaacgtgtctggtctttttattattattttgatttcatttcaaagacgtaccagaacgagtcagcgctcaacctttcgttcttctaaggtacacgaaaacaaaaacggagaaatcatctctcaccgattggtagccatgagcaccttgatgttacctctcgggtcgaatccgtccaactggttgatcaactccagcatcgttcgctgcacctcgttgtcaccacccgctccatcgtcaaacctagctcctccgatcgcgtcgacctcgtcgaaaaagataatgcacgccttcttccctcgggccatctcaaacaattctcggaccattcgcgcaccctcaccaacatatttctggacgagctcagaaccgataactcggatgaacgtcgcgtccgtccggttcgccaccgctcgggcacaaagcgtctttccggttccaggcggtccgaacaatagcactcctttgggaggatcgattccgagcgtcgagaatcgttcaggctatgaatcgagaacaaacaagaaggcctggtcaacaaaaaaaaccacccgagaagagtgcatgaccaaacacgacgaccaacctccaacagtggcagctcgacgacttctcttagcttctcaatctgctccttgcaacctccgacgtcagagtacgtcacgtccggcttctcttcgacctgcatcatcgtcaccgacggatcaatcttgggcggtaatgggatctgaatcttgtagtttgttcggtccactctgatggtaaaacccccgatatgaaatgaccgagatgtcagcccaacatgtggttgtaaacaagtgagaaactctcaagactaacccaactcgcatgccttcttctacgtccgtaggagccactttgtctcctaggccgacgacaaacttggcaatctgtttaatgctgatcacatacttgtccgactcgtccgctccgggttgagcgcccggtccaccaagtgactgggcgaatggagatggctgggtagaggggtctaccgctgtaaagaattcgaagagacagagcatacagttacaagccatgatcaggaccggatgcacaaaataactatcgagtgacaacagaaaagctagaacaggacgaacggccagctttgatgatcttggtacaacgggcgacttgtaaagggtgctcttctccttgacgatgctacagaaccacatgaacggatagcgtgtttcaatgagttgaacgataggtcatacaaaaagggccttgattttcaaagcaggctcaccttgtctgattgaatatcccaaagattaggtgatgctagtccggtatcactctctttaatcccaatcttctcattcactcgcttctgaatatccacaatttctgactcaatcttcttgagctgtcgggcgtaaggaccttgaccctgaaaatgtgccgagacgtgtcatccagccagttcagcattctgcgtatactctgtatgatcacacaacatgaacaaacaaaaaccagacacacatatgttttgagaatctgaatatcatcgtcgtcgagagctaggtagagaaaagagaaaagagatgatgattagcaagaccagatctttgtcagaatgaacgagcggagaagaatgattgatcgtgaacgaaagactcaccgacaatctttgcctcttcctttccgtcgacctttttctcgtctgatgatattattttcccaaagagacaacagcataacctataagactatattcccaataacgacgatgcccagtgactgaaggcaaccacttacacttctcccaatcactttgtgaggtggaaagacagagtttctatcagcacatttgagcccgggtgatggaccgattgatgtctaaacactcacgcttttggcggcatactagcttagttgtttttgatgttataaagactgtcctgacgcttcacagatggcctaacagagagctcgacagaggacgaaacgaggcaaaaggtgggttggatgttgtatgtgtgtggtcgatgtatctggatgatccccatctcggtaggcgtaaccaagcatccgtggaggtttgggtggcgtgaccagggctatgacctgcacagctttaatcaacgccacacggcaatttccactttgcttaccctcaccactttcctccactttccttccactcaccgacttatatctacactcattcatccagatagccatgggaaaagcaaagaagacaagaaagtttggtacgtatggattcagttctggctgggtgtgattcctggtgggccaaagagctcaacgttcgaagaggatgacgcctagatgagggatagaccggacgacgatatacataccctctcacaaaattaacctagctcgacttggttgtatctggacatggttgacctctgttctgttcatggcgatgtttgtgtgtgtgggtgtgtgcttgtgctcttgatgggactattacagccgctgtcaagcgaatgatcaacccagctgatcctcggttgtacgtcctctcgttctccctttctttctgtcggtctttctgaatactgacataggcttctgttgctcttcggacgcgaaccctgtgcaattcactcgttaaccatcatcaggaaggtgaacgcggagaaagcagcaaagaaggctgccgaagccaaagaggcagagaagaaagtggtgtaagtcctacactgttctactctattcgccttcttaatacgctttctgtatgatatgcctatgagctcttctcacacgcataccctttccttatgtgcaccattccaattcatacaacatagcacccaagcaccttcctccttgttcttgtcccataacccgtcactcggtcctccttatcgagttttggtcgatacgaatttcatcaatcattcgttgcagaacaagttggagctcgtccaaggaatgatggacaccttgtttgccaaatgtatgctgctcttccttgtatcttgagggcgcgatagatctttagagttagaatgctgaaacaattatgattcacccaataatctcctgatattcgataaaccaggtatcccgacgatcacagactgcgtcatggccgagttggagaaactaggtcccaagtacagaatggcgctcaggttcgtctttgttcttctcatcatctgattctctctactagctcgtacaacatacccaagtgcgttcttctcttctgatgacgactatatagtattgcgcgagaccctcggtttgaaagacttccctgttcgcgtgcgtatcatggcttcctttcctatccatgctatcagccagagaagaagaggtatcctagatgaaaagcatcctgacttgtttgtatcttgcgcgtccctctctttcttgtgatgctatacagaccgaggaacgtacgcagatgattgccttgtccagagagtctcggtttccaaatgctacatcgttgctaccgtacgttctcatcaccattctcatgatatttcctaaatgcatcattcattaattttctcaatctcctctctccttcttcaatctttgggacgttctattgcgactgaaagtgtgatcgagatcttcgaagacgaattagaaaagtgccaggtgtaccgttaatgtatatcgttagcagacgatatcaaatcgagcgactacctgatggcggagtatgtatcttttctctcatcatctcgatatttctcatctgcgctacttggtatgagagatctgaccaaagctaacggacaaaacctatgttcaatcttgtcttccaggcgcccgcataaatacggagaaggaacttcttctgcttcgtatgagctctcttggttttctctgttcttttcttgtgtttgtacatataatgagccattttagaaattttctgctgccgatgacaagtgattggtcggtgtactgaagtcaaagcaaaagcgaaacgtcaatctacctccctctcttctctctactcgaagtgaagagttaggctgggaataaatacaacattgcgaatgaaatataatgatcacctcaaagaacactacccaacatatcatgtttgctttgaaaagaaatatatcatacatcatcttgtctgtttgggtttaaaaccttgacctttgattgttcattacatcttaggactttatgttagagattatctagttggagttatagaggggcggcatttccgtatgccgagttttcaagccctcttgccacctacagtaatccaagtcccagaactccggaaagttaagcacctagtaatctagaaaagcaacaaagagaggagagagagagagaacgcgcgaaaaagaaggaacgtaccaaagcaaactcattcagggcttctctgacacgtttggttgtccggctcttcaagacagttgcttttaatttttctttagcttttggtgttgccctccggtctgggaatccttcctatatcgtttcccgtcatcatccaacagtcaatccgctattctttttggttacaaagaacgcgagacaagaggaaaggaagagaaaagaaaataaccagacgaaccacagcaaggaccgatcctaaccatccagctgacaactctgggaaccgagtgaccatagccgccaataattctgctagatgaagaatcattgagcgaggagatcgtccacccgcaccgaggatgatagcatggatgaaggcatgaccgtatttctgaaggaccggattaaattcgtcaagcagatgagcttgggctcgagaccgggagatggccgtcgtctgttttcaagaaagaaattatgggatcagaaagacctatcttttcctatcctcgttacgactaaatagacgagaaggagaacaagcataccacaaaaccggtcacagcttgaagagagtatcgttcttgtaaccctagtccatcaacagagagtcccatcatcaaatcgaccatatccgttgggtttccaagtatcgatcccgggaatctagccgccacctatccgaccgttccccgtcaagaggttagccatcggttttcttaatttatgacaaccagaaacattgacttatactcacacagccaacaaatttgaataagctttcaacgatatctggatgtctaaccatcgcgtccaatccatctctcaagacgtccaatccagctcgcaccataactcctgccacgtccctcacaaggacctccatcgctgcttgattgtagcccccagcggaaggatccaatcctggtggagggagaagccggcctattaaagattctccaagagagagccagatgccattaatgttacgttgtgcagcaccagctatcaatctgatcagaggctcagcgtctagtgagagaagtgtaggagaggatagtgaagtagtcattgctttcaggaaagagctcagcgactaccaagtttgatggccagacatgtgaaaaatatagacgaagttagataatcccaagataaaaacaacgtcattacaaaaattattgaacgtacatcagctacttcggaatctgtactccagatctcgatcacccttgctgtgatcctcaacaggcgttctctaagctcaaccaattcaggcgcgctcctggcttgagcaatcgccgctactttgatctcatcctcctcctccagatcaaagtcaaagtcatccgagggagtaaggcctttggcgatggccgtcaaggaaaggattcgctgtatcgtttcagccttggcttcttctggtagctagttgtgtcaaagttacgtcttatgagtattctggcttagaagcgaacatcatgctgttgcagcttacttgagcagcgccttccaaggcctgaacgatcgtgttgacgacaggctcggtgatgttctgaagcaagaaccacaaagagcgtacgtcagcctcaaaattcagataacgcgccgtaggaaggaaaccagtatatgatggtgactcataccttgataggattgatggcttccataggtggcaaagcctgaacgaccgatgtaattgcttccaagaccctggctttctcttcaggctattcaagagttttgaccaaataatctaaacaagtaagcgcgcacatccttttgaattgaaatccagataacttcacaacctacctcaatcctctgctctacttttgcgtaaagttccccaaaagcgccgatatggtttgtcaaacttgctcgacaaagatcacacaatcgcttaagggattttgcggctgaagcagataaggccgggacttctagtgcaggaacgatatacgatacggctgtcaagacgttcgctggatgagaatggaaccaactactgtaatcgcctgtcaagtgtacgtatttgataagttgttctagaattccaacgccatacatcaataagggtggacgaggaggtagctcaccgatcaatgcaatcgctgtagctctcactcgatgatctccctccattggaagctttccgatcagatcctgcgagaagatccgaggcagatgttgatcttcttctactggcacagtctcctgaacacatcgtaaacagtgaagggatacctcaatctcttcccaattcggaccggatggagcgttgagactttccagtaaacagctcagaataaacgacagcgagtcggaacggaggatgtagtatctgttcgacagagagagtggaaatcccggtcaagtttcagatatttccctcatgaaaggacctccagagtgtatgaaaagaagacatacgaagtaaccatagcatctccacactcgaatcgataacttctgaatttatcgacctggtctttcatccacccacctccacccgacggcaacatgcacttcaatcgaagtttctggaagagctctgcgaaaatctgcttagcaatcgtccattcagtagcgggcgagtcactatcagctgtttctatatgaggggaggcagtgatggattcctggaagagactccaaaatccaaggggaatctaccgcgatggatgaagatgaaagagaaaattaatatatcaagtgagcagccgagtccgtcttgtaagcagtcgctgcacactagacattttctgacctcagagacctcctcgtcaactccataggagccttcaaacccagaaaatcctaacatcaagctgaagaagatctgaacttcaggtcgaatgagatgcagggccaaataatcggccgaatgctctcctaacgccaccagcaatttacaaactgaaccagcggtctcatctgcatctccagctataaaccgtcacaggagagacggtgatcgattgacacaagagaaacaagaaatcaaaaaccaataagagaaggggccttagttatgtagatacgtacattgaaataggttttccgagatattccgtcccgttcctgccacccaagcgagtagaggttcagtaaggaccttgctaccccttccatccttcaggattgagttgcaaagaacctcttgcatgcaagtcgatgcggggatcagtgtctctggtcggtccaaaagttgaatcaagataggtagcaaagggttcaagtgtctgttgaacgagaacacacacacatacaagccaacatgtcaaaagtgaacgatcgacttttttttatattaaaacaaggctttgccttactgagaaaaccaagactcactctccgctcagtccccaaccgatccaactttccaagcatttgagcgctagctccatctcgccttcgtcttttccttctccaccaggcacccatttagccaaaacggatccaacagcgccgatgacaatcccatcctcctcgttcaacacttggtatacgtctatctttcgttgtccaattagacctgtccgagttacctcttcgatcagaatctgaaagaactctagagggagggcataatctgaggaaggcggaggcgcaagtatccttagaagcgtactgagagggttgggaaaatgatgaggtgtcaggcgaagcaccaaagaggatagctgaggagcacaagagttggaatcagatgtgcccaaatgatcttatcaatattaggcaacagaaggacgttatcaaaatatagtggatagaacatgggaccaacagcaacaaaaagctttcgaacaacgattccattcccttgttgaaaagccgtttgagcggtccattctagtacagaacttaacaaagcgagctgttgatcttctggaagcgtgtccctatacatgtgttgaagagtcgaacagtcagccgaaaggacaccgagagcgaaccaataaactagatcttaccagtctcgagtgatcttcacactggctgtatgagcgccaaagaatcgaacggtcacgtcctccagaagtacagagccaggatggattggaacggtattcacgacagcttagcgacctttggttggaaatgcaagtgaaatggagaaatcataacgcgctcacttggtgagatatcagtggttcaatcagaccccaagaggcctcagacttttgggcttgaacgagctgatgttggatttgttgctgttcagcaggagccaacgtcgagatgggtgagtaggataattggacgagctgtttgcgaattgaccaaaaaccgagaaagatagtttagtcgagagggacgatggcttcgtagaacccaagctatcaaggactaacgtgaatgacctggtcgatatcttgttgagatatcatgctctattgaacaaacagatgacaccaaccgaggtcgatgttgattgatgttgatgttgatgttgatgatggttcagagaaagaaactcgaccagcgacgacgacacgatcaacaacgttcatctcttttggtcatcaacatcaacgatcatcaacgtctctctatcctttgcatctcgtataatttccgatgaatgtttgtcccagagatgagatagaacttgcctgggacgcttcgttccagtccatcaatccatcagcccagccagacattcatgggctcgttcaaatctccaaggtgaacacacataacctctcttcaagactgatctttctccctatctcaagttgatgacatcgaaaagaccgacacaccctgactgacaagagaaagcttggtaaaacatgtcgatcaggcctgggatttagccgtcggattcttgaaaccccgtaacctagaagggttgaactggaatgatcgaggaatgtggtctcgtttgtccttctcgtccacacactcgtccgtccgatatgctaactgtgttcaatctgttttgtctttatctggcctcttcttcctttgagcagatcatagcgggatccttgccgcttttaggatgctcaaacaggctaacttggtcgaggagctcttggaacacttctacagtaaggcactctcatctaagaagccagagccaagctgagactcacgccccggtctatcattttcgacacaacccctataggcaacgtcgaaagaaactttgccatggtcgaacaagacatcactcgtatgatccatagtatcgaagaatcaaataaaacctcaacctccatccaaacggaatcaacaatgtttgatttgttcgagaggttggtcgcctggcaaaaagcatgggctgctcctgtagccgcattcgagaagtgaggctcgtctctcgtgttcttagtgtgcgctcttcctctagcctatgttagctaaccttggtctacgaaacgtatctcctcagtcctgctcttcgccaacaatttcaatcgagattcatcttccaactacaccttcgtttaccagcttccttcccgaattatatgcacgcatacttcctctctacctttaattcttacttgtccctggtctcgtcatcttcgccagacttgtcacaatccaaaggttctccaatcaaaccatcaccgcatctccataggctcggattgatcgtcaagtttggatctgaactcatggcagtcgcgtgcgaacaaatccggcgcagagtcaaagaacagtgcgaaggacagtggggggaacggacactagaagagatgaggatatggggaagagaggtcgtgggcggttggtgggaaagtttgtatgaaggtgtgtcgcttcgttcattcattctctatgatcctgcgcgtgtgttctcattcgggactctctccgaacgcgtaggtgaaaaagccgtgaaggcagtgatgaaaccgatatattccaggttggatcattatgtatgcaaaacaatgtgtgagctaaggcaagtcttctctttgtacctctcttatttcactcgtttatctcgctgatccttcaaatcttctctctttctgattgggctccccttctcgactggcttgtaagtagaacgacagaactattcgatatcattgtgaaccacccaaacactcttcctgtcctcgaggatctccgtgtatgtcttgcatatttagaaattatgcccttcttatctgttctgcgagatgagcactcaacactcgcctcatttctcgctcattctttaggaatgtttgttccgagttgattctagagacgccctcgttaaagccctccacgcgtcgaacgacaagcgactcttacatccgggagcagataccaaagacattatctctcagtacatctcaactatccgctgtcttcggatcgtagatcctccaggagttcttctccaaaagatttcgtcccctatcaggtcgttcctcaggtaaagttctcctcttacccccttcctatctcaataagacgagcaaaatactgatgaacagggattgggggtaaatgaaacacgtaggaagcggccagatacaattagatgcatagtagcttccttggtagatgacgacgaaggactcgagatggatgacgtagaggatgacattaaaccactccaggtcaacgatgatcttgaagaagactattcgaatccaaactgggttccggaaccaatcgatgctgctcctggtttgttcccccatttttttgtcttttcatcgtaatcgtgtctgttgatagatatttaagtgcgcgtacttatctgttgtgtcggtttctaatctcaaagagttccgatcaggtaaaacaagtgacatcatctcgaccttggtgagcatatacgatacacaggaagacatcgtcactgagcttcaggctcttctcgctcagaagcttctgactgtgcaagattatgatctcgagaaagaggttcgttcggcatttccactttcccttatcaaacaacatccgactagtagagaaggaaattgaagcatatggaaacatgatttttgatcttcagatcaggattgtagaaatcctgaaacttcgattcggagaatccgcactccggtcatgtgaagtcatgctcaaagatctagctgattcaaaacggatcgatcagcatgttcaatctgatatccaggtctgtcttcctccgcctctgttcctcttccaacttttctcacatctaaacatgagctctctcctgtcccgtctaccactgctatacagagcgtgattcacccaaaaattatctcacggttgttctggccagaatttccccgaacgaaactccaacttcctgaaaagcttggccggtttgtctcctcagttcctcttccttccacctattctctttcgtctaacctctctctgcctacggttcttatcgaccaaagatcacaaacgaaatatgctaaagcatatcacagatttaaacctgataaaaggcttaaatggatccctcaactcggtacaattgacgtcaaacttgagcttgcagatcgaattgtggaggttgaagccaatccgatacaggctgctgtgattgagttattcgatggagatggtatgttccattcctattttcttttctctctgatatatctcttcacatcaaacggaaacctcaaagactgacattgtacatcgactcaaaaataaggctcggcatggagcacatcagccatcgcttctaaattatccattcccgatcaagccgttgtcctttccactcttaatttctgggcaaacctgggtgttctcggtagagatcttcggacagaatcttggctcgtgatcgaacgagtaggagcaagttagtcgtattagatgatcaaccatctcgatgatttcttggcgcattgaggatcgaaagcgcatctatattacaattcgagaaaggaaccagatgatttacgatcggcctcctcgaagctgtttcaccaaacaaaaccccatccaatatataaaatttgtaccaaatgtaatgagcttcttatgagttgatctgttctaacagcaaaggggagatatgaagtatacaaggaacagctagaatactgacagcgagcaccaggtgaataacgtttccggattgaattccatacgacttgagagtgttcgtatcgaccctatagacccagaccgtcatgtaatcccatcaacaagaaaagtacatcaattttgagcgattcctatcacacaaacaacagcaaagggcagtaaatcggacaatagatatggatatggacatacatagcttttccagagtagatcaatcgttgctggctcggcgggattccctccttctcttccatcttgttcttgacatctaagatctgattttgtttatttatttttggttttttaaatccgtaaaaatcgttcagtacgatcgatacactgtcggtctaaaatggcaggacaagaattcgagaagagaaaggaacagcacaaacctgatcatcttcgtctacgtccagttcgatctacaatcgtcaccaccatcgtcgagcgaaccatcatacagacagattgtaagttcatagtagcctaatatgagacaatctctaccaaacgtaggattgattacataggtcagacatacctcctttccagttaacgtctaccgaaggacagaatagtcatcattcaaagaagaaatgagtatcaagtatcattcacttgtctccgaagagtcttcgtataaaggacgaccgagaccacatcgaatacaagactgaagacttaccttgacctttaaaagcatttctggatgagttacgtgtatatatgtctatgggagatgtgatgtacagtggtcaggatcggcgagacttgatggagggtgtgagaaagaatacgccacatctagcacagctttgagattgacccaaacgtctcgagttatgctttcattcctctctgattcaatcttcatagacaaacggaataataaattgaatacacatcgaaacaggacaaagaaaaatgcagaaactacaataagctctagactatacatatcatcgtcgttccttcacaaagaggtagaggaatgtgtagctgagccccaggaagccgaagatggtagctattaaaactgcagtgtccggccaccagaaagcctaagagcggaggcaagaaaagaggaaaggagacaacagagttagatcacgatacttggtaaattcttgaagggaaaaaatacatacttgtgatcggaacccgctatgttatcagagaacaagacataacaaaagaagaaaacatgttaatacggcgagatttctgaacttataacgatgacagaacgtacaaagaactgagaataacagctcccggaacctccagatcgacaccatactatggaaggaaaatataagagttctattgtgagtgtttggcgctaggtcgacatgatatatgtgaaaagaaggtctcactttatggtctttcaactgaatagatcgaagctcattgactaatagagcctcgaaagccgcatggaagaacgagaaattcatcaagatccgaaccggcagagatgaaagactatagttcatcaagagacccccaaatagcagactatacaacaagaaaacacatgaagagtctcattagcataataacagaccaataccgaggcgacaactctatagacttacttgaacaacatgaccagacttccggccaagctagccactccattgtttgcgaccgcgaccgagataaacaagaccacgctcgccgttgccagattgaacagcacaagggtcaagatgaacttccagaactcggtcaatgttggcacaagtccaacagtactataaacgatgcaccctaatagaatggacgggatcacccgcagcggaatgatgtcaaacaagaccttagatacgaagtaggtaataggagagtagtatccgttggctctatatgtttgaaaaacaatcacgagtaagcgactggcgataatagcgggctgcactcggctaaactcaccgttctctcataaacaaaagtcgttcatttgcgaacagacccaaagatgacagggacgagaacgcaaacagtgccaaaatgaagaagaagagcccaagccggttctggaaagacccaagatcaatacctatgttccggtagagagcggcacagagaagagccactcccaatgctgtaaggtaatgacccgccattagcaagggatttctgtacaggttcttgaacgctcgcccactaaggatcgtaaactgggtccaaagtccagccttgtggtaccctttagagattcctctatcgacctcgtcaaaagccccttggtttcctcctcctccagttggtccatgcccattcgctctagccccagcgatctccgctctaatccgagcggcaagatcactcttctcaaatgacgatacaagtctctccagcttctccggtaaggccgatccgtcaatgttttccgaatcagacgaatcagcaggagaggaaggcacgattccgaacattcgaccagctttgctaatgaaggagctatcaccctcagctcttgtctcaacagcagtttcttgagaagctagtcgagaagcgccagcgaagccggcctcggcatcgggaggactaggattggtcgaggaaacatctacgaggctagacagatcagatacgattgcacggggcgggttcttggtggtaggccgggcagttaagtcaactaatcaaaatgacatttagatacatcgagcgcactatcagctcttgaattcatgaaggtttaatgcgagaacaaaaatcacgttaaaactcactcaggaagtcggcaatattaaatcccggtgggcaaggatgacctagactctcaaagtactcctgacatcttgcgtactctccggagtagacaactcgtccttttgcaagaaggacaagtcggtcgaacaaggcaacgatgttgctccgaggctgatgaatggtgaaaatgacagttctgttatagtctttggcgagagttacaagagattcaattacgttgaaggcgttgtatgcatcgagacctgaatacattattggagtgaagaagagggaacatcagtcacctcaccgcgaaacatataggcaaaagatacacaccacttgtcggctcatcgagaagaatgaccgagggggaagtgacaagttcgcaagcgatcgagactcgtcgtttctctcctcctgagattgatcgccgtccagactccccaatccttgaatccttgatactcagaatacctaattcctgcatcgtctccaacgtcctaaacttcttggcctccaaactcatttccctgggcaaccggagcagagccgagtagagcacggtctcgtatacggtgagggtactcatcaatgtatcctcctgatccacaaacccaacgactctcttccattcgtcctccttttcgccgttgctcacccttttgccattcacgtatacatctccacctactgttcctcgtttgcttttgagagccaggatatcgagcaaagttgactttcctgctccagaggcacccatgatggccatgatctctccatgtttgacagttccagagatatgagaaaggataggctgttcattgacagtatatgagagcgaggagaactgtaggctagctggaacgtgatcagccatgagcttggcggtctcctcagcaggtagtcgaattgaaccaaatcctccagattgcttgggtgtgcgagagaggaagaagaaagctgtggacaagaactaataagatcgcgtttgaacggaaacaaaatagtctagcaagcagaggacgtaccaagagcactgataagaacaaatgcacagacagcagctacactgatggccagccacgtgctatcgtccggtctttcaggtcgctgataacctggaacctgtgtatagtgcaaacactctccactgtcgcattgtaaggtgatgtatgggtctccaaagacagtgtcgatcaagtcgttcattgctggttccttaaactggcagcctttgccagtcgagcaagtgaacgttccaggtccagtgacttcttgttggaggaactcgtcgatgctggagtaccaggatgatttttcagcttgaaggttagcaaggagatctgttatataaggaagctagtatatcaaaaacttactctgggaaaccaatcattccgtagaataggcgatgcattcattagtactaaaccaaacaaaacttctgatgactgcatttaaaacaaacaagtgacggcatggactcactgacacttccatcctctccgcaaagcattcgtccaggcacacagtcgcattgtatcttctcacatttgtactcggtcacattggcctcgtaagtcgactgtatcttccagtcacaatcagacaaagtacaataaaaggattcaacggacgcgatccagaattggaacgcgcatgtcttgtccgtaggcgacatggatgggtcaccattcaaatgagcagagcccaagctggaattcgaggcggccggtccatcggtgcaagagaatgtgacttgaggttttttcgtaccaagctctcggatgatagcgggatcttcggagaaaaagaatcagagtcagcaccgatccgatttttttaatgagacagaacagaatgatcgcaaacttactggttacatcgcacatctgaaagttctgtctaacagcatctccacccttgtagcacgtcatattctctggaggaatctctcccccagaggagtagtcccatccaggaattctgaagtttgcacatgcctgatcggtctgacatgtgttgcagttgactccagaccatccatctgaacatttgcactgttccccgagagttcgttgatgtcgattcggtccatcagctaacgagtcacaaactagatcgaacgtgcgatgtaatcaaagagaagattcagctgaacagatcctgatactagagaaatgatcatcatagcgtaacatacgtggcgtaaggcaatcgagacctccccaacctggaggacattcgcactgtccatcgaattcgttacattgtccatactgcacgttcgaatgtgatcagatctcatcagcgacgaaccaagagcgttccgatcagacaaagaacatcacatatacctgtccgcagttgaatttgggtaagagacagttgaaacattcgcatggctcatccttgactttatagatcgatgaaggaattgagtgagaaatagttagccacagacaaagggatcgatagttgagacaccagggacggacacataccaggtggcaaatacagctgatcaaccatacattttgacaaatcaccgacaaaatcacacaaaagatcaggacgtatcatagaggactacaacaaagccgatcggctttatacacttactgaattcgacttccaaccttggccccaagcactgatgggagcttggccacctacagagtcggagaagagcgaaggtgaagatgtaggtgatgatcgattagagtcggaggctttagcagcagcgagtaaaggagccaccagagatgcatatatgatcaagggcatctgaagggacctcatgatgagttccgattcgatgtatcgagtggaaggatgtagagggtatgtaggtgtaggagagagcaagttccagttgagtagtcgaccggaaaaggagatgtagccaagtgatcagcaatttgtaaccagtttgtaaccacagtcgaagaggcataagacgcgggtgatctcatcagaatggtaacggtctcctagtggtacgcataaccaagcagcatcattcaatagacaggacacagtgtgagtagatacagtgactttgagagcaagctatagcaggcaatggacagatataatagtagaaaaggttcagatagtataggaaggaaaagaaacagaagaaacagaggagattttataattaaatgagtaaagcaaaaaaagacgagataattatgtattaacaagcctcttaggcagactcaaccgcactcctcgattgattgtaggcaacgataacccgctcaatattcttgaacaaccaaatcttcgcgctctgttccgccaaaggcaagaaagggcccgagactccatcgcgaagcaaaagtgcgattcctgatggttcgagcgaaatcgtctgtagatcccaaaaggcgacttcccaaacgaccctgagcttgattgaccgaattagaaggatccgggtggtagtgagcatgcagaccgagtcatcttgagggaaatctgtttcacacgtaagaagtcatacgtgaagttggatcagacgaaacgttcaagaagcgaccatagataagtgcagaggggcggacataccaagatgagcaacgtaaatctcgttgaagtactttccattctctaaatctttgagccacgattggcccaatgattctcggccagagaaaggctgtcgatacgtggttatgattgacacgatcagcctctttgcgaaatctacgcaaaactcatacaaaaacagatgaacgcacccgaagcactccgtcggcggcgacaaacctgggaagccgaactcggtcgatatcgttggcatcaaagacggtggtagtattccgaattcctatatggacaaagcaccataagtcagacaagcgagaactaataggcgagcagtagtttcaacgacttaccttgggttgcggtagaagcgaaatcaaacactcccaccactggcttcgtgacaataccgacaaggccctaagggatgaaaaggtgcgagggtgttcagaacagcgaaggcatttatgatcaaaatatagccaacgatagcttctcacctttccgacacctttgaagaatcctccagctccaccagactcagcgccttccaacggtttgagctatttcagtggtcaacggaggacaataatgaagccacacaagtaagtctctatatggattaggtcaagaaaatgtggtcaagacatacagccagtccctctaacccgcttgctacacttgtaccaaatgcttgagcaccagcagcgattccgtatctaatttggcgagataaaaagttttgttgtcagtttatagtatatatacgaagcttaatcaaacttacagagcgtgtctaggcttgttctttcgttgagtcaaccttcttcgagcttggtattctggatcgagggttgcagccgaaagtcctacaaaacaaaaatgatgttcgatgtcaaatcagttataaaaaccttgggaagttcgaaaaatgatctaaaacgataagtcaatgtctcacctttaccaatcgaaccagtcaacttcgaaatactgtctgttactccaaagaccgtcttcttgacaaaactcgaagcaccctgacaggaggcagttttacaaaatacaaaatacattcaacaaggattaggatgaatggtctttgcaaggaggagaggcaaatcccatacttactcgggcgattccactagcaagctctttgtttccgtgaagtacaaatccctgatagggctcgtaaaagatgtcgtgcactccagaactaacgttgttgaagagacctatagggttgccaattgcatctgcagatcccagaactctgtagagctgaactgtgaattgattggtatagtgaaggacgattcggttctgtagggccgggattgacagtcgaacgttttcgaccattagtgcatttagtcgaacaggcgcaacgttgacgtttcctaaagccatcgtcaacgcattaagaacaaagaatgctggatttcgagtactaggtctgctcgagcgcacatcatgggatgaacggtcagtcaatatatcaacataccgcacatcgaaacttggttcacgtactgtttctcctctacattaactcgctcagttcgcatgaacgagagctcgagctgaataggctggagagcaagagattcgaaatagaccggtggtccgccagcagctggtgttgggtccggaataggtccaggtacttcaatcaagacactaatgagaagagagaagtgtaattaaaagtcgtaagaatattgattggttgtaatgtaacaacggaagaagacgtactcttcggcgacctcttgccaagcagcgcccttgaattggaggaaatcgtagagagcgaacgcaaagtcctcgtcgagttcaattgtcatagcttgcaacaagatcgaggcactgggtaaagtatcgtcagtggctgttgacgacagttgaaactaggagctgatcggactacttactatttgatgtataaaactccatgggctgtggaacaaagcaagtggtaagccgatgccctctgacaaatattgaaattcaaggcagcttacactcatccttcaggacaatgaccgaagcttgtagtgtcggatgcgactccaggtctttgccgtctttaggtacaactgaaggatacaggatgatgggatacagccctccgaatagctgattgtctacctggatccatttgcagttgacagagaccgaatacgaagtagccgtatcgacataccgaagctccaatcctcggaaagagatgtagaccatctcatgcattcccttgttgaggattgaaatcccgataccttcgaagtcgacattgattgtcatggtgactgatgtatcaattgagatggcctcaaaagcaactgtgctgtccaatgctgttgagtaaacacgaataaaatcatgacaattagatgttagtcttcatattgcctaacaatccacaatcgatggacgtactgttggatctagataatgttcccctgcctgcaggcttgaatgcgctccgttcttgttcatacttcgagatgatcaatacttgagttggaccatccgcccgtacatctatagaagcattttgtgggataccatcggtctaaagtgatataagatgatatggtgagctcttagtggaatggcaggtgaagcgatcaaagacctacatcagtaaacctaaacggcgtaagagctccgatctccatcacatctaccaatctttcctttccgtttgcgatgatcttgagtcgtttgtcatgctcggcaggaaattcccaagtccagttcgcggaacagaaaggcgcaaccttgaacactcttctttgtggtcgaggtgcttctcgaggattatcggccgttcggatttgctatgagaaatgaacagtgattcgtcaatcatcaaactgcgagaagatataatgcaggacagaatcttacgctttggcagaaactgatctcagtgctagtttcattctggattcggaagggccagggctcagattctttgctgaaggtgatgaaaatggctggtccctcgatgaccacttcaattcggacaagctcctgctcagagttttgaccatctttagcagcccgattcaaggtaacatgaacagaaccaatgtcggagatgttgaacggcgcagacctagagacaaaatcacgacatggtcagctggtgaagacgtgttttgaaatggaagaacgagagatcaccattcttcgttgacaccctgataagcgatgactactcgaagatctcctggtctcttcataaggcgatgcataggagcccgctcgcctggagtaagatggataaatccgtcactacgttcctgacggacattgatagtcgagtccatgttgttgcggaagacgaaacgaggagaaagagtaacgatcttcgatagtttgtactgttgattgtgaaaaagtggtgaatgattagccaacaaagtagaattcagactacatgagcagactaacctttcctaaaccctcaacataagaaacaccagcatggacttcttgctttccatttggggtatctactgtaacctcaaagtcggctgcaacagtctcgaaagagagaggctatgaataccatctagacgcaattagcatttgctcaatagttctagaaaggtagacatggtacgaaacgtgacacaccttcgaccatgtcgagtctccaaacttaaggaaacacctgtttcgctgatccgagttggcgaaagagaacactgcaaggatcagacaattaaagttaggttgagtatatccgaagtctaaagggttataagtagattatgacctactgagaggagtaggagtctcgttcttgtaatcagctattgagaaagaagtcaaacatcgtaagcttgctgcccagtgattgtcagcaacatcttttgagttatttcgagctcacaagtgaaaactgaggctccagcaacatctcggggttgacccatccaagtcttggatttgatagatactggaagcccaactttgttgagaatgatgaaaggactgaatatttgaaccttgaaagcgccactaggttcaggatatttgctatagatttgaaaaaccaaaaaagatcatttgtgttgagaaaccatatcatatcacagacacgcagaaagaacttacatataatgaatcttcaaattgagcttgtgaccctgcttgtccgctaggataagagtatcttcgatattaaaatcgtcaggattatcggtgttgatgatagcaaactcgctaggtttcaattctgcgcgatggaaagagctgtcaatcaactttgtcgtgatcaacaaaatgaaacaatattcttaccagtatcctgaacctgaacacttaataacaacagatgagagagctccacctgatgaactgggctggttccaccctttcgcaagaaggtagaggagttcaagctagtgttcttatcaaatacacggtatttgatatcgaagggtagcaggttctcgatctcgacaggtgcacgaagtcgtaaggtcatgataggatatcgcctatatcaaacgatacaaagtcaacactaaacgctggatatgatttgactacaatagaatcttacttggcggacatctcgctctttttaataaccgcagatgcctggaatctgaaaggggcttccttggaagtatgagatctacaatcaatggttcggacgggccgagcttgaagatcctccctgtgaaggagaaagagtgacagacattaacgagactcaattaggacagtcttgcgagaatatgacttaccagtgaaagctctccgtggaccatgagaagtcgaaaccagctacgcgagagatagttcaatcaagtcagtactcgaattaactaacaacatatttaaatggcgaaactcacgatcagggcggagcttaaatcttttatgataagcagcttcaatagggagagcgcaatcttcgcccggggctgttgggtcaaatagacagtgaacatatgagcatttacgatcgtcattcatcagatcttatcatggcaaacccagagcgtaccgatcttgtagactgaagcacttggcttgcctgtcttctcgataatgatgagttcgacaggtacatgggtcaagttttcgactcgcaaaggagaccggaatgtgacccatttgacgttgttgacaagcttgacgtcagaaatcaatcgatgtggatttctagccagcctgggtcgaagcggatgagaatattctccctctcgatcgacaaaaatgttcttcagctgttcccaatcggcaccattgatctggacgctcaagctatgatgcatgttgtcacccacgtgctataaatgatattgaggaaatgtagataaaaggtaagtcaataaatagaaccgcgcaggtgatagaatagtttgaactcgcctctcttaaggttttgtagtcttcaaatcgccaaggaacctcagagccgtcctctatcgtcgttctccctgcagagcctggagccacccctttgtcagcccagagttcgattggataacccgttcgatttctaatcaagtaaggagcgtctcctcctcgagcggatcggaggatccgttcactttcactcgaccattgggtggtagcggtgatggccaactcaataaatgtagatgtgacattcaactcgagtctctccttagaagagaagctgatggccatattgccagcttccccaccagcttcagatttagaaacctgatgatgggttccagaagccgcacgccaaaaaagtcagtactgactttgttccactcttgttgcatcttcagtctaagaaacaagaaagacttaccttgagcgtgaaatggtatggctccaacaacggctcccaagccgagttcgtcaagttgaaatacgttatggacggcttgagggaggtgataaatttcatctagaaatgcgagaaacaaagtgatatatgaacatatcagaaactatggaatagaaagctagtcagaaaaagtacagtactcacatcaccagaccaatcgctaacagtagcactgaaagccttagcatgcaagtgaagcaaaggcaattcatggagatcgccgatgagaatcaattggaagccttcaaaactcgctttgagctggacatcccgatgggtgtacatttcacgttttgaaaaggtaacaagtgaaggataagatattgaataaatctacaaaaaggctataggtacgaacatgttccgttgagattacgaattttggttgggcgttggaggatcgtcgaacagtagagcgggttggagatgtgttcgtgtttgtggacgcccttgacactcgtcgggcagccctgtaagaggctggtgggcccgtctcatcagaagaagctacatcttcctcattatggtctgccgtactcttagcaggagaagtcgccgaggtcagaagagatgttgctctattaacgatattggtgatcagtgtgatgtcccggtaagatgctcggaagatgatcggctgaacggcaagttcgatctctgtcgtttgatagtttgacacagatcgagagtcgatcgaaagggttagatcaatatcatccaagaatcgaacagattccgagggcttgtccattcgagacaatgacattccagctttttggaggtttagagcgaggataccctacaaagatggcaacacgacaacagttgagctaagatagatacaatttgaacaattcaacgtgaagccttacctgttgggacataagaagctgatcaaccgagagttcgatcgcttgtgactcagaattggtatcatcctccagaacgaggatcgcacagctaacgatctcaactcgataagctagtttggatgaagaagcaggaggagggggggattcactatccgcagaatctgctggtgtgggaggaggagcctcagatgactcggagccgcttgtaaagaattgtaagagtgcataaagcggatcgatagccaaaatgacacgaggactatcgatagtgatgatagccagggccgaaccgtctgttccgcccgacatggtatacctcatcatactacgccaccggttgatatcaagaagaattagtacatgtttcagtcatgatagactatagaaaaaggaaacaactcatacaattggtctccgttgtgagtagctgctggaatgatctgtctccactttgagtttccagctcgagtattcgacattgtcatatcccgaagcatcacctccaaatcgagagctccatccgatagcatctttaggctgactcttgtcgaaagaagtgcgaacttggcgatactacgttccgcgagcgaagcctcggttgttacttctgaatcaaacagctccaaacgaatggaagaaacttcaaaccgcatatcaagtttagtccagagtttgagggcttcaccggattcgcctcgagagatcatcccgagctctggtcgaagatcaactccagaattgttatttggagtgaggctttctgagacggaagaaacatcagttgaaggtacctcagaaaggagcttgggctcgatttttaagagatcgtctcgattgtctagtactcggggcatagactggacgagttgcataatcagattgtactggctttgtgtcaatgcaagcttaacctctgacatcttaccagatatctggagagacgttcgacaaaaggaaatatcagtatttgataatattggaggtagttgagacataaactacatactttggtatctgggtcagtgaagttggatgttcgatcaacatatgcttttaaaattcgatcgtaaaataggccacaattagttatatattctcatggagacaactgaggcaaaaggaggaatgtgctgagctaaccaggttgaatgacatcgaatgtgatgctcatatcactgatcacttggagagtagtaagggtatcatcatagtagaactcggacgtgagtttgattccatgcaagccagcagatatgatgttgtttccagccgctcctccgtcataagtgtttcgagcgacaatctctccaagcctcatgataaggacatccttcgaagtcgtctcatttcgaggcattacgatgatgggtgttttgatgagaatgtcgaaatgcattcgttccttttgaagctctgatgctcgctgcgttgctgcctgagaaactgcttgagatgtagcatcatacaccggctgcagctttgagaacaagagggcgaacatgtacaaatctcgaataggaccctccatgaagttgaatttgagggaacccgctcggaggtaaatcgaagtggaatatcctgggaaggtcgcgtggtcgttggcatcgaagctttcgaaactgaagtctacaacatcgtctccttcaacggagagaagctgcttgaaatccttgttcttggagatgatcgaggaatcgtccttcaaagaaagatgaccaagcgtggctcctagtctcatcgtcggtcctcgaagaagcagactgacctcaccggcggccattgataatgttgccaaaggtcgagttccctcaaagagggaaactaagatgtagaaattaggttagtatcagtgtcaatactataacaaggcagaatctaaaaagagaacttttactaacctcgagctcgagtgagtttgacccgaactcgaatcttgtctgaagcggaatccaccaagacttcctcttcggtcggctcgccctttgaaacagattttggcgaaggagcagccgaggcatcgtcctttggaacgaacgttgtcatgatgtaatcatacaacgtgagcactgggacgggtgaaaccgcgaagttgaatgtcgaaagctcgactgcgatcgtttggccgacaccttcccaaacggtttgaaacccgggagagtcagcttggaccttagagtatttaacccggacgagatcgtcgtcatgcgtcgattggttcgattttacgtcggaactgatcaacggactagatcgcacgccgttctcgatcatcgccaaggaaacagatctactcaatgcaaacttaccagggtcagaagaaagaatatttctagcaagctgtcttgaaagtgtgtaatcacttacctgaggaacacatccacacccagatcaaactttctgagagcaaattctagatagaagccctccaaaacagcatccaggagatggacatccggtccagacgattgagacttgaagaacgaggcttgaaccttcttgacgtcgaatttgaactcaaacatgatttggtgaatatcagaggtctatcaccccaagcaaggaatcaagcgtcaacaatgagcacacttaacaaaccgctttgattcgttataagacgaagtcccactatctaagcagaggtattaaaaagaagaaagaaaaaaaaagaagaagccttacatccgaggtaatttctggcgcttcgtagaattcgtctgtcccatcagcatcagcctctgcatcagcatccggtgtatcctcaatcacactctcgttctcgtccaagttgtattcctcaatattaggtttctgtctgaacccgccactcctagtgctgaggtgtcgcgattgactagctgccgagacaagaggaggacgagcaggcggttgagcaggatcatcatctccaaactttggaatagccacgtcgataaaacgcatcaaggtttctgtcgacaaacaacagacgttcagctttgaatacatatcttcctctttgttgatacctgtaaacaggttactcactgtactttcggtccgaaaagttaagctgcaaaaccggaagctgtccagacactttgaatttcgtaatattcggagcgttcaagatcgcgttttgcgcaaggaatgtcatgttaattcgttcaagcacgtgtacttcagtattactctcggtagaatctagtgcagatatacacgcttccaggctgttccccatcaacagctattgtcattaaaagggagcgacaaaaaagtcggacagaccagaagatatcagacagcagatctgagctactggccgaaaggaaaaaaaaggaacttacctgagctgaatccaatctgatagtaaaccgatcatacatgagcgattcaagtctctggaaatcttcctcggtatactgctgagcctttttagattcaatctgctgcattgcctccttggctaccaagtctgaagagacagcaatgtgtcctgcatcaagcacgatatgctggcagttcttctcgacaacgctgtcacgggcggcaaaacgaatgttccatttgtcagagttaaaaagatgctgagattattgatgagtaaacatacttttcgggaatgatgatgataggagcgttcatgtccaatttgatgtctatcgtcttgtggttctgatatacccaacatggaggaaggggatgcagttagcaatggttgatagacagatgagtaagacgagaaacccctacctgcaacgccagctccaggcctgctcgagtctctttccgaattccatccagtgtttcgctagccacatcctttcgaatgcgtaagtgaaaatattgacgattatcagcaacatatcaccgttgtcgaggaagagagaaaatcctgggtaacgaacgataagcgcggtgatactctccaactgactctctggcggctggaaaaacttgaacactctctcgacataacctttatggtagataatctcgagatgtctcatcttaaccgttagcccattatctgcccgaccgtcgaccggattgtgctcaaacttcaatgagaagaaagggttgcctgtatcaaccacacttccggcttcctggacactcaaatcggcaggccgtttgttctcttcctccttaaccctgacgatctgggggtagacggactcggtagtgaacccgtcgtatactctgaatccgccaagcgtgacggtagcatccatgctttcgtcgtactgaatgacatctgcctgtaatgcgtcccaaacgatcgacacaatatccagcgcctttccatgaggatcttgtcgaagggcaaacgatccggtttgaagtttggcggtgacacgtagtttgagcgcgtcgttaggtacatcacgtgtgaccgtttgagcatcggggtcgtaaccgacgaggcttaagagtcctcggcggtcggaatctgtcatgacttcttcctccgtggtatgggaggcatctgtctcggactttcctttggcgccaaacgcccaaccaatccaaccttgtggcttcttcgtagccgccacagctttcttttcctcctcaagtttctgtctagccgctgcatctttccgaagctcggattttgcaatagaacggtaaaaccggatatcctcgtatgaaagtttcctctcaagttgttgaaataccgagaggtcctggagacatgaaacaaaggagggaatcaactaatatcctgcttggtctgtaagttgcaaactgatgagaactaaaacctacttctccgactaacaacccattcacactagttttcattctcacatacaactcaacatacttctttcgatcatctctcctctctgcgaagtatgcccaactccacttacgatccctctcatgaacctcagatcggatggcatcgagcgcgaaccgaagtcttgatctagcggggttggttttgaaagagtcctcgattggccggaatctttggtactgtttatgtttatggagtcaaacgtcaagagattttctgaagcttgtacgcgagataaaagtggaacaaacttgttgcgttcgggtatagaaatggaacagatctagcatcgacagcgcgtctcgatactgatcatcgtcgacaacgaaaccgaattcttggaagagcaactggcagtctagtacgggtgtgttcttatccactttatgattcatgatgatctattggaggacgaatcggatgaagttagaagttgggaatcgaagcaactggaatcataactttactcactcttccctctcctgtgacgggcttcaagatgaattgatggtccttgagcttatgcatgtcacttccatctcctctcgtgatctggttatcaagttgagcgaatcagttgctggatacaactcgtcacggatatagggaatatatacataccagatcggaaaagttaagtaaggtcaacgctcgatctgacttcacgatggaccctacgtccgtatcgaaatagattgctagattggacagttgagccatctaatggcagatcggggaaagagccatacgatggaagaagagagaaggagaagagaaagaaaataagataatgtttacggagttcgccaggatgagattgtcagaaaaaaaaagaaaaaaaaaacccaccttgtgcaacgctttgtctgaattgtgaatgaaagtctccatccaattctcatcagtcgagatcgctttgaattctgccagtgtggctccaatagcgaaaggatgctgttttcgattttcgattttatgttgtcgaatgcaaaagttattatggaacatcgaaccttccataccaacgaaaggaactatgcgtacctcgggcgtgctcaacttgtcttcgtatcgaacatgaatgttcttgatagtgatctggacattgttgacgatattctgaatcatccccgctagcgctgactcgttcttcttttgctcttctattggaaaaagttaatgtataagtcgatcatatcgtgtacctgacagtggcagcaaaagagactgaccagcccctcctgctccagaaacctggctcttgagatcaaatgcctctgcggcatcaagtctttcttgcttggctgcctgctctctcttctcatcttcttctggcgtggactatcaacgagagacagagagggcaacgggtagagtcgacagagcgacagagtgatatcggaatcacgatcaggatatatctctccatgccgtagcagcggtacaaagtattcaggaaataagaccgaccttgttctgtccacttggaaccgcgagaaggtagacatcctcgatatagatgctgaccggcttggttcccaacgcagaatatggaacagataaccttagtgttccgagatgaccttcaaaactcaatgagatcacgagtgagccggtgtttctttgatgtgtttgcaaaaattgagagtgagggcagagacagaccttcgatcacatctaccggcaatcgaaatttgtcgagagcctctctctttagtttgagacctttcaaggcgacttcacctgatatgtgaggatcagcgagtagaatctcaagtcagttgatcttactagtggaatcaagagacagtagtacacgaatttgataaaaacaataataagagcacgggacgaaccactccatagactgatgttgagttgatcggtgttgagattctcgacgtacggagccagaaacttgttgagcaggccagagaccaggttccgtaggccacttgacggaccccaactactcatcacggattataacagagagtagagaggatactgaatgtaaaagcgaacgatttgactcgagaacaacgaagggaggaaagaaagaatatggtaagtgcacagatggtggcttgaaagagaggaaggtcagagaaagagacgacatcaacccgatctcacgcagtctagcgatgatgcctgttgcactttgtagttacatgctcacgtgaccagtcaaacttgttacgtcatgctagtcactcttatccttcaagtctatgagtgggaaaccatctatcgttcagtcctggttgaaccatgttgatatggcgctgagagtaaatggtttcacacaatttgtgagggaacagtctcagctctgataatgatgtgaacattttctggcttgcgactgatttcaaccttctcggatagacttccttggtatccgcggacgtgtcctgtatctgtttttgctcaacaacacccgtaagctcttgaggagtttacatttttttttgtaaagttcttcttagttgattgagtgtatgtatcggaggccgtggtgggtcgaggggaatgttgcatatatgaaggattgagcgcgatgatcgtgacgaaatgacttgacgattttagccgagaacagtctctgttggacagaaagggtttattaacaagcgcgaatttgaccgaaatcggaagatgcgtttttgcaaagaaagactaagattcgagattcagacggattcaatgtcgaagtagaactcagtatgattgtatatgtttccagacgtccaagcttttatcgaatgaataaacgtgcagacgtcgtaaatctccgagaagacattgatactacttcaacgagcttctcgcggctcagacagcgaacggaaatgaatccaatgacgaacaaatcccacgaatgatatccgtctcgccatcagtcttgagtgttctctctctttctctcggaaggactctatcccgggccttccgagtgattcccaaagaaagccgaagtacggctagaacagtattatgtaagcaatagaattgatgatggggactttttttttcctccctcagagaatttgcttttactcttctctaccatctactgatccatcacaacactctacacacacttgctctcacccttacaactctttatatttattcatcatggctgctcgacaatttttcgttggaggtaacttcaaggtcagtcgtcgattccgtttgcggtttaaaattgttccatctactcacgattgttcttattctcgactgtttttcacatctcatcctatcagatgaaccccaccgtgcgttcttttcttttccttcttcctttgctatcttccgcttttttgtgcgagccgtcactcaatttatccctgttataccaactaatggcctgatgacagtcgtggaaggctaccgctgccctcatcgatgggcttctcgctgccgacattgaccccaagactggttagtccagcgattcttccgttcctacttgctgccctatcatctgtttctcgagatcgtacgaacggctcatctttgtccccctcacactccttcatcagaggtcgtcgtcgccactcctgctctctacttgatcagtgctaccgagtacatcaagtccaagtcgactgcgtcttcccccaagatcactctttccgcccagaacgtttacgcccaggagaagggagccttcaccggagagatctccccgcatatgctcaaggacgccggtgttccctggaccttggtcggtcactctgagaggaggacgttgttcaacgacaccaacaagttggtcgccgacaagactaagcttgctctttccgagggcatcaaggtcatcctttgcattggagagacccttcaggagcgagagtccaacgagactttcaacgtctgcaaggcttcgctcgacgccgtcgtcgctgccatcgaggagaaggactgggccaacgttgtcatcgcttacgagcctgtgtggtccatcggaaccggcaaggtcgcctcgcccgcccaggctcaggaggtccacgaccagctccgagcttacctcgcttccaacgtttcccagaaggtctctgatgagacccgaatcatctacggaggatctgtctctgcctccaactgcaaggatctctgtaagtttcgagtcactatgcttcttggcatataaatgcgacaagatcttgtctgacaatcctctttctttctcccttgcctttctcccttgaccgaaacagccacccagaaggacattgacggtttccttgtgggaggagcctcgctcaagcccgagtttgccgacatctgcaacgcccgaaagtaaatatatccagggattaacccctatctgggcaacacacagagagtagagagcgttcggtagatgctattatcagttattatgtgaattccttgtttttatcgaatgttcatgtttaatctagtgttgccaatgtttgtacatgacaatgtgaacatgaatctaagaacgtacgctgtctcttcccatgtcggaccaagcgtacagatcccacagatcgctggcggctactgcgccctccgccagtgaatgtctcggtcgactgcgcacgcttcctcggctctgtacccttttgtttcagtcgttgtctacatcttctttcgctggcccaagtattttcaagtccggagagagaatagaagtttcgttgattcaaggacaggtcggacgacattggagaaagagacgaagagatcatggttggtttcccttgaccatcaataacatcgttgcgctcacagttcgttctcgccaccacccttctgaatacaccatcatcattcacacctactcgatgtgtccgaatgcagaccgaccaccgacagagcatttcagtccgatatctgaaccaacgaaactcttgccgctggatctcgacgcgtttggtgcggactgggtggtagattgtgacgaagctgttgatgggattgatggatccgatgaacaggctggaagttcaactgtctatcctagattggatgtgtctttctctcattcaccctctactcctcagcccgcctttgcctctgcctcgccgtcacctttgtcatcgcctacattcgcccggtcaacggatgacaagtcagagtacccaataaagctaatgaccgaatcttcaagcgtgcgtggcctctctcatggtccgaactggatggaacgtgcaccaacacaggacatcaagaaggctcaacctccccctgccgatccggatcaagagggttcacctcgggtggatgcacaggtcgctaccgctgccaaaaccaatgctacggtcaattccgctgctaatactacttaccacttacctcaaatcccaaccataaattctcccacgaggccttcccaggtgtcatatcctgtgggatcatccctctccttcaagcggcttagtcgttcgagtatgatctatgcaaccccgccatcgccgtcggtctccaatcaggaaccattttccggactcgctctcggtccacctccggtagctctcccgccggttccttttcctaatcctcgcagtcagatcagagaatccattggatcgtttcaaacgtcctcgtctgggattgttccatcggcgcagaacagccgatcatcaatcacgtcttcatcatccttccctaattcccatttgggttccatgtcgggtgtcgaacctagtttcagcttgcctccttcatcctcaaacacgtccatctcgggttcaaacacctctctgtcttcctcgccggcgatatccagacagacgacatcaacagcaatggcagcaggagacaatgtatcgttcaaccaatcgttcgctcttccaacagccttactctccaacactactcctaccgaacgatctcctcggtcgaggacattcgaccaattcttactctcacccagctcttttggagtaaacccagctgcagcgaccaggtgggctgggggaggtacgggaacgagagcgcagggtccgccattggcgttggtcgtcaaccaggacactgatcaagaagacggatataaatgtccggtctgtgtggagaggattggagcagagtttaggatttcgggagaaagaccggacgtgattcctgaatgtggacattccatccatcatgtgtgttttcccttcttctttcttctcaaactttttgtctcagaagtaggcggacttaatctatcactcttctctcccctatctttcttgctccctttcgcgctgcattgttcgtataggactgctttgtgcatgtttatggaccactcccggaagtcaaccggttcggagacgttcggaaggtccagtcatatggagtttgtggggtgtgtcgaaaaccgatgcgggtctccgaggatggcgggtcgagcggaggagctagcgggaaaccaaatagttagtcacgaactctgcccagatttctgcttgtttctcttctgactcttctctctttccttttcaataccttttctagaactggccgctttgacaggcgcaaaaagcatgaacggccctcccccacctttactaaatcctctacacaagcccaaactaagcgtctatggcgaatatgaaaacaatgatggagattccgaaggagacgataacgacccccttgacactgttcgatcaggcgctctgtccgtcaagtccggccaatctgatcacgttcgatacgaagggtcgagcgctgctcagattgtcgtcccctcgatcaccatccttcccgaatttcaaagcgcggtcagagttaacaccggcaaactgatcgtcacagctgtggtgatcgttgaagtccctctcaggtcgaggagagaagagactgaactgctgtcgtcgtcgatatcgatgacggggttgtcgatgacgaacggagggggtaacatcgatgtgggtaggacaagatcagggacaggaaaatcgctctcgtcgtttggatcgacgtcgtcgggaaggaactcgtccgaatcgactctggcccgctcacccagttcatcctcccacgtctcttccttcgcgcccatgtctctctcttcatccggtcaaataacaacagacacgaattacccatccccagagtttctccggagaaaattggtttcgatggatggacaggttggtttgatagataacctgtcgactctactcgcctgtaatcgagctgtcgttcgatccaacctaccttccctagcttcgtctagtggcagcggtagtggggtcaaagaaaaaggatacttgctctacctattcaaagaagctctcttgttggtccaagagcccagtccttcagaatcgacatttctgaaagtcaaggcgagttcgctcttcaaacggatgcctaccgttccttccttcggaagaggaggagcaggagcagggtctttggacgaagtaggtagcgcaggaacgtacaggcttcgtcaaaaaatccttgtgcgtcgaatgagaggtgttcgattgagtagaccggtaggtcttggcccatccggctcggacacctcgatgacgattgtagtggaggacaacagaaggctctccgacctggtcctcatgtttcccaatcaggaaactagaagaacttggtgggatcggatcactcatctgattcctacgatctatcaagacggaactttcacttccggaccgaacccggagtctaaaaagaaacccgacacacactctctttcaaatctcagtcggaacgactctaggtctggctcggtttctaaattcaccaacctgtcgagcttgtcaaccacccatcggcactctcctacgttatccacatcgtcttcaaatggttcgaactttctatcagtaacatcgtccgttcgtccgatgtctgtttccggattaagtatataccattcgaacccaaagacacataccccgattgatatcctcctcatcgtctccctgacatccccttcgatcgccaacgcatccaccgctctccggacaaggatcatcagatcgtctctcgcgtttgtgatggacaagattggatctaaggatcggcttgcactcgtcacatacgagaatggacctcaaggcgttatcaggagaactcccttcttggcggtcggtagggacgggccgggcaggagacgattgagccaaatgttggataggttgggagaggaaagcaaggaggcagatccgttcttggttcctttacatagggaagaaaagtcggatgtcgtctcagccgtcaacgtcggtaagttctatgctatctttcttcttctctcggtgttgcgaaatgttgttgttgttttctgaatgttcacgaacaaacgctgacgtgttgatcctacctttccggtcctgatagctttggacgtggtaatgcagcgaaagacaaagaacccgttgacgggtatcgcgctggtctgtgactcagtcgatagtgtcaaccgaagtcaaatggatctagttcttgccagagcggaagctgccgagtaagcacatttgcattctttttctctatcttcttcatcaacgtggtcattctctttctttggttgacgaacctttttttttatcgcgtcgtctcccatgatagtgtgcctatccattcgattgggtatggaaaatcccatgatccttctcctcttcaattaatatcgaaccatacacacggaacgtacatctttgttgacgattggtgaggctcaatagagaaatctttcacgtagctagttttgcctcatgctgagttgcaaaacgacttacgattgcttccatccgtttgacaggtacgaccttcagatctccttggccggtgtcattggcggtctgatgagtatcgctttaacgcgaatgaagcttcacatctcgacggctgagaatgatttcagcgtccgcaaagtcttcggtgttgattcacatatcccgcctgatgggaaacacgtcgatatcgaacttcgagaactgtgtcatggggaacgaagagaatttttggtcgaactcgaactggacgatagttttgaacacggaggtgggaaggatgagaggggaagaccaaagtcgtcaggttcgattggagggaagggcgcgagtaggttgagcagctcggcgtatacgtcaagtgcgatgattgacgaagttccggttctagagctcgactgctcgttctacgagtgagtatttttttttgtttcttttcttgaaaagtattgggatagagtctccgagcgacgcaaagaaatgctgataatatcattatcttctttctgtatcctcctttcgtgcttagtccatattgctcaaaagcttgttcaagactagcccatccgctacttctccttataacgctactcccatccactgaaacgcatcactctccactctctgaaccgatcatcagccgtcgtcggatggaactgatggcgtccgacacgatcgatcgagctctcctctttgtcagtagacgaaactacaaacgagcccaacggttgatgcaagagactcggatgatcatccggtctgtagccgaagggttgatcgatcagatcgacaacatctcaagaggcgaatacttgagcgcgaagaaggagagaagagacggcttggccagagaatgtttagtggtactgagagcgatcttgatggatgtggattcgatgctggaaggtttagtcgaagaatctgtctcgttgttcgatcgagatcagcgcaacttgggtgcccaacaggtgtgtgctctacgcttctgtccaactccctctccttctttctctcttgctcgcacttatcccgaaaccgatatgtttcttgtccgatcacaggcgatgattcttcggtctcagaaagcgtggactccacgaacggagactgagcgtctatactttacagcagagacagctctcgagcttgtccaacaaagcagttccagcaatcggtcgactgttgattgatcaacctaatttgttttccctttcgtcttcttgcttctctttccttttcttctcctcttttgggattcacagcgacggtctttgggcatttctctgtcattgcaatctgtaaaatctagtggaactttatttttatttcttattctgtttagaatcatatagcatgtcatctgcttttttttcttctccttcttatatacatctgggtcgcaaaaagtttaccatcgatatgtaccacgtcaagtgtggtgacactataaaaccatctaagagtgtattccctgaactagaagtatttcgaacattttaaccctaacaccccagaaacatcgatacttgaaacttccgatttctccagctgctgaaaaaaatatacaatggacggagttctacagcctttgataggggtattttgttgtgttggaccaggttcttttctcatcatccataaggcctactgattgaacgttctcgatttgttttgctttgattctgcttttcaagatgaaaatttattgtgtcgttgttactcgttttgtttactcgtgtacgaaatttgtgtttttttttggtcaaaaagtaaagtgcattggatatgaatcaaatgatttactcggccttggcctttcgtcgctggtctcgctcctcagagatggtgagcttggtacccttacccttggggagggagacggcgggcttggaaccagatccgatgacgaagatgttggacaatcgggtggagaaagttcggtcaaggatgtccttgacgtgaacgatgtcgaaaccaccctcgtgcttctgcttggaaacgatgacaccggttcgaccgttgttgtgtccaccggtgaccatgacgacgtttccggcctcaaacttgacgtggtcgacgatcttgttctgctcaaagtcgaacttgatggtgtcgttgaccttgatggcagggtcggggtatcggatggttcgtccgtcgtgggtgacgacgaagggaacacccttgggtccgagctgaacctttcggaccttgaggagcttgtaaccagcctcctcctgggagattcggtggatggtgaatcgtcccttgatgtcgtacaagattcggaagtgctctccggacttctcgatggtgacaacatccatgaatccgagggggtaggtgtcgtcggttcggacctatgacgttcaggaaagaaaacatttaatacaaggctgcgactaggtaaaagacggctgatagaaagcttacctttccgtcaaccttgatcaatcgctgcttgacaatagcagtgacctctcgtccggtaagagcaagcttaagcctgtttcggaggaagatggacatggggagacactctcggagcttgtggggaccgggggaaggtcggggggcctggaggagaggaagagaattcaatcagccttagga

SEQ ID NO: 492 - DNA, 7641 bp, Xanthophyllomyces dendrorhous
gagttcagtcacacgacaataaaaaaacattaacttacataagttccagagagcttgtccaaaagccagctggaaggagccgcaagtcgcttgactgcattgatatagagtggaagtcgtcagaaaagagtctaaacactctcactaccaatccgactgatgccggtacaaacaggtgtactcaaagccgactctcttatagctttcattctcttgctctctcttgatagaacagacgcaagggagaaaaaagcacaagagagccgactggctgcggaaagaggggtggactcctctctttgatgatcggatactaacgatgtttcttaggtcctcgagcctacagataaaagaacgatatcagacgtctgcctctctaaatgacacagaagcacgatgctcaggacgatgctcaccatttttgcttgatgaaaggtgacttgaaagtggaaaagaagagaaaagaaagtcgagccaaagttcaacacaaaacttttccggcactgcgaaagctgttcaacgtgaccgctcgttacgtgtgacgcgctgcaaattggaactccgattgtatcacgtgtcatacatggtgaccgattagattagattacaatgcccttgtctctttctctatacgtctctgccaaggtctatattccggtgactaagtttgggtggattgagctttggctgatgatcatgatatgaatgtgtggattccttgcggttcctccagatgatatacgaagaagtagtcgcaccatcctgtgcagtacgcgtcgagctcaggtcgcattggagtgcaaacgttgcatccaaaacacagaggagtttgagttgagggaaaagaaacacctggcggagggcaattatggtaggatatagacatgattaagcatcgaaaagctggttgtgtgactgaagatgatgcttcaaaggaagttgtccctctggattgaaacatctctcaatgtcaaacctctggttcagtcttcatggtctcactctctacgttagggttccttgaagtatcaggtcaaacgttttaaaacagcctttcgtcttgtgtaccaaacacactatgctgaacatttttcaaagaaggatacggttgagtaggtagatctcgataatttccctaagattctcatgtggtccgtttcgtagaccatcctggtatctagtcgcagaaaagagacagagtagaaacatatacaatgtatttctgccgaaccagcctttctctatacgtatcgtctataattcaggcacagtcttggtcgagagcagatgatactcacaaacagacatacccttccaagactatacactggcatgatttctgtttgtgaagacaacactcagaacaaacaagaaagggatgtgtcctcagcgttgtgattcctcatacaaatcctattgggacaaacgcgatttgattagacgagccgaatagagaaatttgtagtcaatcttcacatcgtctctcgacggatcatcgtcgtcatcgttgaattcctggacgggtcatcttccctttgcccatcaattgttcaatcgtctgggtcgtcttcttcgttcatctcatccaagccaggctcagtcgctgtggatttgtttcgccaaagatcatcatccttgaaccggtagtggagccttcttccccagaaatgtcttttccctcggccgccgatgtcccaggattatcagacgatcaaacagtcaactctcctcaacggtcaccgtcgatcagagagcgtacagcatcgttcaccaaccggatccgaacgtcgtccacatcgtctctgaacaagcttaaacggtcagcatccagtgcctcggtctcgccgtcaactgtcggccatgcggatggtccacctatctctccttccgccggatcttcttcgagcgagcgaaagaacaggcggatcagtctcagcaaaatcttctcaggcagctcagggaatggccgaaattctgacaagaacaagagtgatcattccgcccccgaagggatttcgcctgattctccgtccagtggctcaaggatgagcctgagtaaatcaatgagcttcggctccttaagaagcaagaaagaagcaaagtaagcgagtctctttcgtggatagggtctgatcctggacccgtccacaaatctcccttcctaatcttgctcacaattgcgttcgctctctctctctgtgcagatccctccatcgttcgtcacaccagtctcaaagaacgcatcggacacctctgacccctgaggcgctccctccacaattgtctaggtcggtcacaccgcctggacaatctccaaacccaagcctacccagatcgacttacacagggatcccttcaccttcctcccgtcgagtcgtctcacccgcacctatgaccgcaaatacctccacgttctcttcggccgcctcatctccttccaggatccctcgaaggatcagagtctcttcaaacccttcacttcctcctcagatagacacgttgacctctcccgttcgagctcgcgcaagcacttcccatatggctacccctgataaccaacaacatctaccgcaagtactccaggcaaaaaccccgatcgctagctcttcttcttctcgatcgctttctcgagcatctcaagcgccttcgttcttattggaggatccattctcaacaccgccacctccagaggtcgtccagccgtcgacctcatctgctaccgctgtctcaccttcttcgtccccttcaacagctttcgatctcctccagatgattcaacgagagcgatcaaacaagtctgctcatactacttcaactaatggggaacgaaccagttcgaatttgaagagatcaagtagtcaagccgagagtatcctaggaggggtactagaacgggaagtagaaggcggaggaagagttagtcgatcaccttcggctaccagacgacggagattgacaggcgatatgatgagacccagagaagtctctctgagcgctaaagcggagagtctgaactcgccagatatgaagagccaggcaggaggaagctcgggtgtggattcgatgattcttacgcctgaatctcctcgttctcaacattcaccggttgcgtttggagaagatagcatcttgggcagaggtgtacaggaagccttggggcctcctctgcgcgaacctgctcgaatcttttcccttccttcgtctccgccatcctcagtgacgccggacaagatccccatcccgttgacggatgagttgatggaagcactcaaattaggccgggtaatgcctcagtcttcacctctccctaaggcagaatctaccgggaaagatgtctcaacagtagatgcaaggtcggaagagatcgaggccgaggaggctgcaccagaacatcaactcgagcgcgccattcctgatgaggccctaacatctgacgaaccggcgaacagagctagaacgccatctgtcgaggcgaggttgcgtgagactgaagtcttcaactctggtgccaatgctaacgtcagctctaacgacagagaagatgtcagggatgatgctccgtccaacctgcccagacttggactcgatcctgaacatgttcccctaaccggacgagcggaacatgctcaagaagttcaagagggagcaggaatcgacgaggacgatgaccatctgatcacgcctacgacaacggaacgatcgagtgcgatctcatcacctagattatcatacatatccgaggaatcctcaaacgccgccggcgatgttggcggtgacggggacaacgatcaggagagtgaaagcggggaggacatcaatagtgaagacatccgtgagatcctgaagggattctcatcgagacaaccaatgtcaggtaggactctggacgaaagccagagtggcacatttgaaaatgtcgaggggcataaaaacgttgagaacgagaagaacgactatatgcccgaagctagaggcggtcatcaggactcatcgaaggcaccaggtatgttctcttctattcgtttcttgttcttcggtagtttcgctttcttttcttcattcttcattttgctttgagctcgaagcaaggagtcgatcatcagaggcctatattgaatccacacatgtccacgtacattcgttgggtacacagattcatcaatctcagcatcatcggtccaagtatctaatacgacgaccaaacctatatccgacgagcacgaacctacactggtttccgcgatgagattacccaaggaatcttccggactttcagagtccatccagtcggacctctcgtccactcgaaatgacagtcggtctgaaccgatgccttcctcaggatcatccgccaaatcccctcctgttgttgacgatgctccgaccacctccgatgaccatagccttcttggacgagaagaggaagtgaaacatatcaaggtggagcaaccagtagatgagaagtcaggtgacgaccaacctgttgacgtcctttctcctttgaccgagggcgcgagatctgacttgagaagtcagggagaagatgacgctccacaagactcaccacagaagaaagaagagggcgagaggacacctgtcggtcttcagtccgaatctttgcttggcgatggttcgtcgcaaaagcaagttgaaacggacgaggcgagacaggaggtcgctcacgagtcaagtagattagacgataagactgaggaagcgaaggagggtaagtcttctctgatgctcttcttctcagcattcctctttttcgtcgattgcgaccgactttatggttttttttttgcgcaacaggatttcacactaccttggaacaaacgacagattgtccatcgcctctgatctcatcttcatccgaaaatcctcttgatgccgaacctactaataacacagaagactctcagatcgagaagcaagaagtgcctgattgtcagttcacatctttgacgttctatcttaatattgacagaataaaaactcacaaacatggcttctttcaaactgtccttgacgctggtacacgaacagctccgatcttgccaaaatacctgccactccggctgttaacctcgtcaagcattcctactgataactcacatctcgaccaaaaccctgtttctctgaacacaccaactcatgacccagaattggcatcgactcatctttcagacgagcataatcaaaatttctcaggtctacctgccgatgatgttgtacacgaccacaaatctgaatctgcaggcctggtgaatgaaccagcgaaagaggcagaaatcgaaaaagcagagagagatattccaacttacttaacaccagtagtcaagatatcgtcgagtctaacgcctcaaagctcaccagaggcgatccaggaaggcatgtatgatcttggagaacgtatgtaatttctcatgctacccctttctctcctttctgtccagctatccatatcatgtgatgctgatgtcccccctcgataaatacttctgtaaagcttcctctcctttgaatataacagatcaacaaacggtttctcacaaaaccagtcctgtcgactccaaactcaagctttcgtccgatccatcatcagactctccaggcgctatcatacttcctcctgacgtcccctctactaccactatcgacgatgtttctccttcaaccatcaaggagtccatgccaacgactccatctttagagagggaggatagagccattcaagaaggtgcttctgcatcgatagcagagcagactctaaagcaagtgctagacccgaagagggttctgatcgaagacaagactggagagttggcttcttacgaagctcgtatcgcgagcgccgataggaacctagttgacaaaggtaggtgttcttgtgtcttcatcttcctttctttgttggtcttttccggttcgtttcaagtctgactttgaccactctttcaatacatcaatggatttctacggcgcatattttcttgtcaaggcaaagaacaccgacaggactctcttgtaagagacagcggcgctcagaccaagctgacaagatctgaatcttccgaatctcttcccaaggagcctttgaacaaggcattcccttctcaccatatcagtgaagatcttcaacatgaagaacagccaggttcagctctgccttccactgcagaggacgatcccggggtttcgcttggaaaagaacaagaccggaaagccgaaatatcttccgctactcttccctcgagcacgcatccaacctcgatgaacacccaattcagtgtgaatggagagactaaagacgaaccgccgaaacatttttctgatgaactgtcggccgagaccaccccttctatttctaagacccatcctcaacctctcgaaccaaacacagcagtcatatccgatcaaccacttccacccaaagctacatctacgcccttggtttcttctcctacaccttttgtagcagccgatgtatcctctagctcatcaaggccgaaccttccatctcgggccctcaccacgcccacaagatcttcaacccctcagcgaccccagcttcccagagcagccaccacaaactcgatcaacacgttcgaacttcccaatccatttgctagcttattgaattctcagcgatttttcattagaatcccggtttcgttgcttcctacgaggcttgcttctttcgcgcaacaacccaccttctcaattccatccttctttcctggagcggttgacccctcggaggggtctcgttctcgatcacattctccggattccgtacagacaatcggctatgcctcaacctcgaacgacggaacagaaccagtatccggattcggatctggattagaatcagggaaggcgttattaggaactgcagcgagtatagtcgggacatctgtcaaatggggatttggctggccggtgcttgttccgttaagagctggccaatacgtgttgacgacgttgagtagtcatgcaggcctcggggtggattctgcggtcagggagaaggacaagtcagtaacaacagtggcaaattcataggactcatctcttccgtttccttcctctctctttacctttgctgtcctcgtcaagataaaatagaataaaaaacgagcttttacgacacaaacctcttcttgctatgtatttctcacttcctctttcttcttccctatgcatattgtatcataatccgcttgctctgcttctccatacactctcgtttctcacccttcatttccgttacagaaacgcaaactcgttaacactttctaaatatacgacctcgacgcccttctgccctttccttttctacctaacgcgcttctccatatgcaccttgtcttgttcaattctttatgattatcatgaatgactcctcaatggcgatcctgaagaaagctaaaagaaatttatgaatacttaggaacttcctttgagattcatcaggtcgagtggaactcgatttgaaatggaacatatatatgatcatccctcgagctggtatcgtgtgagaaacaaaccgggcagggcatttacagcaagtatacaaataaggaatttcaattcaaagagaaaagaagggtgggtgggacatctagggagaacatgttg
